United States Patent Application Publication US 2013/0034624 A1 - sequence listing, part 14

SEQ ID NO: 45760 - DNA, 1564 bp, Bovine  19866881023886
  misc_feature (1)..(1): n is a, c, g, or t
nactgatggtgaatgatgcatttacccaatcatggtgcctctccatttccacctgtcgtaaaatcttcatggggtcatatctacagttttatctggttaaagcaacaatcctatactttcggacagggactcagtagttaagataacccatcatcaacatgtcccctgggtctgttgtcatgtgtaaagcttattttccttcctagagaaccctcctcagttacttcagtggttttgccattctttcatcaccctggtgatccacattgcatcaagcccctgccagtataggtcaagggttgtatgggattccttttctcaggacttaatcactagtggtgtgtagcctggggcagatctaggttttgtgggaccttgaagcttatttagagagccctcttgaaagaaaagaattaaaactttgaatacaaaattagacacagggccttgaaaagggcctgtgcatgtcagattggaggagaaggggatgacagagcatgagatggttggatggcatcaccaactcaatggacatgagtttgagcaaactcctggcaatggtgaaggacagggaaacctggcgtgttgcggtccatggggtcacaaagaatcagacatgactgtgcaactgaataacaacaaagaatgttgggggtcatgacacttacgcttcattccccgcataggaagtttgccctggagaccagtgttagaagaccttattcgagactgggaactgctctagaccacaagtggggtcttgagcagatcattttctcattgggttttagatccttttctgtaaagtaaactaggttattctaggatcccttctacgtctcaccttctaagttcagcagattaatagcttccagagaactggcaactgggctccccttgtggctcagttggtaaagaatcctcctgcaatgcaggagacctgggttcaatccctgggttgggaagatcccctggagaagagaaaggctacccactccagtactctggtctgaagaattccatgaaccacagtccatggggttgcaaagagtcggacatgactgagtgactttcagtttcagggaactggtaaagtgagttccaagagttcagtcagtggagctccaggtaagataattgtttcctttatgaaatgaataggttgcacttgatggcctttaaggctatcttccagttctaatcttttacgtaaagatttctatttctgatttctgcctgtggtttcctttagccagctgggctattgcctcctcactggaagctgcggatctaaaagacaaagcacctctgtaaaaggagggcagctgggctaatggccattgcataggtggtttctctggagtgctttattctgagtgcctttagcttcagtgtcaacacaggcagtatgctgaaattagacaaagaggagacccacaaagcaaagggctttggagaccaaagacccagggagcagcagccaccctaacctttccccttagcgctgtccaggtaggaagctcactacgctgtgcccgaggttttaacaagagttggatgctga

SEQ ID NO: 45761 - DNA, 1159 bp, Bovine  19866880491755
  misc_feature (1)..(1): n is a, c, g, or t
ntgccccaaattattttggaatgttcctccccatggttaagacctagggagagattgagccatcaggtcattacaggctttctaatctgtacacaccacactccgttgtgtaacatttgctgttatagaaatgtgaactacctttgcataatttagcatggctgtattcatttcttttggaaagctttaattcccattttgttcctacagataagaaacaagacggagctattgagaatcgcaacaaagggtaaattcaggaggttaaaagtacacttagcttattcttattatagccaaaactatttctcttgtgtactgtattcatccaaaagtaggatacttgtagcagagaaaattaacaacctgtattacttgggtgtatgtctctctggtcagtgcctgactcatgctgccttaatgttttgataagattttaattatggcatgtggtagtaaacttagaaagctccagatgtaggtaactttaaacttaaacatttcaggcattttatcattggttactatgtgattgctggcagaaatgcttaagtaacaaaatatataatgtaaattttttggcatctatttaagagtctgtaagcatatgtacatttctcgtttgtgtggtctcacatgatgttctacattatggttataacttattgggaggaatttatggtgtttggaatgacaacacacaggaggagagatgattgggtatttcgctctttcgggactgtatttcttcatcgcctcatctctatttcctagcacagcattctcaaatctggtacagtttcaaaatgtagcgtcactattgtcttattttctctgggtgggcacagacatacacaccaaggtgaatgtttagatctttatgtttctgtaagaaattggattcccgcccccccgcccccacacacaccaaattgctttagaatgttaacagttatgtgtgcacttcaacatagcaaaagcccaggatggtgcagccatggaaatgcagcctctgaagagtgaagaaggtggagatggtgatgagaaagacaaaaagaaagcaaatttgccaaaaaaggaaaaatctgttttacagggggaaactgacgaaactagctgttcagattggcaaagcaggtatgatatatataagcaaata

SEQ ID NO: 45762 - DNA, 1011 bp, Bovine  19866880546478
  misc_feature (1)..(1): n is a, c, g, or t
nttccaagcggggttgacttagagaaacctcgggaaaagcggtccgtcgagcgacgccactgaaggcacaggcatgttcggcctctttcaggtcaccagcgcagacacgcctcggccgcagcgcctcccgcctccgggcggttcccccgcaccccggtaccgccgcagcctcccgcactgcacgccgggaacggcctacctccacttctcagagacttcatcgtcctaaaagtcccggcctccaagcagaactgcattttgggatttggagtcctcacctcacgccttcacttcgtccataacacacagtgcagggaactcgcgggggaatctgaacgtaaagcatcacccacggtcgtgaaatgtaggcatcgctagcatccgggctcttgttgcggcctcggcggggtggggaatggtgtcgcctagcagccgccgtcgctattactcgctccggaccagttggctggatccagtgtccgataggaacggcgctggagagcggtcaggtttggcagctgggccgggccgagtgggtatggtagctgaacggccgccgctggttgccaggtttggtgtaggtaggtgggtcctggtgagcgcaaaccgatagtctcttcccacgcaggttctttaaccttcggggcccagatagacaacagcttagtttccccattccttagccgcctgtccgcaatcggtttgctttcctttttctgcagccctgatttcccaggcccaactgcactcgtttcaatcgtaaatttcctcactttttaaaaaaattctagctcttgtttctcagaatcagggctcaatttcagcctttcaagcacccccgcgcttggcaccattaggtgttcgaggtggtaagggggcgtggaggagcgggactcagaatcttagttctgacttagattaagcgtggaagtttaagcgtggaagccttcgtaagttatttgaccgataaaatatctgatattttttgcaactgttgtacttttcatacag

SEQ ID NO: 45763 - DNA, 1358 bp, Bovine  19866880652573
  misc_feature (1)..(1): n is a, c, g, or t
naatgatcatttgaaactttagtctcaataatgttctttgtagcatctgtgtctgaatgaaagtctcttatgtgttagactgcaaaataaaattgtataaatatgaggaaaaacatagataaggtaggagttaaggagctaaggagactatcaatgtgaaaaacaaaaaggttaaaaagatgacataaaaataggataaacattttaaacacttaaatgcatcatactaaattctacagttagtaagcattaaatgcactaacattttaattcaccttttgtttgatattttctgccatccatgggctaccaaaatacagaaccccatgctaggaacatataatactcgctcagcaacaacaaatccaactgggaaaaaaagatttgatgcaggaataaatggtaatgccattaaacaaagcgcctacaaagagaaaaaagataatttattaaattaaaaaatatacacacatcaacagtcaaatccaaatattttatcatttaatctggataatgtactggtggatcaattttaataacactataaagaatactgatttaaacataaagaaggaaacttaaggatggtaacaataaacatgaggatgtatgtcagcaaggtgagatgaagtcttcctaaatagtattagaccttacacctcagcctcatcagataaaaaaaagtttttgaaaatatatctaaaaaaaattagtaatttttatatatctaactaatgtgcacaaagaatcagacacgactgagcgattaacgatttacataacttatgtgcacgtggtaaaaacaaactgacaggaaaagatattagtactactactatgtgtaaggaacactggaaattgataagctacatctcaaacaagacagcagcctacttctacatgttacttcagggctgctctgcatagcattctgatgggtcacatacatttaaacgacttaaaaataaaactggcccttttaaatcaacagtcatttattccataagaatttctaaatttccaacactgtgcactgtgttagaaataaacatcacaaaatgcgtagacgtttttgccattttgagaatgggatggcatatggtttccagattatagtcattacaaaagataagacaaaataactagcacacaaataacttatggaaagaaataggctggttgtcagtaggatatctgtttccatggacatctgcttccatattctgttactctgatttgttttatagtaccttgtggaataaacatgttgttttttcaatttcagaagtctgagagtcttctaatagtttgaggaagcaatgttttttattatacattactactaaaatcgatgtaga

SEQ ID NO: 45764 - DNA, 1122 bp, Bovine  19866880674760
  misc_feature (1)..(1): n is a, c, g, or t
nctacttcactggttgttgttgattagttgctaagttgtgtcccattctttgtgaccctatggactgtagcccactaggctcctctgtccctgggattcttcaggcaaaaatactggagtgcattgccatgattcactccaagggatcttcccaacccaaggactgaacctgcatctcctgtggctcctgcattgccggcggattctttacagctgagccaccagaggatcctagggcaaaaaaaaaaaaaaaaaaaaatggcctggattcaacaaaccacacagaatgggagtaaaagaaaagataattcattagcaaggtgtgagatgaattagaagggccatcaaaataatggaggcatggtgaagccagaaagaaaccaaatactattttgtggaaccaatatgatttaaatgcaaagagcaaaggacagaggcaatcccaagaattagaattacctgtatgattatggcctgtgtgtgtgtgcatgtgtagaaatggagcctcaaaaaggctgagaaaggtcacagtgttatggcagaatgtgggttcaaagctaagtcttcggctttgaatttggtgtacagcaaaagggcatggttcttctctaaatacaccatgagcaaaggaacaggatctgctagagagtgtcctgataaaagagaaaagatacaagatacaatagaagaagacaccactatctttgaagaggaaaaacacaataggaaataagaatactgttaagacaaataataagatataagctggataaatatatgctaaaaaggtatataggaaagatgcactcagagtgcgtagcgttgtttttaatatatcatttgttaacacagagtccaaaaattatctcatattctgtgataatattaggagtacgccctgaagtcaaaaaaagattaagtgataagatattttaaatctgaaatgttaatattttccatattatttagaaattggatgtgatgtttttccatccaagagtgtcaaatgctgtctacctctgtagacaagttgttcttgaacatttatctcagaacagagccatcatcaactcacagcttagtcagaagttcaagaacgaaacccagagactgtccatataa

SEQ ID NO: 45765 - DNA, 1589 bp, Bovine  19866880681258
  misc_feature (1)..(1): n is a, c, g, or t
ntgtatttgtctgttatttcacttagtataatatcctttaggtttatacatgttgtcacaattgacaggatttcattctttttttatgcctaatgttccattttctatatgtgtaccctatatctttatccattcatggggaggtaattagtttaattataacaggtaagagtaaaataaataaaagaattagcaatgaatatcgtaagaagcatcagaatatataccatgatgatttgagtacaagtcctgagtgcactatggagtattgttgacaggcaaatgaagacagacccaaggtcattaaagctataataacaaaatccaatatagcgatcagaagcagattgattagcaggtgaaaagaagctaagacagtaactgtgcaagttaccagatacagcgtggccatttgacaaacactgaatgattgtggccactggtgtacagcagtggttggtggacttttctctaaaaggctacatagtaaatatttagttttgggggggcatatctctcaaagaccgtagatagtgcttaaatgaatgggttggctgtgttccattgaaacagtttacaaaaataggcatttggctggatttggtctgaaggttaaagtttgccaactcctggtatagagcacttgaagtagaatttagacttagtgggataaagtgccaactggtgagtgaaggcagttgtaatatatttctcttcaaggaattagactttttggtaaatttatcccctcagtgttttaagaggctttttttttacttggagagagaaattttctaattctttttgaaacttctgaatggctaatggcaaatttttatgattttagggttaggaagcaaaaagcatccattacatcttcttataccacatggagcgtttcaaataagaaatctacctaccttgaagcacagtgatctgttgtcctggtttgatggttgcagagagggtaaaattgaaggaatagtatggcattgcaatgatggttgtttaatcaaggtaatggcagaaaataatttgtaaggttatgtcactttatgttcctgaaacaaagtagaagtggcactgcagtactctacaaattgcagcagttctgatatgcaataatgtcttcatcaaattgcagtaattctgatactcagtaatgtcttcatctcacgtgccaccatctttatacaataacattgtttcccaatatgcgttctgtggggctttggttctttcagatgtgcttcagaattagtgatgaaaacatctggaagaccctacatactacatattccttcttggaaattcatgttgaacatatgtgttctctgaatcatctgtactataatgacttcacgtgaaagcatttctcaaacttgcttgattatagaatttgttaagagagtgccaaggtgacagttaatatgtacagaataaattattttacactttttgccctttctgtgtcctggacttgtctatttaatttcacataggttcacactgtaatgttcaaaactggaactaatccagtttggaccaacccagactccaaacaattaactaagccaaaaacttagaaa

SEQ ID NO: 45766 - DNA, 919 bp, Bovine  19866880691217
  misc_feature (1)..(1): n is a, c, g, or t
ntacctaagaactcgaagctcccgttgaaggccttgctctgtctcatcaccttcaggaacatgtttgagaatctcaatctttgtgcacaatgaaaagttagaagacaaagtttgacatggaaatatggggttttataaagatccatactttcaataaagcataaatttataatctgagctttcaaaagtacatatgattacacatctatggtgactctatccactattaattcaacaattatttactgacgaactattgcatgccaggcactgtcctaggcacactggatacagcagtggaaaaaccaggcaaaatcccttcctgcatgttcctgtggttctctcagtgtcagtgggggaagacagtgagcatgtgatgtgatgtgattggtttacatttcaagatggaggagcctcttaagaaaaataacagagtagcaggacagagagtgactggaacactgtgtggggattgggagggtctgaggagcctgcgtttaaggagagatgccagtggggagtgaggtatgggaatatttgggcaaacagtattctaaacaagggaaacaaaagcagagccctgaataaaccaaatgagtttggtctgttccaaggactgaaaggagttactgtggctagaacactaagtgccagagaaagtaaagacgaggccagagaggagaccagatgtcagaccatgtaggtccctgccggctacgagagaacttcaggatgttatgctagggtatggggaccactggaagattctaagggtggactgctatgatgtgctttatactttaaaaggactacttggtaaatacgtggaaaatatgtcaggggtagggcttcccagggcttccctgatatctcatttggtaaagaatccgcctacaatgcaggaaaccctggttcgatt

SEQ ID NO: 45767 - DNA, 3072 bp, Bovine  19866880720800
  misc_feature (1)..(1): n is a, c, g, or t
nactgtatcttagttttgcacattgagttttaaaccagctttttcactctcctctttcaccttcatcaagaggttctttagtccctcttcactttctgccattacagtgctatcatctgcatatttgaggctgttaatagttctcccagaaatcttgattccggcttgtgactcatgcagcctgacacatataggacttaataaattttaattcccttccttttctcttgttttcataaaagtttatattaaatagttcaaaattaaatctactttaccatttattatggcttaaaataaaagtacagtcattaaaatatagttgccttaaatacatataaaacctttatttccttcagagtgtctccgcaaatacctccttctgtaatcatcacaaccgtatgaagggcagataaaaccatcttcacttaacaactgaagaaagtaaagcttaggctttcagctagtaaaagacagagctagatgtaaaaccaagatcttgtcactttccagtccaataatccaattcaagcaatattaatttacagtcttcatcccataagtcactagaacacataacaatctcattctttatgttataaataaaactttttaaatgtgcaaagttaaaaatattttattctaaggtaccacaagtctagagttactttattcagttagtgccaaaggtttaagaatcaccttataggtacgatctactgagaaaccaaaaagagcctatagcaagcatgtttgacacatagtaagttaaaatctggtttcaaaatttgctccaggaaattgaaagttgactttctacagtaagatagcctagtctttcacaaaatgaatgaagtagaaattttaaattgaggacttattctggttatgtggctcaaaagtttctaaacacagaaaattcaaaatatagaagaaaaatacaagtaaacataatatataccgttgatcaacagatcttatttaaaaacttaacacaactcatttcttcaaattatgaataatagtgatagggcttaagaactacatatagtcaaatcatcacaaatcgaaaaactagttttcatacataaatcattaaagaaacccttaccaatatttttgatgtataagcacaattcacagaaattcctgttacaagataggacaaaaatatttggtggaatagcttctgggtcaggaatctttttataatgtttttcatttatgtaagcttgaacaactgtcattcgtgttcattgtcaatgttcctgtcttatctgaacaaatagctgtagcatttcccatggtttcacaagcatccagatgccttactaaattattatctttcatcattttctacagtgacaaaaaaaagaggtagttaagctacacataaaaccaataacctcattatatcaaaatgattgtaaactgctttaaaatcagaactataactcccaactttacttggatacatagtataaagcaccgatttaatactggaagaatttaatataaatggcctattcaaataagctaaacaaagtactagctttctgtggcttcagtaagtttcccactacataacataatctagtaaatgaaagcaaatcatgctgacatgcctccaacagcttctaggaagcatcctcaaattctaagagcaatgacaatttgtactcacagccatgtaactgtatttacatgtaaggtttaagtctccttgttaagtggaaaacaaaagattcttgaatcagtcaataagaaaaaagtagcttttatcagttaaaatatagattttgtgggtatgtagttgcctgaattttttttttctctttttgactctgacagattgaggtaacatatcaaaaccagcaagggtcacttttatcttctccaaatggtggtacattggcattctcatcctggaggatcatctcttcctcttacttataagaaaaagatagtttctaaagaaaataagagttttacctatagttccaaaaggcatttaggctaaaatgcttaataactgattcctgaaacattaactggaatgggttaaaaactgcaaagagttattttacaaagtatgttctgtgtctactaatgtgcaagatattgcaagaaactcgttccttgaagtttggggaaggaagattactgtgatctgtgttaatactaatgattaaaacaaagttctgcagtaaaaaaaaaaaaggtgttcagttttgcaaaacactaacagaggagccataaggacgacacctcagtgaagagaaaagtggtaacgttcgggctaaatgaacatttaatgaaagcttaaagaacaatagtcaaaatgctcctactcattttctgtcaaaggaatgcaaatcaattctgcctatatctttttgatcaactgaaaaatcagtatcactaatgagtactcaaaatgaactaatttcagtactgataaaatgattttacccatgtgtctaaaacttacatttaccctcaattgttttctaattattttaagacatcaagtagatgaacagatagtatctcactattactttgatacattcaccacttcatttttgaaacaaaagatgtgaaatgcctgaatataaacttaaacaggaagccaaaaaatattcttatcaagacaagtctgctaaaaattcttgggaacactgaagatgagagtgcaagagcagaaactatgattaattactttgtattgctttctgtctttaatactacttaggaagaaatactaattaacattagaaaactgacaaaagcagcattctttcattaggtataattttatatgtgaagccattttgaaagaaagatcaaaactgtccaggctgaagctgtaagcaaactagatgtccatcaacagatgaatggataaagatgtggtacatacatacaatggaatattactcagccattaaaaagaacgaatttgagttagttccagtgaagtggatgagcccagagcctgttatacaggataagtaagtcagaaagagaaaaacaaatatagtatattaatgcatatataggaatatatat

SEQ ID NO: 45768 - DNA, 1082 bp, Bovine  19866880731330
  misc_feature (1)..(1): n is a, c, g, or t
nttaatatactacctcaaacttaattgtgtaacattccctttattaagcttctagattctaggtcagaaatatgggtaggagactttgtagtggctcatctctgctccacagtgtctggagcttccaccaggagtctcagatggcgggaagggactagaactgttcgggaccatacttctttacccatatctggtgcctggactgaaactgggttcagttcagatggtcaaccagaatatgtacccatgatctcaaagtgaccctgggcttcttcacagagttggcagcctggattctgagaagggatacacatgaggagactgggcattccaagacaaccaggcagaaacaacacggcggccgcttgtggccaagcctcatgtctcctatgctgctgctccggtactctgttgagtgggctgtccagattcaagggtagggactcgaacttcatctctccatgggagtggtgtccaaaaatttgcaactgttttacagctgctgcctgatgccttgcgtacattgctggatcatagttttgtttcctcaaagccttactaaacaatacagcttccagcttttgaagttttattagcacacatggtgagagatggtgtttcactgtagatttaatttacatttctcttatgaatgacattgagcatctttccctgtttttaaggtctgtttttatattttagtgtatttctgacttttttataggatatttggttttttccccatcaacctaaaaaataccttcagtgtttaaggaaaattagcattggtactctggcctccaaagtgttggtagaattactcggaaacctttgaacctggtgctcttctgtagaggtttttctttggaggtttttcttttgataagctgtattttcttaagaaattacccatttcatctaggttttaagatttatttttatagaggcctgtaatctattttttgaagtttcctatgcatagttttttcctgttgtcgctttattttagtatatttgcgcattctttctactttgacagcctgtataacgtgttcattctcttcttttaaccacgttctcat

SEQ ID NO: 45769 - DNA, 1439 bp, Bovine  19866880809256
  misc_feature (1)..(1): n is a, c, g, or t
ntatgtcttctctgttttgttctattttatttctcaaagtttggtcatgagccactgaattgattttagactcacaaatagactacagcccaagatccaaaaagagcactgtccttgttctttcttcaccattactgaccctgcagttttgagctttcttttttccctcctcttgtcttcttctaaactctttcatgctgactttaatctctccctgcagttctcatcccttaaatctacacagctagctcccttgtatcattcggctcctggatcaaatctcatggacacttcaaaagggcctctgttcgcttaaccacgattagccttcttttttatttgatagcacatcatcatattttattttcctcatggcatttgatatctgaaattaactatttgtgttttattaactgaattcttcatatactgtccacacctgccagtctgaatataggttctctaaggagagagaccttatatgtcttattcatcatcacatccttagcttcgaaaacagggtaggtgcttaaatagttgaattaatgagcagcacttggcttaaaattttatcttatgaaagttaagcttttatcatacttcagcggtgttgatatgtcaaataggcatgattcatgggtaacacataatacttaagtttctatatgtggcttgcctactgtatgttataattaatagcagtaaccattggttgaggatgaacaagttttagctactgctcaaccttctttataaatgtcttctcatgtaatccttgcaacaactctgcagtaagtggtggtctcctaatttgacagatgaagaaactgagtctcaaacataagtaacttgccttaggtcgagatttaatctttccagtttcctccctcttaactagcaccttgggctgcctccctatcctgaagatgagaatctttggaggcagagaacttgaaattaacagagttagcatcgtccccactgtggaatgctttgagtcaataaggtgttcagagctctacataaaattaacggaacatataagcatcataattacatgtctgttgccatcaattcagaatcttttttgataagcattttctttctttccaaacagtttgtggagacgtttctgttggagaggaagaaggtgaaggtgaaactggttggattgaaggagcggcaatcctcttgtcagtggtgtgtgtggtgttagtaacagcatttaatgactggagtaaggaaaagcagttcagaggtctgcagagtcgaattgaacaagaacagaagttcacagtcatcaggggcggtcaggtcattcagatacccgtagctgacattactgttggagatattgctcaagtgaaatatggtaagtaaaacagggcagtccatgtgacgcatgatgtgattttattggaatcttgttcacagcttag

SEQ ID NO: 45770 - DNA, 2916 bp, Bovine  19866880829732
  misc_feature (1)..(1): n is a, c, g, or t
ngagatcttccctacccaaagatcgaacctggttctccttcactgcaggcagattgcttacagactgagccaccagggaagcctaagaatactggagagggtagcctatcccttctccaggggattttcccaacccaggaatcgaaccagggtctcctacactgcaggtggattctttaccagggaagaccccagtgctccatggattccctcaaatatgtcttccacttcaaacttctgatttcttattgtctatacccaaaagtttccccaaaccccaaaattctgtttatcctaagcttagctaactttcttggctttccaaacatgtacttctcttttaatccatacttaataaatggtgttattaccactgtaggtgcctcaggtaaaaatgcagaagtcattttgaacacttgtttcctcaatattctcgaccaatctctcaacacaccatattgattctactttcaaaatatatctgaatttccagtcaccccctcccactacaattaccttgattcaggattttagtagtcttttgtaactattatctcttctgcatgaaacgctctacctggtcaacacatttttcaaaacatgagttaaactcatttgttccgtatactgtagcatcttgttcatgactcggtagtagccttagccactttgcagtattaatcattcatgttaggtctgtgcttagttttctttttttcacagtttatatgacatctcattaatttctttagtcaacaagtatatatgcaactgatgtacaaagcagacattatcttagaactcgtggagcatataagtgacgaagatggataataaagaaaataattatagatagaacaatgagcacaatgataggtggatgacaggcagccatgaaaatacataatgtaatcaaatgaggttagaaaaaggttttcctgaggaaataacgtttatctgagacctgaaagttgagttagagtcagcgagattgagaaatgggaaggtagggttataagggagaatgttccatttagaggaaatagcatatggaaacactcggaggccacaaagaaagggaaagggttgaaataaaactataaagttatcagtaaacatctactgagtgaatataaggggacatgagtccatttatgctgagcattctgaagaacataaaactctttttggtttaattacacaaaaaacttttacaatagtttgtggacttctctgaattcttaaatagaaaccacataatttcacttctatttgacaattcaaaattatcaataataatttcagtaattgtattgatgtggcagtcattattagctgcctttattcatatccccaaactctcttctcctttgttaataaaacctgatctaaaatgattttatatgtaaaaataacctcttttatagtcatggtgactcctccatggatagcactggtgtagtctccacaccctcgccagtggcaactctgtacttttttgggtagtccttattttcattttgtatgagctcatgctccaatgctaaggcagaaaatatcccaaatattcagaagaatttaaaggtactattaaaacttattccatttacattttgagcttctgtgaatatatcaattaagaatgctttcaggtacaagtaacagaaaactagaaccacaatgacttaatctcaggatactgttttcccaacaagaaatccggagataaatggcagttcagtgatttcacaagaatcttagctctttccttcctgccattccaccactctcggctgttggcttttattttccaacttagcacctcatgaggacaagatggctgccaccacttcaagcaccatggcctcaaacaagtgttcaaaggaaaacaaggagggaaggactcaaaacacttttttcttacaccctctctcttttattatgaaagaaatgttttttcagaaacctctttaactcacttcctcatatttcatactcagcaaaagtaggtcacttacatatgacaagatcaatcactggcataaaggactggagttgctttgttgccttagataagggcttgacaaactatggtcctggaccaaacccagactgatgcctgtttttgtgaataaagttttattggaacacagccattcacaacccattcacatacatactgactacggttgttttgtactacagtggcaaaactggtgggtggtgagagatcatatgaactgcaaaagccccaaaatatttattacctggctttttattttaaaaaaaattgtcttcctctagtgtagactatgattaattccctaaagctggccataaagccaggattctttaaacaaaaagaagaaagaatggctcttggaaaggcaattaatatggactagtccctccctcactgcctcaccatctttcctaacatcatttatctggtaataatgcaaatttcaacaaatggccaagaagataccctttttgaaaacttttttttttcccccaaattgtcagtgtggaatctttaccttgagtttccattgccattccatccaatctttaattacatccctaatctctaatctcttctttcaagactttctttcaacctttagaaattaagacaaattcttcagaatcacaggccctggagggagtgtggcatagaattcaattactgaataaaattgaatttcaatttttcccccatcattacagacacattactctagtgtctgatttcctatttccttccctggaaggacactgtgggcctggttggtgttttcccccccaagtgtaggccactctcctcggacctaagggagaaaagctaaaaaaaaatttcttagaaatattagtaacaattgaagatgcaccatcagagctaaataagaagagggg

SEQ ID NO: 45771 - DNA, 1050 bp, Bovine  19866880846831
  misc_feature (1)..(1): n is a, c, g, or t
nttcagtgtgacaagtgctacataataattatctccattctttagattaggaaatggaggcttggagaaattcagtagcttgtctgctatcacagggttaggggcagtgccagcattgaacatgcaggtctgtctgacatctaaagaccacaaccccaaccccttcatcctctaacttacccatgtccaactagaaaataggtgcttagttattttcaaccatcctacatgtataaaacacatgtgaaagtcaagtgatactaaccttatttggtaaaataaacaacatgatttatagactttgtccaatagaaagctttctttacttattatttatacctcattttgtcatagagataaaactaagatttaataccaaaaaatacgtcttcataaaaatcagctggtcagaaaccaaaatggcttaagcagaagatgtttgaagcagagttacactgactgtcatgacttgtgtcattagaaaccttctttcttcccagcgcctaatgggaaagcattaagttgacctcagctccaagttccccggggtttggcaagccatctcttcctaagggctggtatgaccacacaagcagttccaacagctgccctgggactaggccacttcgggtgtggccgttgagaccagcgtgggtggttgcagttagcagaccacagggccaggttcctgcaatggtcctctcagaacccagatggccaagagggctctcttccactcctttcacacaccctacttcatccagaaaagttggttggagagagggagacctccattccagctagaagaacaagttgaggagaaaattccacccagtgtgggggcgtgccagccttccaagcaacctgcctgctgattcccaggagcgtctgtcaatatccatgtcagcttcctcccacagtggtgactcagccaggacttgctctgctgtggtggtgggcctgtccttttcattcctccatgggtttcctaggagtcgaaggagtgtatgcagttggcagggaaggtttcacagtcagcaaagaacagag

SEQ ID NO: 45772 - DNA, 1082 bp, Bovine  19866880892576
  misc_feature (1)..(1): n is a, c, g, or t
ngttgtttttgtttttccgatgttcttaattgattgcctgcattgacaattagatttcactaaaaacattcacattattagtatctagcaaaactagaccctgattcccatatggtaacactatcttgatgctttacctgccctcactggtttgccacagtctctatcactccctatagggccacaccactgtcatttatccgcattggtggccctttattcctgtttctttcagagtaaaactaagagcaaagtgaaacatgtttattgctatcaagtgtggaataaagtaaaattgataaggattcactctcaagaagaattcttctcactcaggtctttttcactcaatatgtgttacctacctgaccccgtaggtgtttgtatggaacctgtagcctctcctaaaattctagagctgtaacaaaccagcactttcgaccaggtaatcatcttttcctcattgtatgtgtgagttaagacccctcagagacagtgacatgcccaagattttagttagaaacaaatttgaggctgaatcacatgtagagttttatttctttatttttcagacttctaaacattttatcatttttgtcttaatttttaaatgatagaaattagtgtcaattctcttcagagtaaacaaactctctgatacctcttccctctacaaaatacatatgtaattcatggctttttaaatgcatattgttagcatttttccaataatgtcaagaagctttttagttcaagaagctttagttttgttgcaatgctcatagtgaattttaaaagaccatttgaaaagtactttgcattgatggttttcctttttgtcaagaatggagaacctggacagaatttgttcctgaaggccatgcaacctcgaaacctgcatgtggaggtggttttgctgttgtcagttgcagatatggtttagcgtatcaggaaaagactgcactggctcttgactacctgtgaaaccagaagccctgtgaataatagattcatgtaatgtgtctgtaattacttctggctattcatttcaagcttctccacaacattacagaatacaaaca

SEQ ID NO: 45773 - DNA, 1302 bp, Bovine  19866880893929
  misc_feature (1)..(1): n is a, c, g, or t
ncccaggtgttgccgacgctgctggttgcgcccatgcacagtctgaggagcaagttcttagatactgcggtagctgaggttaatatgtgtgctgtgggagattggatggaaaaagtggattttaagaagcttcactgtgatttatgaccagaattcttctttggcaactcatcaggaaaatttgctagagatttcaaattacttttcaatgttttcgtgggtgggactctcatttggactggccaagaagcagcttggctctatgcaatttcagttgtaaaattctggacgcaagaccaagggactccatgtatttctgatggaggctcctgccctacctttcctagcttcaaatagttggggaaaaaaatgtaaatggattctttgtgtggtgtgtcactcaggctagtttcttattactcatctgtttcattcctgccaattaagagcaacagctgtcttgcagagatggtggtcgttaggaagtgacacagctgtggggtttagatgagataacagttgtacagccaagacaaggcatctttggaatgcaaaatgccgtaagcctgatttatagcgtatatccaagggggaaaaacttaaaccaaatcaactaaaataacaactcacccaacagggaaaacaaagcaaaatatcaactcagagatgtttagccccaaagtcaagttttctcagacttttttaaaaaccagattcggactaaaaattgacctagagagattccaattacctcagttgtctacagtgcccagagttatgaatttttgtttgagatttaaatatttatgcaaaatccatcctcttgttgctcaacacaatttgacatttccacatccctaggccttagtgtgcaacaaggagggtagacttgctgaacacaaaacagtgatcggtgactaacatttacaaagtggtgttatcgaagtaaaaatatgagttcaccaatgtagtaagtcagcaaatcaatggactctacataaagaattattttcttccttttaaaagtgagactagaaccatcattatagttgaatatttcaaaataaatgtaacatgaataatataattatgattaaattctgctacctaatattatatatcccagattttatataatatataatcttacttattatatatcttttatatgatatataatcttatatatcccagatttttcagactttcacatctttgctaatctcttcctcttgtaatatattctttttctcatccctgagcagctaaatcctactcatctttcagaaactgaatcatata

SEQ ID NO: 45774 - DNA, 1456 bp, Bovine  19866881002060
  misc_feature (1)..(1): n is a, c, g, or t
ntaagggaaggaaaaaaaaaaaaacaggatgagatgataaatgcatgtttcatctgtaaatagattgtcagaatccagatctgagtatagaataagctggtatctgaaagactgttttcaactaaatggagtctaccctgctcaaattgggacttgaaagtgggactttctcatctgagtggctggtgtgtgctgttgttgtccagctgtttccagatgcttccacccagtaggagcgtcaccctgagttattaagttaatggcttgggtggcacgttatgatttatcagtgaaattactcctctgagggcagagcctataaaaggatggtcagcttataagtcatgctgttgcagagcagcaataattatgggtaagaaggaccctttagaaagcaagcttgttagtaaaataacaatgctctttcctctgtacatgtcatgatgcagtctcatggacagtgccacatcaactatttaaatgcaatgtagtctttgtaaacagcaaatgtgttagtggagatcctgagagattatctgggatgttggattttgctttatggcctctcacggtccttatgctctgcctgaattattaggttggggttttagtttggggcttaaaaagatcaggtcttttctctttgcagtgacatttgattacaggctgacctctgaatgtgcctgaataaaagcaactccaaatttgggaggatgattggattatgataaagctttcaggataactccaagcacctctacagcagccaaaggattttcagagccacagggacacacagtaactggctctgattcttttctctctggcttaaagcctctgaagaagcttaataattaaagaggtatgccatcacagagtttttaaggacttgcacgtgactgcttgttttggcctcatctgaatacctgacaggttccagagagaatgaaaggacaaatgatctaaacagattgtaaggctagggtgtatatattatcctggttgcctgtttagagtgcagggctatggatggctccattggcatgtacttgctggtcaagacggtggcacacccatcccttcgtggaaagagactcacccattttaagccacccacaaatagtttccttggcttattcaggacttctgcctacatttacatgttttcctcttgcagaccacacagcatgtcctgtggatcaggagaaatatggagaatgtaagaaacacacttgcttcctactggaatgtgtgtcttctgtccagatttccttcagttaccagagtctgaccaattctattgaacaggagatttttaaaaaaatttttggtcaactcctcttacttagattccctgcttgtgctaagtgtgctaagtagccttctaagatggtcctcagtttttcccaagtcctggtatgcatgcccttgcgtaaccccctgttcttcaatgttg

SEQ ID NO: 45775 - DNA, 941 bp, Bovine  19866881005828
  misc_feature (1)..(1): n is a, c, g, or t
nttccatccatgtaggtgcatgggcaaaaaagaatctaggtatcgtgctttagcctttttttttcccccctttcatcctcatccagtccttcagcaagttctatctgatttccttacaagatacctggaagactcaggggctctgcctccgtttttgaaacccagagccaaccaccaccacctcattttgtactgtagagaccagtggtctcccagctggtcttttcctccactcgcatgcatgctcttcagtttgtccttcagtcaagtttaaatgagattggttatcactaccctcctataaagccttctagtggttcccattgcacttagaataaatgccagtcctctctctgtattgttttaactctctctctttccctccagtacaatataaccttgctgaatgtaagacctttttgttcaccctgacttctcagcaaagtacaacagtacctgggcatagtagatattcagtaaatatcagagaaggggtcagactggtgttgcagaacttttaactaggttccataggtttgttattttaaattaatagaaatcacttgtccccaaaatagagttaaaacctatattgttcagtttgtaacttgtcttcctccttacttaattaactattgccctgtagtttatgatttatatacttggtacgttctttggtcctcccaaacaatctaggttttaccaataaatattaattctgcccatcccccatgcccagccccaaaaggagtaagtgacttgcacaagatttcagtaggttaactgggacctaggtgttctaattcctaaaccagatacctttggcggtgcagtgttctaggtatgtgcttgtatgtgtggtgggagcatagaagaattatgctaatctttgggtcagttgcttttttacttcctgtattccctccaagataacattctaa

SEQ ID NO: 45776 - DNA, 1222 bp, Bovine  19866881073683
  misc_feature (1)..(1): n is a, c, g, or t
naataatgccaaattatggaataatgtgggtcatgctctggaaaatgaaaaaaactttgagagagctttgaaatacttcttacaggctacgcatgttcagccaggtaagcattattgattaataaagctattgttaatagtttgttttctttttgaaaatttgattatatttgtagaaagtaggtggagtttattttcaagctttattccagctgacttgaatactataatgtttggtgctggcttattttttgaattgggttatatgttagagctgtttatatcagacatttagggatgtttttaaatacagatttgttggatggcagtgatgagcaattttggtggaatgatagatacaaaggcctattagagtagaagaagaactggagacagttgatattaaaaactggtaagaaatgttggtgttgagtgtggggtcaagagagggtagtaggatgctggggtttttgggtttttttttttttaaaggtgaaagaaacaaggcatgtatgtgactagtgcattgaagttgggcaaagtagtaattcagggttggggaacggagtaaaggatcagtgttcttgaatagatgagaatagataattaagatctgatactcaggatgaggatttcagtcagctgaaccggtagttaccatatagtaacagggaaagcagagtgtagaaacatggatatagataggcaggtgaataatagacaaataacttctgaaagttactgtttgcttgttttctcagtgacataaaaagcagaatcaacagtagattgtggggaagggaaaggacgttctggagatctaagaccaggagagagtctgaagtactacatctaggacatggcttcagaaactttaatgtgtgtgtgagtcacctggagatctaatggtgcatgttctggtgtatagcgatttagagtagggccctgaagttctgcatttctgataagttcctaagtgatacttagcccatgaatcacgtgttgagaaacgaagatctaggaaaatgtatagactaggaaaatgcagtgtgattgccaagcagctgtaacacccttcttgaggttgctatgctaagtcacttcagtcgtgtccgactctgtgcgaccccatagacggcagcccaccaggctccccagtccctgggattctccaggcaagaacactggagtgggttaccatttcctcctccaatgcatgaaa

SEQ ID NO: 45777 - DNA, 654 bp, Bovine  19866881091797
  misc_feature (1)..(1): n is a, c, g, or t
nggtgagaaggaaggttaggatgcagaaggtcctatcaggcacagagatgaaaagcactggctttgcattcagaaatgaatttaacttctggcttcaacacgtaacagcaatttgacttcgggcaattaacttcccaaacctcggcagctcacctataaaacagaaataatgttcatacctacatcacagagttaatatgagaactgaaagggatagcatatgccaagagttggccatggtgtaattggtgtacgtgctgcagttcatggggtcacaaagagtcggacgcgactgagcgaccgaactgaactgaactgaactgattgttattattaccattcactgcaggattttagggcttgggaagagggaagataagatcagtggtagacttgaaggaaactggagaattcaaagagaagaagaaaactgtcttgctggctaggaattcagtgttgggcttttctgtcataatctggtatttttccgggaagactagttaccaaggccagaggggtagttccccagtggaactttttctctctttttgacatgaaagcattgtttacctcccaagaggcagagtgtaggactgtagctgaagtttgatcttaaaagttgaagaattcagaaccctgagagagagaaggaat

SEQ ID NO: 45778 - DNA, 1367 bp, Bovine  19866881133643
  misc_feature (1)..(1): n is a, c, g, or t
ngagtgactgaactgaactgaactgaactgaaaaacaacaagctatcaagacacaaaaatgtggaagaaccttaaaagcatattgctacggttaattcatgttgatgtatgacagaaatcaaacaaatattgcaaaacaatcatcagtctatttaaaaaaaaaaactatggagtgatgtcaactaatttgtccttccaaatgctaagcatacagtaatgagtgggagctgggaaatcactgagacaccaaagagaaatcacagtagctgagaagatgagacattgagggaaatcctgatgacagggaggtgagttcttggtcagggccttacaaatctgccttacaaattgtacactcttaacttgaatactaaacataaaaggaaaaccaactgctatatttttttccaaagagaagttttgaaattatgcaaagatcaaaactgaaatttgggaaaagtgaatttctgatcatttcacaaagtggaaacaattgccatgatgcataatatgagacctccatgcagaaataacggactttaacaacatatgaaagtaacgtttcaacttctatcttgaaatttctgggcagaagtgagaataccctcaacataataaattatgtaaggaaattaaaaagggcaaaactgttttctgcatagctaacgaattcctataataaacagataactccgtaatgtgctttagctttctttcattattttggattcacagatccttgtgatacacaaacagataccattctctttagttgaaaccaaatattggtctgctattagattcaagctttctcagatggcatagaagaattaaaagtgacatggtacaccatactatctaattaatattttctttcttaagttcagagggacttttatagaaccgtatctttggaaacatctattgctgtgatgaaaggctgtcaccatgggatttccatcattcagggaaactgtgcacacagtagcctgaggtagaggcccattattttcttttctgctttttgatccatgccagaaatttcttgagggaggttgaaataatattcaaattcattttgttggcaaagacaagatgtaatgattgatacagaaacgtagtgtataatttctaaaatttttttccatatcatctccttgagttgtttttgacaaaggaaaattaatacaaaattttattttcttattattttataaagaggtgactcctaaaacattacatatttttggtgcaaaaaagcacatgtgaatttgctctgagtaggtgttggagaagactcttgagagtcccttggactgcaaggagatccaaccagtccattctgaaggagatcagccctgggattt

SEQ ID NO: 45779 - DNA, 1416 bp, Bovine  19866881165050
  misc_feature (1)..(1): n is a, c, g, or t
natcattggaaaatgaatggtgtggatatagaattttctgtaagttggaaatattattgctatattcctgtggttttactacaagtttaataaatgaaaataatggcctgatgaaagtgtacgagtgtcattgagttcagtcctaaatctgaaacagttaaaaagaataataagtgaacaaaaaacaaacttcagaatcatggactttagaaaactttatagtataatcttactaatttctagtcaatcacagtatgttgtgattagtaatgataaaacttagtaatttgttaatatattattatgttaatattttctctttccttaaaagctatgcactgaaagctttctttgtacattattctttgctaagtgaaagtaatattttattgaataaaaattaacatatttttttgttttgatttatcttacataatataaagagaacagttggattagttctttaatagctattgcttttttgtaaggagaccatagagacagaattttttttctaacttggccccagctcacaagtatctgtgaataataaagattttttttttttagctttatgctctctatagtatatcaaacatttctcgaagggcaaaactttgtaatttattcatatattaagcaatttagtaatcattcatgattctttatgggtatatctgttaactatattggcacttactaatatgtgaaaaagaaggatagagaagatagaattcgtattgtttctcattaatatcttattaaaagtagcctaaagtaggcagttgtagaggaggctacatgtggatccaggatcttagaaataattattttaccttttgtttgatttaaaacttgatttagtttttaagaattaaagttttgggggcttaccagtgggtaagagtccgtgcttccactgcaagcggtgcaggtttgatcactggtctggaaactaagatcccatgtactgtgaggcatagccaaaaaaaaaccaagaacattaaaatattggaataataagagttatttttatgtttctcatttgttaattcttttatttgtaggattaattgctgaggacctgaacctaactgaacacttttctcaagagaatagaatgggagaaagaaaatctgatttcatgagcctcaaaaatatgagtgaagaacagtcaaaggtagatagtaaagtattactatggcaaagttaaagaatattattatcaggctttcatttcttcccctattatctcattttggacattgcttctttttatacttgttaaaaagtctcagatagatcccaagattaatgaaacgttgtttactctgaatacagattaggagttcagataaagtagagctgctgcataggagaccatcattcaatattccacagtcatgtcagaatgag

SEQ ID NO: 45780 - DNA, 2462 bp, Bovine  19866881167102
  misc_feature (1)..(1): n is a, c, g, or t
naacagtgtattctcttagaattaaaatatatgtaggaggaagtactatacaccaggtatatgcttgtatccatttgtaatcatgtgttagctgctttagagtagtatgaggatccttgagttgattcatcaagctcaaataattagtaaacagggttatggctaacccatgaaagtatagccattgttttggaaccttgttttggtaatatcactaatttccagccctttcactatgaaggactcctttattcttcttatgtcatggacctcaccttttttagtaaactaagttataattaatcattttgtcatattttaattgattaagactcatataactggcaatgagaatttctaatcaacatgaggaaaccagacttatcagttacactgaactaaaattattccagtccaaagtaaaatgcattttagtttacctatttaatcttatcacaatggtcatataggacatttaataattatcatcaagctcccctccttttttggtaatagtaataaatgtataatctttttcacatttctgctaccttataaattaaaataaagccaatcaaagcatcattgattgaccttgaaaatttaaatttctataatcttaactgtacaatttgtcaagtaagcctacctaataccttattccagctataccaaaccacggtaacaagtgtctcatgaaaaaatttgtgagaggagtttgttggccatttatgtttgggaaatgtgcatgtacagattgagatcattttttactttagaacttctcagagcatttgatatgatactgtgtatatgaattttcaagggagagcaatgttgggaatggagcggttaaaacctgttaacctctcatggaattatgttccatgaaatacttcaggaaactttagtatttcgtaaaaagaagagatgctgcaagctaacagcttttccacaagggtctagaaattggaaaatctagtatttatttacttagagtatgtacctaatcatatctgaagtatcttattacttcctagactaaaagagatttctgatattgccaaaaggcaagttgaaattttgaatgcacaacaacagtccagggagaaggaagtagagtccctcagaacacagctgttagactatcaggtatgtgcatgtgttaactcttctacatagaggcttttcttttccaaaatttatgttagatattgggatcattttgtagttttaatcaggataaatcaaatagaggctcctgttttcgttaattgtaacttgattagaaaaattttaatttgaaatgccattggtaacacaggaaaacatttaaatgcttacagatgcattgtagcaactgctgatcacagttcagacaatggggagaaacatgtctttcataacagcattgttccttgtatttatgtataggtttccacatattctcacattatagtttttttaggattaaaaaactacccgttgtctacattagtagtattatcagtattgttatttacatatggacgtttaaagtaaacttagtaatattccaactggtatgtagttaggtgccagatttagattttaaataagtttcattctagttctttttattctgcagtcttttgcaatttatgttaaagcaaggttagatttttgtaattgttttaaattagtaaattctgatttttaagtccacgataagtttcactgggaaaacttgaaacttactacaaatatttatttttcatgtcaggcacagtctgatgaaaaggcactgattgccaagctgcaccaacacgtagtctcccttcaggctagtgaggctgctgctcttggcaaggtggagtcagttgcatctaaactgcagaaggtggaggcccatactctgcgcttagagcagaaactcgatgaaaaagaacaagctctcttttatgcccgtttggagggtagaaacagagcaaaacatctgcgccaaacaattcagtctctacgacgacagtttagtggagctttacctttggcacaacaggaaaagttctctaaaacaatgattcagttacaaaatgacaaacttaagataatggaagaaatgaaaaattctcaacaagaacatagaagtctgaagaacaaaacactggagatggaattaaagttaaagggactggaagatttaataagcactttaaaggatgccaggggagcccaaaaggtaaaacaccgattttaagttcagtatgttcaaaagaggtacataatcattttgagttaatatgtgcctatgtggaaaatgcttaatatatgagcaaaattccagatataatttattaatttagattatataaattaggagtttgggctattagaatatctgtttataaataaaatgagactcctctaagccatagtttcagtagaaatgcttagagtgtaatatcaaagaattttaaacactc

SEQ ID NO: 45781 - DNA, 906 bp, Bovine  19866881186917
  misc_feature (1)..(1): n is a, c, g, or t
naggagcctggtaggctacagtccatggggtggcaaagaatcagacacgactgagctacttcactttctttctttacagattaagaaataataagaatgaaaatagattagatattttattcaaaggcactcaaccagaaaatggccaagtgggaatctgaatccaggactaacttgtaagctcaggttttcgtcaatataagatatttgaataaaaaattcaaaacatagatgttactctatatgctcagcttccccagtggctctaaagcgataaagaatctgcccgcaatgtggaatatacaggttcgatccctgggtcaggaagatcccctggaaaaggaaatggcaatccactccaggattcttgcctgggaaattccacgggcagaggatcctggcaggctatagtctatggggttgcaaaagagtcagacatgactgagcaactaaaccacagctttctacatgctaaatttttgtctgtaccttattaataactgtacttcttgattcgctatgttcttgctctggagaagtaaaaaatatattctgcatcagatttttttgagttattatataatttatggagagacattgcaaatctaaaatcccctccttggtattttagtccttgaatgacaatctaaattgggcacttgttctttttaaatagccactgattacaggattgaaaaggctttgttatatcagagtggtctaattttttgaaattttcctgtgggtcactgtattctcacatatggtaaaacctttctgagaggattgtgctgaaatcacaacggaagttgcaacaggagtcttatcagttgctggtttctttttggatccaagagctacctgggaaatatctctcttaaaatcagtcagattggaacaagaaga

SEQ ID NO: 45782 - DNA, 871 bp, Bovine  19866881259195
  misc_feature (1)..(1): n is a, c, g, or t
ngaaacccaggttcgattcctgcattgggaagatcccctggagaaggagatggcaacccactccagtattcttgctcggagaatctcatggacagaggagcccagcaggctacagtccatggggtagtacgaattggactcgacttagtgactaaaccaccaccattagtctgactaaaattcagatgaagcatttaaaagaaaaaaaagtatttttttttttttaatgatttatcattacagaaactaagagaaaaagaatctgctttacggttagcagaggagaatattctgtcaagagacaaagtaatcaatgaactgaggcttcgattgcctgccactgcagaacaagaaaagcttctagctgagttcagcagaaaagaggtggaaccaaaatctcatcacacgttgaaacttgctcatcagaccattgcaaatatgcaagcaaggttaaatcaaaaggaagaagtgttgaagaagtatcaacatctgctagaaaaagccagagaggtatttgattatgttatgctatcttatttattatggtgtttttagacaaatgccaaatactattctgcccttaaatggtgtttcattttttgttttcaaatgattctattcaggtattgttactttcacgtgattggattacagatctgtcagtaaaactggcagtttgtgttattgactgagtaaaccagtaatggtgttcatggtgaaactgtgatttcgagttaataggtgaagattgaggcagtaagttagaatgaaatccatcacactggtatcagtgaaaatcaaatttgctagaattttaaggggtaaaaaaacatctaaaatttaaaaattgctagaaacaagttaaaagata

SEQ ID NO: 45783 - DNA, 1272 bp, Bovine  19866881276791
  misc_feature (1)..(1): n is a, c, g, or t
ntactattattattaccccatctgccagatgaggtctttgagagcgtaatagaagcctgactccattacacattccaaagattgtaccacttgctctgcctacatactcactaagcaaccttctaattataatgtggattcccatgtggcatcatctatgggaaagagaatgtgctagccagaactcgagaatctgtttcccaaggcagttatttttttttccccactgtaaattaataaactgacattttaatattttatatgaatctgatgaggctttgataacatgagcctgatccccaaaactagattattaagagtacagatcaactgggtttcagaacctgcaagtttcagcctctttatcatggtaaacctactaagggatataataaatcctatcccgtgagggccccaggggggacagccagtcctcattctcccaaaagacgagatacatcaacatcatcattagcatttccttcccttttgacatctctaggggacaaagaggtaacagaagcgaccggattctaatcctgactgtgctgtgctaacataaccggagccaatcactctccttcctcattcccagttcttcatggataaaacggaggagctgggctcaatgatctgataaccccttcttatctacaccactggctgtctatcctgttcaacacacctccctcaccctccacaagcactttccagttttacatttcttgctcttagcattgcttctgtttctctgactggctcccccatccactttctgtctctccacccatcccaggaaagtctggggtcctctactccgacctcagcaacactcagttatgactctagatctgttctcgtataaacactactatgctccccattatactgagcctagcatggtatctgtatatacttgtggtattgaaaagctgtgcctttatctgaaagacccacatgcaattcaatagtcttaggttcaggatttcaactggatattagtatttccttttccaagttttgtctcttgctttcacttcatttatctacaagactctatttcagacatcgtttctcactcatctccaaaatccttacagtaatttaaggtttagtcctaacctcaagctcaaacctcacaatccattcctattaccaatccccaaattcctctagaccagacttccgaactggtgtcccagagaaggctaattcacaatatgttaatagctatgatgtgaaaaggtcagcagagcaaacaggcttctttag

SEQ ID NO: 45784 - DNA, 817 bp, Bovine  19866881320986
  misc_feature (1)..(1): n is a, c, g, or t
ngaaatgctgctgctaagttgcttcagttgtgtccgactctgtgcgaccccatagacggcagctcaccaggcttccccatccctgggattctccaggtaagaacactggagtgggttgccatttccttctccaatgcatgaaagtgaaaagtgaaagtgaaatcgctcagttgtgcctgaccctcagcgaccccatggactgcagccttccaggctcctccatccatgggattttccaggcaagagtactggagtgggttgccactgccttctccaaagattggaaatatttgataagaaatttgcctctccccatgttcgggttggtgaaattttattgaaactttgaagttcttactaatagtggccagcggttcctgttactgtgttaaaaatctagctcattatttctcttctgaacttttataaagttttaactaaagaatcagtagccattgttggaaaagacacatactccttgcaaagaagtgctttgatcgacaataatgtcaatgaggatattagtcttccctttctaaattcagtactattacagtcccctaaaagtaacaaaaataaaatacaatgcttgggtttgtacaatgaagctgttatgtttgaattctgagagtgaccagagtgctattgaatgaaaacttaacctaatgaatcagtggcctctatcccaagtgtaaaatcttccctgacttaaaaaaagaaatgtagtcccattcttttttaaaaactaatctttcctgcatcagctttgactttaaggcatcaataaattttaggccagccatctgtagttctcaat

SEQ ID NO: 45785 - DNA, 732 bp, Bovine  19866881363943
  misc_feature (1)..(1): n is a, c, g, or t
naacccctagtggcagagaagaataaactacgtacctgtacattttggtgcagatttagatattagtcttaagtaacacaaaactgccaaatatgtccttcttttaaagtaaaaagccacgttcaatcaaccccttacctgagatgttgtcttatcacctacattgttttaaccataaaagagaaaagtaacttactgttaaaataagccttctattagaatgaaagataatgccgaaatagttttagtttcagtgaaatgaactacaaccttttaacaatgtagtaaataaaagttacccggtatatacttccctacatcaagtttttcacattgcctctcctgttcttcctgcttggagatgccactgcttcctgcttctaggaaagtgattcccaaatccccatcttctgttctgactggttttccatcctaagagtccactcagatgttgtaccagtactttaaactgactgcaggcgagactacaggccgtctcctcactgaccattgaatttatatcaacattactaccaataatttcaatgtgaagtctaaactcacttgaatacttcctttccccttgtcatctatatagtattagctcctaagtcctatgtacttgccctctgaatatttcctctccttcctattgcccctgcttcttcttgctcttacttggagctaaagctactgtaatagcctttgaattgatatcagtctccagcccat

SEQ ID NO: 45786 - DNA, 1495 bp, Bovine  19866881391706
  misc_feature (1)..(1): n is a, c, g, or t
nagtcttgatttaaatttatatctgactatctctcatgtccatggtccttctgatccatgcaccttatcctggttaagtggatctatcaaaagaaagaaacagaactctgtaactgaggcaaaaagcaaaagctcaaagaacattaatactactaataccaaataagatcatagtgattatcgaagtataacaatcattttgtaagtgacaaattgtgtcccaagtgattaacctaaagctatgtaatttgcatctattttataaagggttaattttactatgacttttaatgaataattctagctttttaaaatgtaaaattctgggacttccctggtggtctactggttaagaatccctcagccaatgcaggggacacgttcaatccctggttcaggaactaagatcccacatgcatagggcagctaagccatgcaccgcaacttttgagcccatgtgccctagagtccatgttctgcagcaagaatagccaccacattgagaagcctgcacaccacaactaaagaaagctgtgcgcagcaacgaagacccagcacagccacacacacaaaaaagtaagattctttggagaatatcatgataacctgtggtgtgtattgtaagtggtaatgtttttaaatatagccagggatgagattgaccctttataaacaccactaagaatattcaggttataggtaatgatacaaaagaactctaagaagtcacaattaaaaatttggtttatcagtttttttgtcattgaactttatacagtagtgtttatagtaaataattttttttggtgttattctctctcaagctggatgattattagagcagtccctagtctttagaattcaaacacaacatttagagatatttaacatatttcttacctctttttggtgatgaagacaatgtttttttgttctgctttttcttccttaaacagtgtatttaaaaagttatcctgggtttgtctatctttggtgatattcactcatgccttaaaaacactccacaggaattgggattgggagtctgaatatacgctgtttatgtcagccttgaaggtaaaatgttattcaaaatatatcaccaattatttcttattgccatttctgctacggtgttctaactttacttttaacttgacaattaattctcaatgttaaatacttcaccaaaaaattaataaaaacaatttgttctttgtataatctacaccataaccagtgctctgaatagtcttagttgtatgtctggagcatatatgaataattccccaaatgctatacaattgttagatgcttaaatgataaaatgtttaaatgtgaatactttgtttcatttgttcttaaggtgtactttttttttttttaaccttttaacatgtctgaaatcagaataaatcttacagtgaaaggcatcttacaattaatgaccttttttgtttcttaatgatatataagataaccatgagccttataa

SEQ ID NO: 45787 - DNA, 1625 bp, Bovine  19866881401729
  misc_feature (1)..(1): n is a, c, g, or t
nttgctatttcctgttgtatagggttcccacttatcctgtgtgttgtcttataagttttatattccttctggaaagaaggtataaataaaataaatacacaaatacttaataatgttaagtgcctcttctagaatgaatgccccagataggaattttcttggtctttgcctagtcctgagcttcattgagagggttagatgtctacagccctgtctgtgcttcacactgatgggttctgataaatagacctgtaagcagaaccccccccccccccgttgaacccccttttccctttgttgtccattttaaataagaacccggctccagcacagtttcaaggtggagtggcccactttgacctgggccacaagtgtgggtccactacgactgtgaggacaaagtattggtgtcttctgagatgcgactcagcaggggctgtgagcaggcccacttcagttcgtaggagtaatcacctggaggcttaaaagagaaatgttttgttcactaaattgctagagtgagatctgtacatttctgtaactcttgagacttatggtctctcctaagacaaatatatcatcagctttaccaatcccataaggtaaaaactctacctagtggaaaattcttgtaattgtgtcaagtctctttatgagaaaaagaagaaatcttgcttgggctgtcagaataatgtaagacagcttgtggtttttttgcctcgagtttgcgtgggcaggaaatttattctttgctcggtacatctttgagctgcacgcagctgtgtgagatcccagctctttacaaattgctaataaagaagataatgccaacatttgcactccactcagaagtcaaccactgaagatttaaatctagatttctggatagaaaatcttaatctttcgagtcatgtcactatgcttttaaattcatttctgaacactgcagtgaactaaaattagaatttggaataagctagaagcaatgaaacaatttcctcattcatctaacatgtacttattgaatatctaatctatgtgtgtgcatttagaaatttttaaaaagtgacgacatgggtttgttctccaagtacaaggattctattaagttttggccaaagaagaagaagctaattaatatttgttgagcctttactatgtgccagggacttggcctgggcttgtataactcttatgacataaatattatggatcccattttacatgtgaggatactgaagctatataaccagtaagtcacaaagtgggatttttaacctcagcataatggattccacagcctgctatatcccactgcctcctacagtataaattttcatcttgactagaaaattttcttttcttttactttttaaaaatgttctcatatatttaaattcatttaaagtagatttaaggccttccctggtggtctgccttccaatgcaagggacacggtttccatccctggtccaggaagattgcacatgccctcggtgcaactaggcctgtgtgctaccactactcagccttcatgccccaactatggaaacccacattctctagagccccgtgttctgcacaaggagaagtcactgccaggagaagcccacgcaccacagcta

SEQ ID NO: 45788 - DNA, 2013 bp, Bovine  19866881485054
  misc_feature (1)..(1): n is a, c, g, or t
ntatggtttttcctgtggtcctgtatggatttgagagttggactatgaagaaggctgagcactgaacaattgatgcttttgaactgtggtgttggagaaaactcttgagagtcccttgaactgcaaggagatccaaccagcgcattctgaaggagatcagccctggggtttctttggaaggaatcatgctaaacctgaaactccagtcctttggccacctcatgtgaagagtttactcattggaaaagactctgatgctgggagggattgagggcaagaggagaatgggatgatagaggatgagatggctggatggcatcactgacttgatagacgtgagtctgagtgagctccgggagttggtgatggacagggaggcctggcgtgctgtgattcatggggtcgcaaagagtcggacacgactgagcgactgatctgatctgatctgatacactcaataaatattacttatattatatttggattccctggtggctcagacagtaaagcatctgcctgcaatgcgggagacctgggttctatccctagtaggatagaagggaaggtcccctggaggagggcatggcaaaccactcccagtattcttgcctgaagaatccccatggacagaggagcctggctggctacagtccatggggttgcaaagagttgggcatgactgagcgactaagcacatattacagtcagttctttaagctctaagaccatgtgtgtaaatatggtttggaaagatcataaaattaggtagaaatgtaaatcagtattagtattactaaaacaaataagagcaacgtgagggtttctaaaacataattatgctacatataattccagagaataaaattatttgaaattatatacaataaaacaatactaaaaattaagttgaagtccttcgaggacagggttgtaccccattccacagtaaagatccagagtttggagaacagagatggacacaatggaaaataaagcaaaatgttttcttgattttctatgattaagtactgttctcagtaaattcttgctgaactacacagaatcaagattctaatttgttatctcatatctcactactacaaaaagggtgtctctaaaattacttatgaaaacacttttaaaaatatcactggagtagtataagtcaagattcattatccacaagctaacacacacacatacacacacagagtaataaatcaaaaaccatgcaacctgacacattttgaaagacatttaaagctctgcctccatttcctaatataaagaagaggcttatttttttaatattagaatgtctccatttccttggcattttgaatccctatgagtcaataacttttgcagcattatgcaaagtggtctaaaaagagatttgaaaagtgggggcagtggtttttcatctcctgccttgtatgaatttaactcaagcttcagattcctggcacacacttaaaaactttttcaaaccaacatataaggagtacagtccaacacagtgcaaattgagtacctgagcactgaggggaagaaaattgaagcagctattaacatgagagaaaactcaccactgatcttctgagctcccccaacaccagtaggtttaagactctggaatgcttacaaatcaccagcagaacttgttaaaatgcagatttcaagctccagctcccgagattctgattcaataggattgtgatgggagccaagaattagaagttttattagattcataatcagaggaaggaaataatgtctctatttttctttctctggaacatgaaacacaaaataatgtgtaacatgtaaagacagagcattgccttactttacctcaccaaatggggaggaggagatgagacagttcatgaagactcttctagctctgtgatgcatatgtttataaaaatccaggccatgtgcattacacagacacttcttaaatgtagcaaagatccatactgtctagattttccacttagatattttcca

SEQ ID NO: 45789 - DNA, 1407 bp, Bovine  19866881698914
  misc_feature (1)..(1): n is a, c, g, or t
ncgacttccctggtggctcgaagtaaagcgtctgcctacaatgtgggagacccgagttcaatccctgggtagcgaagatcctttggagaaggcaatggcaccagtattcttgtctggaaaatcccactgtcagaggagcctgggaggctacagtccaccgggtcacaaagagttggacacgactgagcgacttcactttagtgcatgagcagtgttagaaccactacagaatccttgctagttagtgacactttgcaaaataatacatggaatccaactttttaaatattctactgtctgcatttgtcaaataagtaaaatgataacaagtttaccttactcctattaccagccgtaaatgtgtacgtagaaagagtgaccccagagactaaaaccatcagaatccatttgcaaaaataattaggcatatgttttattttacatgtcttaatcaatattgcaaatatcattaacaaaaggaaaaaagggtagaaatcgctcatcatacaccaaaaaattcattgttcaaaagagattaatctgaatctcaacattctttgtgctcatttaataatattattaaaacatcaattcaaaaggacaaataagtcaaaactaagtattttattaactaaaattgagaccctaaatcaactacacaactgaaaaataacctaccatcaacctagaaaagttttatttgctgacatataatgaatactcaagagcctactacagggtgcatagacaaattttcttttacaaacaagttattttgagttatagagactctgtagatgactagatcattgtttttaaatggctgctaaaaatgactatttagagtcaacctattcacagaattgaacactaaataacattagtttagttcagttcagtcgccagtgatcatttaaagttgaaattcttgtctaccaaattttcataacactttttaagcacgtaaattaacttaaaagatctgttaattatatacagcaaaagagctttggtaccaataaattaggagtaggaaataaaaaataccttgtagttttacagtgtgttttagaaattaaattggaaatggctacatatgaaaatgtagaagtctttttctattaactacattattgtgaagaatgaaccactcgcttattctgaattactgatataaataaaacacgagcctaaaatttcttccaaaaagatgaatgggtcacaccctgcaatttaggcaaaaggtaaataaagaattcagtgctttacttttcaatgctccctttttcttttgatgagagcagaaagattctaggataaaaataattccaataaatacatctagaatatatcaatcttagcactcccatctgataaggggctaagaagaacaaccacctgccaatg

SEQ ID NO: 45790 - DNA, 1049 bp, Bovine  19866881859256
  misc_feature (1)..(1): n is a, c, g, or t
ngcattatcattaagagtgaaatttgagagacactatctttaggtgcctgctataaaagactattacagaaacaaggaacataaaaactgaccttttagattcaattacatattggacattattgtatatatcctagaaattataaataaaaaaagtaagaatttaattcagtcatctgtcttatgtccccacttataatagatctatttcttgtttaaaaatagaaatgaaattagatgtgccatgaattgataactgtcaaaactggacagtaagtatattattctactttcacattctggacaatttccataataaaaaatttaacaatacaactgtgtatgtgtgtgtataaaatatttataaaagctaaaaaatctttaagtttttctttgaaaattattcccgtatgtattgtatcattttcctttcatgttacctcagattctatatattccaaaataagctactctcacagtacccttctacatatcatgacacctattaaaaaatattccccacaatggggcaagtaaatactcttacccaagctgcaaaaacttaattcttaagtttctgcatcctgatcttactcctttaattttttgctcattcattacaaaatttcataattaaaaagtgaaaacgaccagtttcaactgcatatatgtgtaaaaacataaagaaaaagaggagtctcacatacttttgggttagtattgcaaaagaccaccaataagttgtaactggccatttctcttaaaacctgtcaaccaatacaattcagctcacacggtaagagaacgctgcacccaaaatgaagttaacatatctgtcagacaaaagaaatcggtatatttaacccccaaatcaggattctatcaagatatgagtaacactgtataattactctacatacatcaacctaattgctcaaatgatgtcctttaacctggggccatattccacagacttacaagcataaactacttttcacctcaagcagatttttttacctttaataaaactacctggggctcaatagcat

SEQ ID NO: 45791 - DNA, 830 bp, Bovine  19866881913248
  misc_feature (1)..(1): n is a, c, g, or t
nattgtctaatctgatgtcatctgtgtaaaaatctcagttcatggaaagacagcaagaacagtcataaaatatcattttctctggatcattcctttccactcaataaggccccctcatttgaagggccccttgccctcttgcctgatggctagtgtttcccaaatctggaaactctcactagaacactagtacttgtgggcagactgagccagaagaatcacaaccttctcaacaacaccttgacaagccttaatttgggggaggagatagagctccgggtatcattgacaaagataaagtactagctctgcagggggcagagtttgtgggttggtagttcccgtctatgagtagtcatttcagtgaaaagatagttttgatttattagaaagaaaagtgactggcaaagtttaccaataatgtattagcataaaataacaatcctcaatttgtaagtgatgtatctggaaagtgacagatgattaatcctgacttggtcagcaatacttgagtaatcaaaagttgggagatattctgaaatacccactcatggatggtaggcaatttaaacatctttcaatgttcttggagtatgttcactcagacttgtgcatctgtcaaactggttggcaacacgccaaagtcagaatggaatgataccaataaagcactgggaactaagatggtttggttttggtttttttatagtgcatagataccaatttggtattgtgcaaccagtaagagatgaaagaaaagagaattttatcagccaaaggaaagagaatttcatcagctcttgcaaattgtggtaccaagaatgatgctg

SEQ ID NO: 45792 - DNA, 773 bp, Bovine  19866881914920
  misc_feature (1)..(1): n is a, c, g, or t
naatgagggatgatttatgttgatgggtaagttcactgcacatctcattaaaaagaaaaaacaaaaaactcagaaatgtgcagttcaagctgttgctatttttgttgtacatagaatttgaattttctttagtccccaaatgaaattttaggttttacttagtttttttattctaattttctgttactcaaatagaaatcaaggaaggttactcttcaggaaaaaggcctggtttagttatattgtcactggatgtgaattggagttgagtttagagttcttcctaacatacagacatctcagaaaaatatacccacatctgaatgaaatgggaaccatttacattccacactttgtggaattgaggggattgagctattagacttaactgctctatgttgatacctcagattgctctggttttgtaagctgtcctctctgtgaacttgtttgtgtgtatgggatattttctgattgcacttccttaaactttgaatgtatcagagagggactcattcagaatactgtgcttctctttgttaatgcttaatcacttaaagtaaacgcttaataatcgcttaaaataaacacagtagaggccaactgtgtttactgaaacgtgtgaaactgaaagtgagccctgttggacaaagtcagtgaaactctcctacagagttcttgctgatgaggacttttaagggttgatcttaagattttccaagtggaaggatagcctctgcaatggtagatggggccttccagcttcttttctg

SEQ ID NO: 45793 - DNA, 1832 bp, Bovine  19866880487801
  misc_feature (1)..(1): n is a, c, g, or t
nttcagggaaatttcaagatccttttgctattccttgagttaccctagtccccctccctgtcagacacctttcccccggccttctctaggcaggagtaatgaggaaagagaagccaagggcttattccttccttctccaaattcttcactgctgatgttgcccattacttgaggaaggagggaagtgagcagaaccaggtcctccaaaaggtctctgggccttttaacccagtcaaccaatttgacatagtgagagactctcatggtttcctactggaagctgggtcaggatacctagaactgacctgggggcttggcttcactgggaatggagcatcttgggagcagctctgcctgagaggggagaacggaggggaaagagagggccaaggaaggttctgtcccaagagcttttggggcagcctggaatgtagatgtgtcctggtgctgcaggcccacgctctagaaggaaacctggagttggaactggtgcggacggcatgcatgtgcaagggggtgatctgctgccggatgacacccctccagaaagcccaggtggtagaactggtgaagaagtacaagaaggcggtgacactggccatcggggacggggccaatgacgtcagcatgatcaaaggcatgtgaggggtcgggggcagtagtgcctagccgtgggctcgccctttccttcttccatgggcaaaactgatgtgtgtggctctgtgctgctggttcattctcctgcatatgtcctgtatgtattgtgcatttatactgttgcaacttcatccatgttcctcggcacctgagtacccacttatttatacatcattacatacagtcatgcacacacattcagattcatgcatgtaacactcatgtactcagatacccatggctccaacaagaacacaagcacatgctcagagaacaagctgtgcaaccacaacacccatcttgttgagatggcatcaaagcccacagaaaggaccctggggccggagtcatggttggttcctttcttgaaggctgtagagttgaacaatgttaggcagacaacagggctgcccaaccagggaattagctatgcagcctgatgcagggatcttttcctctctgaggcgttattcccaagagctttccctgactcccctggctggagaagaatagcaaacttactgatgcttcagagtaatagaagcaaatggctgaaactggtgttaatttcagctgaacgctgttagcctccagcagcttatagttctgtgagctatgatcacatctaggggtcctctagcccaacctctctcccatactgaagacactagcatatatgccagcctcagtttcaacactaggaagcgttcttgctctctttctccagtttctggaacttatttgacttttagggcctcagaggttttagttattctgttaagcagtgtaatcggtatgtaccagaagatcaaagaatttaatctatactaccacaggccaattaaaacttttagaaatttaagtcttatcttccatcaagcataaaagtgaaagtgttagttgctcgacatgtctgactctatgcgaccccatgacctgtagtccgctaggctcctctgtccatggaattctccaagcaagactactggagtgcatagccattcccttctccagggaatcttcctgacccagggattgaacccgaggtctcccttgctttatccagaaaaagacaccttaagcttcctgaagaactcatttcttactaacaaagtatgtacatcactgttctcccaacagttggagttagctccttagataaacttagataaata

SEQ ID NO: 45794 - DNA, 1472 bp, Bovine  19866880541307
  misc_feature (1)..(1): n is a, c, g, or t
nggggaaactgaggtatgggactgtgtgaatagctcattactctttcacatgaggcgcccacaaaactagggagctgggctcctttaagcaaagtagatgccagccgccccctccaggaaggaatggatgaagcgaaaggggttcaagaagagatgtcacggatagcttcgtggaccacctgaacagggcgagttgggctgctttcccgctcccatttccccagcgccatctctctgaaagcagagagcgactgttgcaagccacgggctgggatgtcgggacagaagaccaaagaggggccctaggagccccgggtcccggaacgggctgacccaacaactgagggcggtgtctggaagtccgggctctgggaggcggggtctgaggccaccacagtgccgggaagctgaagaagaatgcgagagctgggactccggctcgtaggctcggggaggtctgagtggccgaccccgatcccgctttctaggagtcagcactcacctctggagggtctcactacaaggcatccgctcggttccggcctcgagtcgggaattcccgccccctccccttcgtttccccctcccctcgcgtccaccgcgtaccgggcccccagtgaccaatgacagcgcctagagggcgggaccagactgggagtgacgtgagctaggagcaatcagaggtcggcagccggagtccggcggaggcgtggacgatctgggggagtgcggagctgcgggtggggggccgagcaagggaaaggaattctcagagcatctagatttgagagcctgggtctctgtgatggtcagacccgcggacctgactggtgtacaaaggcttcgatcctttgaagattctaaaagagaaagctagatgcttctccgatgctccatagcccacccccgcgatctcaagtcttccacctcccacatctctaggatatctgcctggtcttgggccaaagtcttcttatctctatcagaagattccaagatccccttctgggcaccagggcgccaaagggaaagcgttccattcctaagactgacttccttggttgatttcacttgctagcacccacaaggaagaagaaaagacaagaattgaaagggggggctagcaaagtgagagtatttattttatttatttatttttttcctgcaaaactttattttatttcttttttctaattttattttatttttaaactttacataattgtgagtatttcttttatcactggtgggagctgacttgtgtgcagccttctgcctgttcaggtgggtaaagtggtgggacccctctcaggggttgctgaaaccccacttggtgaggagcttctctccgcacaccccagcttatcctcaccatgcctcaggacagctggccaggattctctccaatcttacttggatgtctctatcttctctccctccagctgcatcagcctcttttctgttttctgttc

SEQ ID NO: 45795 - DNA, 749 bp, Bovine  19866880543754
  misc_feature (1)..(1): n is a, c, g, or t
nttggggcacagcagtgggttttgtggttaacctttctttggactccagctgtaagaaacattgatgccatgttcaaatatttcagaagacccaggaaataagaaatttgacctacttttctaaatgaaatcccagattgagcaaagagctgaaccaatttgaaagcttgaacaaaagcggactaagctaagtccaggggcctagaacaaatgctttttggttctctgcataacaaggagatatgcctttcatctcaggcggcagacaaacagagctgtaggatgattcaaaagaaaccatgagagtggtatatctctgagggtaggttggggacaaaaacaggttccccagagaggcagacatctgatcccgtacgtgtctggagagtgtgagactgcgctgtgagcagccttggctttctttcggaacacccttgaggtggccgagtctaccaccattgctttagggtaaaggctctttggttgctaacaagactataatggtgattttagctcatcattttttgtacagatttgatcttaattcattgctaaaggatagtgggcttcccttgagctagtttcttatcacctgtggctacgtttgctctaatgagcttggagagagagagtcactggctgctttgtttccaaaaagttaggaataggctatacctgcaaagggacaggagtcccttggtctgccctccatctccttcacaagtcaacaaaccccttagcgtagcagg

SEQ ID NO: 45796 - DNA, 1115 bp, Bovine  19866880613955
  misc_feature (1)..(1): n is a, c, g, or t
ntgctcttctgggcctggtgaggggataagggtacaaaggtgagtcagctgtggcactggcctctgggaagcccagggcttggtggggacacgatgacacctgtggtgagccagcccaagggcaaaactctcctcttggtgactccccagtctgaggccctcaatgcccacagataaaagggaaggatgccatgggaccgtggtgctagggcagctgagctggtcagcttggcgggtagggccagaggggccagagaggatggcttttatggccttggatgccaagatggcagggagccaagaaaagggttcagaagcgggtggctgtggtagagcccccagtgaccaccctcttggcccccttctcacccatcaggcttcctcaagtcccgagaacgttccagccacaagctgtactcccagctgctacacacacagatgttctcccagttcatcgaggaatgctcctttggctctgctcggcatgctgcccttgaattctttgactcttgtgtcgacaaggtattgggatcatcccttctttttgtgccctctgctctactctgagctctgtcaccccagatgtaaacactgtctcacacatggtgaggctggcgcccctgtgcagcgcatgtgactggcctcatagacacagtcttcctgcccctctgccccttcctcgtcccctggctgtgtctccggggccctgacagagtctgggcccatcacctccttccctgtggctgtgctttcccggaagatgttatcttctggatccctggctctgctctgtgcccactgtctggatgtcccctttcttaccatcctgcttcaggtccacccagagcaggagaaacctgagcccgtgcccctggtggagctggaggagctgtcaggcagtgagctcaccgtgtttatcatgcctcccgaggagccgccagcgccagagggcagtgaatccactccccagtactggtgagcgcctcccgccccctctcttgctctgaggccggatcagctgacttagtaccaactgcactccatatggcctctctccgcccctccagttacgatgggttccccgagctacgggctgagctgttcgaggctcctca

SEQ ID NO: 45797 - DNA, 1192 bp, Bovine  19866880669150
  misc_feature (1)..(1): n is a, c, g, or t
ncagcaagggcgagggcactcctcatacttactgccgaattgccccgcaacctcaaccccggcatggtgagtggggccctgggccaggagccgagattcatgccatctccctgtaagaggtggacactgggcacacagggcatcctaggaccaaggcctctagtggtgggggtgggcccagaggtgtgacactggtcttgggggactgggattaataggagttctaaagacaaagaccacttaggggtggtggagaaaataaccccccagaaacctttgtcagctgtgtgtctgcttgtctcttgccgttttggggcagtggggcccagcagtgtacctgtgctacaaggtgggcctggccaaggccaacacactggtgtatgaggcaggtgagtagcccctctgtctctggcccctcgacactctgtgtccctctgccctggtgcctctcggcgggtaccttcagtgtccacagaactcacctcccctttgccacatggcccttctctgggatcccctggttctttcccccggagtctgatggaccctactccttttggggaccccccccctctgtcgggggtgcagagctgctgggccgctacccagaggaggacaatgaggcgttcccgctgcccgagtcagtgcccgtcttctgcctgcccatgggggccactatcgagtgctggcctgcccagaccaagtaccccgtgcccgtcttctccacctttgtgctcacgggtgcagctggtgataaggtgggtgtgtggagtgtggtcaggggtctgggctctgcggagcccgcctgactgcccctctgcccctgccaggtgtacggtgctgccctgcagttctacgaggcgttcccgagggccaggctgtcggagcggcaggctcgggccctgggcctgctgagtgctgtggagcggggccgggcactggggggccgggctgtgcgcagccgccgcgccatcgctgtgctgtcccgctggcctgccttcccggccttccgcgccttcctcaccttcctctaccgctactccgtctccggcccccaccgtctgcccctggaagcgtgagcatggggcttccctgatgctgggaagggttacgaggccaggaggaatggaggagaagacgatggagctgggggggtggggggcgcagaggagtcagggacggggctgtagtg

SEQ ID NO: 45798 - DNA, 1326 bp, Bovine  19866880689507
  misc_feature (1)..(1): n is a, c, g, or t
ncgatggacgtgagtctgggtgaactccgggagttggtgatggacagggaggcctggcctgctgcgattcatggggtcacaaagagtcggacacgactgagtcgactgaactgaactgaatgacttatttggggtttccccagtggctcaatggtaaagagtctgcctgccaagcaggagatgtgagtttgatccctgtgtcaggaagatcccctggaggaagaaatgacaacccactcccattttcttgcctgggaaatcccatggacagaggagcctggcgagctacagtccacagggttgcaaagagtcagaacacaactgagcaactaaaccaccaccacaatcacttacgtagttcacagtatttccctgggaaacactaatctttcccttgtacccaattggatagtctgagacatttagcactgaaaatcaagtaatcatatttgaggaaactgtttcatcgcattctcctggcattatgtagtactattctgctctcatcgtattagaagaaacagaaagggcaaaatcagataatctgagtgctcttcatctcttcttccttttaaaaagtgttttaagctatatatattgttttagttttcaaagtcatagctacggtattttttaattaactggaaatatttggttaatgaatttttcttttctaagaaacccttcaagcagggatcttaatacagttgtcttggattatgaaaagcaatgaagcattaaatatctagtctgatgacatttttttctcaaatttatggatgtacaaatagaatatagaaagatcttttaaactgtagttaatattttagtcagtactaggaattgctttcttgatctgaaaattttctcatccactctcaggcttagaagctgtttagtttttatgatcccacctactttcctttttgtttcagattatcccctttatttgccctacttgttggagtagagaatccagttcttgtttgagtggggtttttgcttggggataggcaattgtcttgctattaggagccattctgtttcatacctaatctcatgcagatgtctttagtgctacgtagagatttttcttgttagaggagtttttgaagagccattcttaactgtgtcaaaggtatgaaagtctcagtgaaagatatatatgaccctaatgccagatgtgattatcaatcttagaaagctttataggtttaaaaaaaaaaaaagaatgagtaattggagctgtgtggccaaaggaaggatttgaatactgtgttcttgcctggagagtcccagggacgggggagcctggtgggctgctgt

SEQ ID NO: 45799 - DNA, 2653 bp, Bovine  19866880718531
  misc_feature (1)..(1): n is a, c, g, or t
ntttccagccaaaagccagaatgactcttaaaacacaaatttaagctcttcttggctcaacaccatcttgtctcccagagtaaaagctgaagacctaacaaagaccctagtctccacgaagtcaggccctgatcttgaggtatcacctcctcctctctcttgctcatctgctctgccttcctcacttccacacgtgttcaccgcatggcctttgcacctactgcttgctctgcctggatgctcttcccctgacctcccccttggacagccctttcatatatccaggcctctgctcaaatgtccccccctcacccccctgcccagggaggcctttcccaatcactcaatttgacagaaccctctactgtcacactcccctttctatgctttgttttccatcattgcctttgtcagtgctgacatcttattagatatgtatttgtttgtctgtctcccttgattggactgtaagatccaggaagccaggagtctttctgtcatccaattatctgtatccctgaggcttagaacaaagcctggcatgtgacagacactcagtaaatatttgttgaatgaaggaaggaacaaatacaaaagatgatgaagtattagtgaaagagtaagccaagcgtacacgaaatgcctgtctctgccaagagacgtgggacatgctgggagacaccggcccttgtggtcagtgctaaggcaaagcctgcatctactagacacttggagtgatgactggcatcccatctttatcagcagtgggtaccatttagggtggaagagcctgaatccaaagtccatgagactgtaagtgtctgcattttcagcagaagggaatggtgatttggcttagactactctctgtctagcccagggtctgtctctggcagccaggggaaggagctttctctggaaggagatggttgtttgtgaagctagtttgttttcacattcattcaatgaaatatttagatgggcctgctttgtgcaaggcaccacatgaggagttggaatgttaaaagtgaaaaagacacacatggtccctgctttcagggagtttaggctggaggtggagctgggggagtaagcaaggcgggccagcgtggagcaggatcacttctcaaagggagtgcttctcatctcatgtgagattcaaaggccaagcagggggactggccagccaaggggaaagggtgcagcaagggtggatgagcattctgggggcgaagagaacgcgggtacaggagagggaatatgcgtgagaaagatggactgaaattcagatggctggggcttgcgtaccaactggggagacaggtgagaagtgatgatccggtggggacagctgcacccagacacttgatttaaagcatccgcgcctccaggagctgctgtcaaggaggtcccctgaggctctgcttcttgcactcccccgtgcctcgtggggccggctgagtgccactagaaaagctgctctgaaagtgagtgggagtctgtggctggccgcaggcactcagaagctctgagctggaggtgtatctcttgccaagtggtggcatcctggggtctgtcagactgtgctgggggagaccttctagagttggctttggccagaacactgacaagtttgccaggcagagctgtttcctcctccaggggtgaggttcttttgaggttttggcagcacctgctgagtggtttatttttttttttcccccttctttcctctgctcctcttcctcctcttcttcctctcccttttactttttttttttttctagtgcaagattctacttcggtaccactgcccgcattcctggtggctggaggaagcctggcctttgggaccctcctctgcatcggcatcatcctgaggtgagaagggccccggggtggccccgcggcattctcaggcttcacatctagctttgccagtgctaggatggtggccatgggttggagagccagatatatttgagaggtagaatggaaagatctgatgacagcttagatgggaaggatgaaggagaggaaggaatcaagtctgacccttaagtttctggcttaagcagaacaaccaagtagaaaaacaatgcttacatcttggtaccactggggaaaccccaagtgggcaagtttgggaggccattcagatcattgccaccaggcagatggtagttggggccatgggagaagatggggccaaaaatgtcatctgtggagtacaactgtaatattgtgaagaggaggagcagagaaagggactgaaaaggagcagcctgagagggagcagaagaagcaggaaagcctggttgtgaaagtgtgtgttagacactgaagaaacaccttatgctctgagattgcaacatgaaacatacccttcctctcctaagagccacagactaaaatgagtaaagtaccacttgaggagcactgcagcagaagtgcacgggtaactctgaagtgcctggctagactacctccttggggatattctgtgttttaaaataagcagacgtagtgggtcatttttaaatgtcctatcctggtgcccccctccagtcttggtgaggggcttggttggcactctggtcactgccgtgccatgcctaatcatcccagtctgtctccacttaatcactggtgt

SEQ ID NO: 45800 - DNA, 1256 bp, Bovine  19866880752934
  misc_feature (1)..(1): n is a, c, g, or t
nttccttcttctaacctcttcactagggagctccttctcattctttttaaaatataacttaaaaaaatatttatttggctgcaccgggtcttagttgccacacgtgggatctccaatcttcactgtgacccgtgcaggagctttttttttttttagttgcagcatgtggagtcttcagtcgtggaatgcgaactgttagttacagcatgtgggatctagttccctgaccagggatagaacccaggcccctggtattgggagcacagagtcttcactggatcgccaaagaactccttctttctcattctcgaaagcccagatcaagcatctctcttttccacacatcttagctggcctcttcccaaccccaggcagcgttaggtgcatcccttgggaatctcccagtccatgtgccctatgccatcacagaaccagttctcaaatagcatctgggaaggatggtcagaaggtctggcatgctagccccaatttcaggggaggtggagagaggcagggtggccatctccgtcgacaaccataataccagacatcagatcttgcagcctcattgtgtaccaggccctatgctgtatgttttacaggcacgatctcactcagatcatgcctgagtctttgttagggctctgggataggtattactattccgattacacagaaagggaaattgaggctaaaagagattaactaatttgttgaaggccaaacagttaataggggcttcctgggtgattcagtgggtaaagaatctgcctgcaatgtaggagacacaggagatgtgggttcactctctgggtggggaagatcccctggaggagagcatggcaacccactcagtattcttgcctggaaatcccccggcaagaggaccgaggagcccagcaggctacagtccatagggtctgcaaagagttggatacaacctaagcaactgagcatgcacgcatacagttaataaagagcatgcatacataggctctagagccaggaagacaggttccaaaggctgtaatcttaaccactatatcctggttctgggctatgtgaggggggccagccccaggtacttgcccactcagaccaggctggagggtatttctgggtctctacctgccttagcagattggggagttagaaggtttctgaatatctgctaagtctggggtaagaagaatcgttttctcaacaggaagtttctgataagtttccatttcgttttgacacatgaatcgatcctg

SEQ ID NO: 45801 - DNA, 1550 bp, Bovine  19866880892771
  misc_feature (1)..(1): n is a, c, g, or t
ngcagcagagagccggcagtacttccagcacggtgttgtagccccatgcatcctgagagacgcctgccactccagaaacagtccctgtgctccagaatcataaaatgcctggtgtctacaaagcaacttactgtttacaaggtggtttcataccttgttctcaaccattctcaagacagccccaggcctttcacccaactttatagataccacaggtgaaggctcagaggggtgagtggctcgggccaggatccaaagccaaggcctctgactcactgcccacaagtcctcagcccgctcttcggtgggaaacagagtaaaaatgtgagaagtgcccatttacacagacccaaatgccaagataataatgcaaggtgtctcaaaggtgcgtgagtgcatgctaagtcacttcagtcatgtccgattctttgcaactctatggactatatagcccaccaggctcctcagtccatgggattctccaggcaagaatactggagtgagtccccatttcctcctccaggtcccaaaggtgggatataattaatcaccacgtgcaacctccagtagagaggggggagacatcactgtccaagaaagcaagctttcggagacagagggaggggtacctgagatctccagcattagagggcaagggatccaatatggggcagccacggaatcagtggagggcttggatttgagcccagcgttcccagatgcccaagtttgtgttctcaatcccctttgcaggctgagatggaaagagagcagctctccctggtgtctgccaatctacccttcatctatgtgatacagttagtccccacttagtgctgggaacccaagggagaacccatgcaggagctcattctttctttctttcatgacgatttcaacctcttctcatttcttgagcatctcctaggtgtccaacagtgtggtagacactacaggatatttacagagatcctctgcctaccagaagcttccaaactggcttatatacagaacccaactttctatactatgtaggaccatccagctgcagggaaagatgtccattttgctcttcctagacgatggtctaattataagccatgtttcatttagcctcttgtatgttctacacttaatgaagagcagcctggaatcatttactcggcacacacgcacagaaatgtctcgaggagtactatgctgctccaattaagggcccaggacaaaacagaacacggtttcagcccttgggaaggttccgatctttgaaagcactattgggtgcctgaaacaccatccgaaccacaagacctagcggggctgaagagcaggtggtgaattcagggacactcagactttgaggataaggccacttccccttcagaaatcaactgggaacagatcataatgctttcgagccagaaatgaccatcactttcttctcaaaggggtctgaagacatctggggagcatcacgcctccccagggaaaggatttgggaccagcctgcgtatttcaaactctaattaatttcttttggcagaaatgaa

SEQ ID NO: 45802 - DNA, 3451 bp, Bovine  19866880895067
  misc_feature (1)..(1): n is a, c, g, or t
ntttactgaggcttgctcctcagattttggtgtccacagagtttactggaaccaatccccctgtggatatcaagggatacctgtactctcaaaatgtgagggattattaatccttgtgaggcactgagagacagtatgtatgggggcccatggggatatagtccaggctgaagaccaagagcctctgctagacagggctccagtgcaggggtctgtcagtcagcagggtgggcagtacagcccagaagattcctttgctgtcccataggaggacacccttgttcctgctcccatctgacccctggaaccacagctctgtaagtgtagcctccctcctttcagactcaagcagataacagtaccctatcctgccacatcctcactcagcatcctgttcattccttacaagtcacaagtctcagttacgtattcatctttacttggaaccctgaatattcattggaaggactgaagctgaagctccaatacttgggccacctgatgccaagagccaactcattagaaaagacccttatgctgggaaagattgagggcaaaaggagaagggggcggcagaggataagatggttagatagcatcaccaacttaatggacaggaatctgagcaaactccaagagacagtgaaggacaggggagcctagaatgctgtagtgcacggggtcgcaaaaagttggatgcaacttagctattgaacaacagcttggtttttatctatctctttcccacctctccacccaccgcccagagcagtgtttcttgatctgtctgcaagaatcacttggaaagcttatttaaaagacccacattctggcccaccctagaccaagtaaatctgaaactctaggcatgaggctctggcattgggaattttcttaagtttccttgggtgatcccaaaatgtaacccgaattgtgacccaaaaagggatgggggggtcatagctgccttgtttgctgtggaatctctggtgccagcccagctcttagcactataggtgttgggtaaattcttgtgtagtgaatgaataattcctgttggctgtgtgaccctggatgattagactcctccatcttgggtttgatttcctcctctgaggaataggtgaataggttggatgagccctgaagtgccttccactctgaagatcccttattctgtgccctgtttttttaaaatttattatttattcttggctgtgctgggtcgtcacacaggcttttccctagttgcagcacgtgagggctactctcattgtggcgggcaggcttattgtggtggcttctcttgtttcagggcacaggctctgggcacactggctgcagttagttgtggcacgtgggttttgtggctctgcagcgtgtggaaatcttcccaggcgagggatcgaacccgtgtcccctgcattggcaggcagactcttcaccactggaccaccagggaagtccttctgtgctctattcagagcccttgttctatgcagacctcgtgtgtggtctcgaggcatgtgagctccctggggacaggactcatgcctggctcatctcaactttctccaagggccaggatggtcctggtacagtcaatagaattttactgaataaagaggtgtgtgagtgaatgactatgtcacgtgaagaaaaggacaggtggacagtggcccttgttaaccacccagaaaggaaactcatgtaggaaactcattgctaagcctgtgactaatggagtacctgacgagttatcctatgccatgagaaggacacccttcctattcccagggggtggtccaatctggaataaagggtcccaggtgatctccaagccttagaaagtactggagcagtgctggcccagagaggggaaggtgactctggcacaggactgtcctcccctctcgttaggtctcagtcacccagatctagttctaaagtagtctgatggtcgccctgataagttctggaagagttctgatgtgacatggacaggatctggcatggggtgccacggggccctgtggggagtgggggaaagtctgctctgagctgtcacagagcagaagactcagctctgtgacaaacactcttccttcctgaccttgcccaggtttctcctgagtggggaaggaatgccacgttctccaaactgctgagtcttactgcctccttagcctccgacagtgattccactcctttggggtttggccagcctgaaaacggaatgctttggtgccaggacctggggtcatctgcaagtgctgctcttacaccagatactatcctgaacaaagctggctccagacttgatcctctgccacttaactggttctaagagcctgtgggatttttcagccagttggtgtaattccaagagctatgggagggagattttatgtgacagagcaattccaaacttgccttcaaggagcttgtaattagaaaggagaaccaattcaattcaactcacctcaatccaataaaataattaggaagaaccaactagtacttgaaatttgctaagagaacaggtcttaagtgttctttaaaaaaaaaaaaaaaaggtaacaatgtgaggtagtagatgttaattaacttgactgtggtaatcatttcacaatgtatacctatatcaaatcatctcattgtacactttaaatatatacaattttatttgtcagttatacctcaatccttttaagattctttttagaatcaactaggtgagaaaactgtggtgatataaatatgaatcagacatattcccatgaatcagctcatgatctcagttaactccagcatacaagagacacgataagggactgtcatggaaagcttcttgggcaagacagggatttagtagtgcttcgaaggcctgtatcagacaaacctggtgttgtgctaacacaataccactgattcctcccattcctttcatctgcttcttcgtgtgtgactttgctttgctttccagcaagaagtacagtccgtttctcaagcccttgaatctgaagctggccatttgccttcctttggccagcggggtcttagagaatacgacacagaatgtgacctttgaaggaggtcagtgcagcagggcttgctgtaatactgggccccacatttcctgtcactccaacctatgccaacacagctgccagacgtaagagtgaggctttcctcgacaagctgcatgacagaagctcaccccaggtgagaccagcagaagaactaccatgctgagccctgccccgactgctgacccacaccaaagtgaactacatgattattaagtcattaatatggggtgtgctttgtcatgcaacaaaaccaatacataaacaaatctaactcacgccttcacttaacacacatgttacacgttggggtgatgtgcctgccatgtctaacatttccctttcagcttctcaggccacag

SEQ ID NO: 45803 - DNA, 856 bp, Bovine  19866880906026
  misc_feature (1)..(1): n is a, c, g, or t
nccgcagggctgtgctcccacttgagatccacggcggccaggggcgcggcggtgtcggagcagacgcccagcgcgctctcactgctgcccagcaccgtgcggactgtccaacccggcagcaggtccggcctcgccttcacccgggccagggccagctccaccgccggtcccacgcgcgcccaagaccacgggtacgaggtgttggtcagaggcagcaccacggccaccgtcaggttaccagcgtagctgcccgggagcagtagcaacggcggcaggagcagaagcaggcgcaggcgggcgccggaggggcgcccggggcgcggcatggcctcagcgggcaccatggtgggcgagcgctcccaccatggcctcaagcgtccactccggctgagcggccggtacgggcaccgggagcgcccctgtgggagggaggaggggcggagcgggggcgctcaccccggagcacgctccccctctagctgcgacagtccgcgcctggagcgccaggggcgcgcgacctaggggtgtgcccagggctctgcggagcaggtgggtgcgaggagagcgcgggggccgagaggacccgagtgtgaaccacagggtgtctgtgtgtatgttaggagagagaaaaagagagcgcgagcgagcgctcggtggagaaggatgggagagagggctccagggaggataaggggagtgtgtttgtgtgtgtgcgtgagcgcttggctcagggagtgtgccagaaggggcgtccggccggcccaagtctccgacagtccgaggggaactggggaggacccaagccaagctccgaaccctccctcccggccgcttcccctcccagactccgagaccg

SEQ ID NO: 45804 - DNA, 1635 bp, Bovine  19866880914835
  misc_feature (1)..(1): n is a, c, g, or t
ntggagttccccatgcaagggggcctcatgtccttcccctccgtggccccagtgtccgctgcaaaatgagaggctctgagatccaatttggacattcgaaggtcctgattcttagagggtgaggcctgagaccaggggcctgtgttggacacgggggcctcctggacaggcatgtacctcagttctgagaagtgatggaagtgtttatgccatgccatgccctctctgtgctgggcccttgcctctccagcttgctctgtcctggtttgcccatcacacagccccacacattgccggctccagggccgcgcagagcaattcttcgcatggctgcttgggctggcccataaggtagggggcaggggcagggtcccccagcttagcacgagcccagctccacatgcactggtatagcctggccagaggagcagccctcgtgggaaagattcgtggccagaaagaaattcagctgccttagaaagaaatgaatgttggggccagggttgggaggcagaagtttgatttaacctggaaaagtttgatttaaccttcagcatgacgggagtaacagagaggttgggtgagcgtgctggtcaaaggctgagctgagacttcctcaccaacccccatctctttgctccacttcacaggttgtttagggatgtagaggccctttcctctgtctgtcctgctgtttcctctacagctggggccaaaggagccttctgctgtcttttgttggtggtggtgggtgattttgttaaaaactgctgtattttgaagttagtcaccacgtacttttctcttcttccttcactgccaccctgacaggccatcctaacaaccgaggatgcaggaaagaaaaccgtgacacccatgcctgggacctctgagggtaaaaagggcccatcaagggatctgtgacacaaattcaaggtgaatcagtgtagtcatatgacttgggtaaggggtctcctggctgccctgcatttaggttctgcctgtgccatcttccctgccacaaggagcaagcactgggctactcagccggctgtgaagaggcaggtgcagctgcaggagagctcacggaggggaggcagcctgtgcaagatgcgctctcaccttgctggaccataatttaccctgcctcctgccctgggatctcatacaactatgatgtggaatagaggagataatgggtataaaagggcttcataaactacaaaaggtcattcattcatgcattcaacaaacacacgctggaggccctctatctgctgggggctgggcattcaagatgcagtgaaacagctctgagcatggctcctgagatgaggccatggaggggaactattaacagaaggtactatggaagcaaggggctgaggggccaacctcagcccaggcagctgtaattggaaaggcatgatctctaaacgggagagaggaccagcccagcaccagctgagactccccctccttccccagggcagctgagctggggtttttccagacacaggtttccaccatcagttagggggacctagaggctgctcaaagggttccctctgctcctaactgccaccgacaggctgagctatggcaacgtgactgcctggccaaactcttcaaata

SEQ ID NO: 45805 - DNA, 1270 bp, Bovine  19866880948705
  misc_feature (1)..(1): n is a, c, g, or t
nacggaggacacattagggacttgttctatttagaagtgctgctgcttttcctcctacctattttctaatatatttttaaaggtaatatgcattctttttgtaataaaacaataacaacataaaaatcactgtgccaggagcctccatgtctttaagaaagtaaacggcttctccatccttggccagagcagacacagccgatgtggaagctggtccctggagagtggtctttccattgtcatctggcagagcatctcatttttctcatcacagattccctgtgatgacctgttgtcttcccacctctcacctctccatctccccaaacagatgcagaatgtcatgtatgacttgatcacagaactcaatgatcggagcgaagacctggagaaacagatcggcagcctggagtctaagctggagcacctcaccgccagcttcaattccctgcccctgctcatcgccgacactttgcgccagcagcagcagcagctcctgtctgccctcatggaggcccggggcgtcagcgtggcagtgggcaccacccacaccccactctccgacagcccgatcggggtcagctccacctccttcccgaccccatacacaagttcaagcagttgctaaataaaactccccactccagaagcattacccataggtcttaagatgcaaatcaactctctcctggtcactttgccatcaaggaacatttcagaccagggatcgtaaagaagagacaccgagctaattaactaactcatgttcattcagcgtgcttggtttgatatgccttgaaaccagaaatctaatctctgtttaggtgcctctacttgggagcaggaagaggagatgacaggaagcgacgcctctggcagggcccttgctgcagagttggtggagaacagaaatccacgttcaatctcaggtcttcacgtggggaggggtggggggtcagatgcactgaagtagccaacagtgaagccagcctggaggtgggtcccgctgtggggagggtgtggtatcaggcttgggagatgggttcctcacccctggggtcctccagcccactgctttcctttccttttgtctaaggaagtccccagaggacaaaagtaagagagagctgtccacagcttgccaaaatagatgttctttcctcccatcccttacacagtcataaaatttagactgaaagaaaatttgatgaataaaaagccagactctccattcaatattaatactcatataaacccatgtatttgcaag

SEQ ID NO: 45806 - DNA, 1505 bp, Bovine  19866880950414
  misc_feature (1)..(1): n is a, c, g, or t
nggtttgaatggccttcactggggatcgtggatgggccagtggccaaggtcctcctttagagctgaacagatagattggggacccctgagatcctgaagcccctggatagcccctcagcctgcttggtccgaggacatgagctccttcagaaccttaggacttgactggaatgttctggatagtggcctcctctgccgagctcatgtccatttcttgccctgtgccaacaaccactcccctgacagatggctgcacacgagggagactggaaacggggaatgtgtccagaggacggtgccgggcctcccaacgacctgcctgcacctggatggctgaaagggaaggaggaaagaggggccagtgctgctcagttcgaataccacgagtccttgtcagactacccttcaaagacagaaagctgagaggatgacgcatcggcagccccctcggtgacgacggtgtcacctctcatcttatctagtgctgtgtattttttggagcgttgtcgggtatattgtcagacctcttgcctgcctgactttaccccttagacttttaggtttttacctcctccaggaagctttctggccgcccccactccctgggcaaggtgccccttctagaagttggctgtgttctgacctggacactgtttctcaccctgtgtctgctctggccacaggtccgtggtgggtggggactgactcggactctctgctctgtgccacagccaagagcagccagcacacggcagggattcgataactggaaccaaatgaatgaacaacgagcccaggggtcagacgggtagattgattctttcctcggtccatagaagaccaaacggagtctctttaagactgacagactggcctgaagccctggcttgtgcatcataaggggtccaggggtcttggcaggctgccctctgtgagctgggctggccaggcccactgtgaccctctgcatcgccctcttgtcccttcttgtcccctctcatcacaggccttggtcccagagcctcttcacactcagatctgcagctggccatggattgccatggttaccactccagccttggcagtctctgtgtgacattttggttttatttgctaaatatttgaacacttggctttaaccctttctgtcccagagagggctttcctgccatgttgcccttccttaggggtgggtggtctcctgctgccatctcggggccccccagagcccaagggcggcatgcctagggagcagcaaggctgtttctcagctgcctgtgttgactttctgttttggcagttggaaatgtcatcctgtgtcatgcttcttgacagggcgtctgttaacaggtgtgaaaaccattgccctgggcatgttcagacttgccccagcctcgagggccagtcccagacttccggagtcagctgcctgcagctccattgacttccaggcagtcacctcttgccaagtcctccagaagcttcctcagctccaggactccagg

SEQ ID NO: 45807 - DNA, 955 bp, Bovine  19866880963345
  misc_feature (1)..(1): n is a, c, g, or t
nccttttaaaagaaactgaaattccttctatctcctttcccggtctagccaataaagaagaagtgcaactttgtgtggcattgcctgataggctggatcttcctgagcaagaggtggacagctttatgccaggactagatttacagtcaatctgactgactgggttttctttttcttcttcttcccctctaaactgtatcagagaatgcctggctattgtgccttaatatataatggtgcagggctttaagtactgcaaagggtccagaagagaaagtccttgagttccagttatggctcaaatcatgatctctctagcaatcgttttacctgaccaaagctggtttgacttttctcagagaactaaagcattctgactgagttcagggactgcttgtcagttagagggttctaaggggttgcttgtcccaatgaggtggctaacaaagaatatgctccagtaaagaaaccaggacgccacagctgctattcccctaaatatgcacctccagcttgatgggtggaggaggtaaggaaggaacaatcagtaaaattgaaacaagaggcctgggttacataaaacatgtaaaataatgcttaaaacaagaatgaatccccccctcctaaaaaaaagatacaaaaagatttaaaaaaaaaaaaaaaaagggaacaatcccagcagttaggatactattattgacacattgactcttttttttcccacactgtggttctctaacaaaacccaacctggaggtctggccagtcccagccagaaaaagaaaaaagttgagtacagtttgggtgggggtggtgggggggcaataaggagagacatttatccaaatatggggagggggacagcacacaggctttgaatgtactttaagactgtgagattaacaacaaaattctcgcatttccctcccccaccaccctgtggtgttatgcttaa

SEQ ID NO: 45808 - DNA, 1292 bp, Bovine  19866880969072
  misc_feature (1)..(1): n is a, c, g, or t
ntgaaaacaggagcaccattcttgggacataaaaaaggatacggatcttttagataatcgataggtaaaaataacaagtaaaaagaaaagccagcagtaagtgtggcatctatggtatacagaaccaccaaggaaaatgctcaaaggagttattgagataaaagtgaggccatcgagggaagagcaatagcaatacaaaaagataaaagaagaaatttaacaagagaccaggtcttcttgaaagagtggccttcctaggttgtctaccttttgctgtctgattattctcttgtccttagaagaccaggcccagagctgtacacagctagactctgctctcagaaaggtgatgctgtcctgggataccccacaggaccatcatccacaccacagatgacatccttcattttaccctaaacagatgaaatgttccctacagtatcatttaagtccccacaagcagaagtcagagaccttggaatgagaaatgtgatgactagttggatggttttcacatcacaagcattatgtatagttacatgatggtatgagaaaaatatcttgcatccggatgccctgtcctcacaatgcctgtcatacactggatctggatgtttctggagcctcttgaagttggagaagtattacaataatttttgcaccgagataaacgtggcacaataggaataggctactgacaaatctatgtcaccttatcttacccacagtgttccctaagggctccctttatcttcagaaccttccactttggtgtggttttaggtcacatagaagggaccacctgggtcactcatcctcacttctcctcccagctctcatgtgaggcccttgacacctttgtgctcttaacatcgggggctggaaaactgttactggataaacatcactgaacaaacccccagacaatacttctattcatgaaggtgtcctggagttgcacctattcacacatgtgtgtgcatgtgtgcacagatcctcttcccctgccctcatatccacacacctgatcatgcactcccgtggaacacagcttgtttggatacgagataaaaactctgcagaagctgttatttttagaaggctgcttatctctccagaatgccaattttggcttgtcattcgtctcaaagcaagcatggtgtgccctgttttgtatttgaagggacctgcgtcttcagtgaggctcagaatgtggcaacactggcaaacccactgaactgacagcacccacatccagattcagaccaactcaacgtgcatttagagagtgc

SEQ ID NO: 45809 - DNA, 2878 bp, Bovine  19866880971004
  misc_feature (1)..(1): n is a, c, g, or t
ntaatatcaactgcatttccaaccaatcaatctggtgccaagctcagggtttagcacaaatcactctggaaagcaggaatgattcattcccattatgcagctggggaaactgactcaaaatcttgaaaatcacacaaatggcccaaatttggactctgccttcaacaccttgagaacttcaagggcaggaaacataggctgggaggtacagaggtcctacatcagagcactggctcagaagagtgggagtaaggcccaccctggccagggccttgtgccttttgttccacagaggtcgatttagcctgtcatttttaaaaactggtttaattcactgcaagtatttttcaatatcaggacatttcacccccttcactgaacactggtaccttggcctggcctttgagtgtccacagctagccgcaatagttcctctattggggcctgtccctccccgaggccacagcgccactgggccctgcagtgggcatctgtgttggagactctgagcaatggccactggaaagaggctgatccagggttatctcagacttcctcgtgccctcaaacttccaagttcttcagagataagaacttatgtccctaccagtccacttggggcgacaagggcctaaaagaaaatgtcaatccatctttattgggggtggggggaactctgcactgcaactgccttaaataatgcaagccctgccccaccccagtgcctggtgagctcagacgatcatctccagctgccgggcatactcgatgacctgtttggccagctccgtggaagggatggtggtatcttccggcttctgctgctggctggcaaagctgtagtagttgttgaggcccaggacccaccctcgctgcaagaaaggagagatgggagatgggtggggtgatcacacacaccctccccagccccccgagccagcacttaacccatgtaggccctggctcactttcctcaccaaccctgggcaagtaatttcacttttctgtgcccccgtttctccatgtttgagatgggaccctaatcacacacctctctgggtctgttgtggggaatcatatgaatcaaatagtactgagaacaatggcccagagtaaacgatcattagatatcagctgtccccatcacccgagttgagcttcacctattccagtctgaccgtgaccctcgtcagtcaccagggctactccaccacaagcatcagcacctccagggaccctgatcccacacaaacaccccagagccaatgaaccaaagtcttgtggggaaaagctgcactctccaaggaattctgaggacagacaccatcaagcgctaagcctcccgctctggctggtgccaggtgctgggctcagcttatcccacacatgaaaccctagcccctttctacagatagggaaactgaagttcagagcagtttggccacttgcctgaggtcacacaactggagtcttgctccagtgtccctccagaccatccctccctgctgttagtgagtgcacctatggtcccttgacctccaccccagccaccttcttggcgtagtctgtcatctttttgggtgtgttgaagaagaggatccgggtggcctctgtgaagaggattttctcataggccttctcgatacaaccagcaatttcatccctgggggaagatgagtctcattattgtgcacagacaaggcctggtccttcaattcagcacttacaactgaagtatgttacctgccccatttatcccatcgaggctcaggggagagtagcttgactagagctgcaaagctagggccacagcagggcacacactcaggtctctgggactcctgggcccaggctcagattctcactcctagccacttcaggacttcaggcttggctgaaactgagcctcagattcacataaggcgatctcttcacctaacaccctccccacaggatccaatcccaagggggatctttgtacccactttaagaggtcaacactgaagttaaaaaacagcaagacatcaaggcactgaaatgggacaagggagtagctctgggcaaaaactagtgaaaaggaggagcttgcctgtttgggaggtattttattaatatctcttaggctaggtggtagggtatgtgggcactcattatattattccctgtgcattgcagagagtagaaatatttcagagttaaaaataacctaaacctactcaactgcccctcctcactccccgcacctctctgggcccagctttgtcactggaggaatgaaaacgccactcagtctggcgctttgcccgggtgaaccaactctgatactacctgaacacatggacttgtacacgtcacgcccatccacccatgcagtgccacctgtgtacacagcaacccccaaggagctagcgggatttggtggcccgcttctaaagaacggaaaactgaggttccacagtttaggtgacctgaggtgaagccagatgactcaaggagtacttccatgagaaaggcagccaggtctctgtctgagcactgagctgagcagtttgggcaccaagcccatgctcagggtcgaattccatgggcccatacacacacacggcccagagtgagaagagggctcttaccaccatctcatgaccagttccagttcacagaaaaggaaactcatgtgcccagcctccccagatcacaagtggcccgaatgggattcaaacacagagctatctgactctggagtccaagctctttctacactccgcagggccctggcccccacacacctgatagtgtcaagcaggatgtcgatgaagaaagtgtagctctcggcgggaatgttgcctttggccaggaataccttattgtagctgccctc

SEQ ID NO: 45810 - DNA, 1694 bp, Bovine  19866881002243
  misc_feature (1)..(1): n is a, c, g, or t
nggagaatttgagccgtggtgattttgcctccattctcttaaaaacaaagatgtcattttaccaggttcctgctgaacagagagactagaattatcagcattttcttggtcgtataatgcaatgaagtctccaaacagtaaaaattctaccatgccttccaatttcccaaaccctcagagagtctattatctttagctcagatttagaatcactgcagtcctactacatacagccccccttacaagcacagcagggacagccactgagacggttacgaggaagcatggccctcgtggagctcataacggagcaagacgtgtcctaatcgggaggaagccctgggaccctgtggtgctttccaaacacacatccccaggcagtggggttccctagcctgcagggtccagaacgtggcacaggggatctgacgcccatccctaatgtagagcagggatgaagagatcatcatctgaaaactaccgaccacagtacaaaagcagcatggtccagcggctaagactccacgctcccagtacagtgggcccagggttctgtccctggtgagggaactggatcccatgtgccacaactaaaggatcctgcatgctgcaactaagacccagcacagtcaaatacatacaaaaatattttgaaaagaacaatacaaaacggaatgaattaactgaaaaagtcatggacagtgcacatctgcactcacagggaaacagaatattctattaagttgaacatgtgctccccagtgactttgaagaagtgggagtttgtattcatggaaaggaggttggaactgagtgctgaggaagggaatttggtcactgactttaattatcctaaaagctttaagatgtctgaccagattatatttgtaagagacttaagaggagtcacctttaaacttaagtatgttggagccaaggaactgtccttttgattgtttgctatttcaagttcaaggctatactaaggggatagccagctccctttgcggacagaaaagggaggcagttaggagaagggacaggttgcttggacagtccccacacaagggcctcctgaatgcaaacttcatccgttcttgctatcaaaaatcattcagggacttccctggtggtccagtggctaagactctgggctcccaatgcaggggacccagactcaatccctagcaggggaaactagattctgcacaccacaattaagagcttgcgtgtggcagtgaagaccgaagacctcccattccacagctaagacctggtgcagccaaataaataaataaagataaacatttttttaaaaaacattcatacccactctgtctacatttttctctccttatcatgagcatccttccaacatggaatactggatacaatcagaggccccagagatcgtctgatctaatctgcctactttacaggtgacaaaactcaggtagagagagaagtggcctacccaagctcacactgtgatcagtaccccagacagaccaggcccctcgcaccgtgcaaagagggcagaggcttgttgggaggaagtgccttggatggggcaggcacttgggctacttttcccactccggtcactcattagctgtctgtgttgggacaatgatctcttgtatccctaattatagcagaagcttcttgagaagtatgcctggccctcctcgttt

SEQ ID NO: 45811 - DNA, 1277 bp, Bovine  19866881008692
  misc_feature (1)..(1): n is a, c, g, or t
nggcgggcacagacagagcctcggctccctagtcagggatcaccagttaagcacaatacgtaaggttccaggtaaggccaagcgctgagacggcaaggacactaagacgctgcagttttaagctgctgtgtttctctaactcaccttgaaagacttggctggcatgttgttactgagacgctgcctaaaccaattttcccatcacagcagacgggaccctcagaatcaattactaaaccaccgaaccgagcacactttgaaaaggggagacatcatgttaacacctggcaatgaagtgtgcggtttgctgggatctgggaaccaggatgacagtccggttccagctcccaagacaggtccttacccagagtgacggatttgagatacacaggctgcaggaagtgggtcaacagtgccccctgcaggcccagcacgttccagcgcaggatcttgtcgctgcaggacatggtgcggagtctctcccccagccgaatgccgtcccatgtgggcacaatgtcactggactccactgggatcgtgccttcccctggatgggagacttggattagacctgcaagggccgctgggccagggccctccctggcgtggcattttctgctccttagacttgggccagaggcttctcactcatctgttctttgaatatttcacagcagctactttgtgctgggcactaggcttggtgctgggaagcaacagtgggcaaaaccaaatcagatccttgcgttcctagcgggtttatgggagtgagggggcagaaagggaacagacactagacaagtaagccaatacacacgtaacgactgtagatggtttgagggagctataatggacaggtcagggcatctcctgggacaggattgtcagggggctgagacacgaaggaagagaagaaacagttgagagtgtttcagacacagagttcagcaaaagcaaaggctctgaggcagcagagggtttagctgttgaaggacctgacgaagaaccaggatggctgaagtggcagggcttggttttgtgtcgtgggaagccacgacaggctggtgggcttttcgttcttcgtgaactttaatgagatacaatccacccatttagagtatataataatttttagtgtattcacagacttgtgcagccatcaccacaatcaatgtgagaacatttcatcaccctccaaggaagcctcctatccattagcagtcacaccccatttccctccagccccttccaccgctggcccagccagcccctaattt

SEQ ID NO: 45812 - DNA, 2089 bp, Bovine  19866881054141
  misc_feature (1)..(1): n is a, c, g, or t
ntattgaatctttctgaatcttagctgcctcctctgtcaatcagacacttctaacgcccaccacacaggatggtaggattcagtaaggtaacttggcaacttggcaactaggagacactcgacttgtgtgacaatcagctgcagaaggaactcacatgctgaacgatggctcattttaggaaacttcgaaaaactctcccaatgctaatgttttcatttggtggaaaaaactcatcatgctaaattaagtggaacgtttctgctaattatttagctaaaatgttcctgcaaatttagcagaagaacaataggtttaaactaatattgcctcatattcattgtcctatctttttcataaaacaatccttcggataaatctaagtgagaatttactcagaaatttacaaatctttagcttttaaaagttaaaagcaaagttttgggcaaagggaaatctggggagtctgggtcccacagttacttggccataggaaagtaataaatgcctcttaatttctatcccttcctctgtttcctgaggcagatcatgattttcattctttcttcacggcatctagcacatttctcaatgatgtcttttctgctgttaggtctgtttgccccttgggttgtaaggttcataaggacctgggacctgtgcatcttcatccttgggtgcctggagcccagcgtagggcctgggacatggcaaagaaatgcctgggaaatttttgttggctgttacaaaataccatcatgaacactgtgctatacatccaagacattgttgaaatcaggcatgttactcctgcttcacaggtattaaaaaggcagtatagaaattgggagctccacaattaaattatatttatcaagaaccctctctgtcttctgcagaaattctgaaataaacaattttgtttattcccctaagatttctcaagaaatatgagacatttctgaacttggactttgacaagccttacagggagcaaactgaataaaaaaggtaaaaggaaaaaaaaaagaaagaaaacccacccagtagcaaatcttttatttccagcttccggtaaactcacttcctgttattctgtccagctgtgtaacctatgtgtagaataagaggtatatcctctacattaattgagtaggtgttttgtgatattttaaatatcttttaaaattcaccaatataaaattttttaaaagagcaaagagaaaaaaattataattcttaagttagtaattaaattttttaataaatttgaatttattctctaattgaatgttttactgttgcattcctaaatacatttattcctgtaaactgtttaaagcaaagcctgggacttaatatgtgctccaatattaaatgctagctactactattattacatttatttcatattggacactgacttttatttttttaattttaaaattttattcattttttttctagaaaagcaacaagttactatacaaacttttgacttctaaatacaactttgtgagtctgagtggaaagaatgccttgttgctgttcttgctgtttagctgctaagtcgtggggactctttgtgaccccatggactgtagcctaccaggctcctctgtccatggatttcccaggcaagaatactggagtgggttgctatttatgtgtaaagtttaaagtgcttttgcatataccatttcgaatgtgtcctgaggtaccttggtgtagaaaccataccattcagtctggagtgggaagatctgggttctaatttatgttctgtctcttaaagagccttacgaacatcttatgagcttcagaaactctttgatcttattttctaccctgtaacaaggggtagtattagcgtcccctagttttcaggattttgtgaggattatatggggggaaattattcatttttaaaaagcaaagtagtttccctactatcagtgtggatccataagaaaacgaaacaaatccacccccccaaaatctcagataatataaacaacttatcccaattaaagagaaagagaggaataaaaaccaaaggacaaagaaaagtgaattaaagcaaaacattat

SEQ ID NO: 45813 - DNA, 3100 bp, Bovine  19866881171763
  misc_feature (1)..(1): n is a, c, g, or t
nagttgtattttattcggtggacattctcaggacttcaaagacagcatctcacataaatctgagagattgctccaaagaagcaagaggaaaagcaggatatacaggcgtttttgtaacaaaagactgcgtcgtcagaacatcaaaagattactgttaaaagaaactagatacctcaagttaagggacgacgtaagagcctggcctcactgcaatcattgctttgctatatgcctcagctacctggggccagtatcctgtgctttctcatcctgagtctcctccgggagtaccagttgtggggtggctgcatctagctgactgttgtatggacttggcagtgggcaacccatttgtctccaacctgagttcccttagcgttcatcattcggttggcagggtgattcttgatggctgtaacatcctttgtttactgatatggcaggcgatatttcagttctccaggggaatttctggcagaaagtatagcttgaacaaaggtgtggaggtgagaaagcatacataacactgtagagacagaactatattcaagcttggagatgcagaaaatgaggctgagaagataaagataggcccgatctttattttattgttgctctcatcatacaaatcaggaaacagaggctctgagaggttaagtagcctgcccttagtcacacagtgagcaaatggcagaactgagatggggacttgatctgactccagaacacaggctccagctggtgaattagacagggcggcccactttgatgcagaatctaggtggggtctgacacacccattcttgggctttaacacagagggctttctgaaaccttctggtttcagtcccctttgattttttttcgggtctgccacaaagaggagggaagggggcaaccatagtgggaactgctccttgcaaccttattttaaatatcaggagagggacttccctggtggtccagtggctaagactctgcattctcaatgcagggggcctgggttcatccctggtcagggaactggatccccatgctgcaaccaagacttgacacaatcaaataaattttaaaagagaagtatttttttttttttttaataagtaaatatcaggagagagagcttgtggtaaaaaaatttagctttcaacatgcctttttcccttctgtgggtgtggccaaagcaagtcctcccaactagcttctatcaggtcagcgctgggtcagggcaagcctctggtccttccaggcacagctgatgggcagttcccaaagagaaacacagaggcccctgggtctgagggctgcatttcagaagctgtgtttcttcagtcccatccgtgggggcttccatcaggctgcacccattaccttatcccaggaacctggatcctggttcggatctgcctaaaggcctaatggaaaagcacattctaattagcagttgcccagccagagactcttcagcctagaccttatttcagcacttttcattccctccaaactcggctgtgaggccaccctgtcagcttcaggctccttggggaaacttggtgggctctttcaagaggtgtttgtggttgcttctgaaaagccgagtaccagtttctgtctgtcaaactgggagggcggacacgcacgttttgacacctctggcctggaccctgtgtcaggtgtatagatcttcacagccacagtgtcttcataactataccaacaattagttatataccgacaatacagacccttatatctgacagatgaggaaacagaaactcaagggaattgtagtcacagacacagtaggtggaggtctggacgggaacccaggtctcaatccccttccaaagcccaaaccttttccttgccggtactgcgggggacagacaggcacggggaaagaatgtacctttactgcagtgagtctcctgatgcctcagcccagatctattaaatcagaatctctgggtgtgggaatcagacacggatggttttaagggctcccaggtggttcagagggacagaaagggctgccaagcactgctttactgtaactgtaagaggcacatcgcctcctccagggctctccaggtgctcctttcacagagtaatcctggtccgaaaccaaaaatcaaaaccgagccagtggtgtctaattcccctgctctgatcaacagaagtagggggggagggtccccggccgagctcgcccccgcggggttcggagctcctgccctggaggttcaggtgcggcgctgcggcaggaagccaccccctccgctcggccggtgcgcggggctgttgcgccatcctcctcgactttcgtaacagcaccctgggacagccgagagacagctccagggcgagttcctcaaatgttttcctgccttgccgggaccgtccgcggttctgagtcatgtgcaagtgggaagtcgcactgacactgagcacggccagagggacccgagccgagagcggcgcagggctcggggactcgccgtgcgtgcggagcgcgggccccccggggatgggggctgccctccgggcgtgagcccgcccgccgccccgccccagccgtcggctcccggcccgcccgcccgcccgccctcctgtctctctgggaacatggggcattaggcgaggaggaagcatgctggccgtccgctgcgcgctgctgaccgccctcctcgccgcgtccgggacggcgctggtcttgaagggctgccccgcgctgggtaagggcttcgggcgcttccggagggctggggcagctggcgggtggaggaaccgaggttgctgcggtagacgctgggcggcggagggaggcagggggcagtgatggctccccatgtccggggctagctggcgtccccgcggcacaaggtgcggccccgggctccccaagctgtccccccgcgggcgctagctcgcgcgcccccttgctgcgtcctgccgcttcggcccggcgcgctctccccgtgacttctctgcctccggtaagctctctgcgatccgcgtacaggacgtggtgtattctcagaaacccgatcctcgggtctccttgccgtgccccccaagagtccttacacaactgcgtcct

SEQ ID NO: 45814 - DNA, 4676 bp, Bovine  19866881210890
  misc_feature (1)..(1): n is a, c, g, or t
nttattattgaggagggagagcctgagcgcagtgtccatagcaaccctcccgttttcacctttaccgggagaggaggaaggcaagggaaggcagggaggcagcgagatgcctgcccttttgcattattcatatcaaagtgctgggtgcagaggccttggctgttgactttgccctgcacaggtggtgtggggagaggggacttttccccatctagtcacagcgacttggagtggagcttgggtatggggtggagtcagtaagaaagccggcttcccaggtggcgctagtggtaaggaacctgctttaacaacgcaaaagacgcaggttcgagctctgtggttccttccagccctctcagtcagcgattttatgctggcttccttaggaagataatagtggtaatatattcttttccgatgatgaaacagctcgaggaacctgccaaataggagctacttcttcaaaacgttcacagaggtgaatcctggcactgaatgtagttcctgggtctccaaggaaggaggcagaaggttaagggcgtggttctgtttggggatctccctccaggcttcccaaggggcctggagtgcagtgctatgtgtacatgccaccagcagaggtctccacactcctcacaaacccgccactggtttccgtgccccaggtgggtgacgggtgagcataggctgtggcctcaatctcaaagccagagctgggctgggagccaccacgaccttcctgcttgagccaccactggtcaactggagtctggggaagggctgatgtcatcggttggctcaaaagcctggggcccaagtcactagccagcctctggggacctgttctccactctcgacccgaactataggagggccattcatccaaggctacagagtgcctggggccctgggctgccctggttcttggccttctctttggcagctcaggtgccagttctgggtttgggaaactgttagaggtaattttttttctcctctgaccttttgggactgagaccaggaaatggacttaatcagtaaatcttaattgagagcatgcactgtgctaggtacgggggattcagcagtggataaaatagacagaaattccacccgcaggaagctgaatgtctagtcggggacagcggggaggatgccatcacctacactgcagtgtggggctgggagtggacacatctacccctccactgacttagccctcagtagactggcctttggacctgccctgactctagggatgaggctcagatgctgaaccctggccaaatgggtctccatgggctccaccccagccaccaaagtcaaccaaggcccttgcactttcccagtcgacctatgtatcactttacagtttgcaaagtgtgtgcccttatcctagctccctgtgagcctggccaggcagcatggtgatgagatgctggtgccctgtacccttatctcatgcattctttccagagatcatatcagcaccttttgtttgacctctgtgcatgccaagttgcttcagttgtgtctgactctttgactgtagcccgccaggttcctctgtccatgggattctccaggcaagaagactggagggggttgccatgccctcctccagggaatcttcccgacccagggatcaacccgtgtctcttatgtctcctgcattggcagacgggtccttcaccactagcacctcctgggaagccccagagacctttaactcctctaaaaaacagacccatccagactgactcatctggccagaacagcgagttctcacaccaaagccatggagaaagggtcaggagaagcatttaaaaatgtgtctcgattttcacaagacgactgtggagggaggcatgactgggtccagctttatgggctcagagtggtgccgtgtggtcactggcaggaagacggtggctctaaagcagacagattggagtcccagcctgaggctcctctggctccgccacctgcctgctcactctgtcttctcttcgcatccagaaccagccccgccggccacacggtttttggagcagaatcgtcacccttccttcacccttctctgtgaagctgcttttatgaaacttccccaggtccttttggcagagggggtttcacggagaacctggttagaagtggagggcgggaggaattgtcttctggaaggggacgaagcccggtggcggtgactgagtggagaggtgacttgcaagtggatggtccagtttggctcaaggcatgacctcttgccttctttgacaacaagcgcaagccagttgacttccctggaacttaactcagtttccccatctgtagaacggggctactaattgaaccccactgacttatggggaccacacaagcacagagcaggctttcagtgaacgcaccagggcatgagatgttaagccgtacatctcttttgtagtgagatccatgcaaagcacagaagtttcaatttttcttcagcaaagcaggatcctggaggagatggtatatgctgccgtagatggctaagagtggctggtgggtgccctggaagcaggtagggtgtgctgtggtcttgcctcactctttctgccatggcttgggggaggctgagcaggcttgagttaggagagcccttgtcctgggtctggatgttcagggactcagagaaaagcacggatgagggatctacacctacagatgggacctcacagtggccaggggtgcaggtaagaggtaagcactgtttccagggtcacagtgccctggactctcactcaggcatcagttcactcactcacctcccagttcaacacacagtctgggtgcgaggtgcggtgcggtgtggtgttgtgtgtgtgttttacaattcacactacaggctcctgtcaccgagctgcttgtgggtgtaaattaaaaacaggggaggaaagacatgcatacagaggactccaatacaaggcaaggggtgaaaaatatccccagagagatacaaataaagtgctaagggaattcaggagagggagatggtgtcaaactcggggggagaagctgaggagggggtgtctgggaaggctttgggtggaggcagcactgtgctttccttaaattccagtgggattggacactgagtgggctggagcggccttccaggaagcacgaatggggagcgtgaaagagcatgagtctggggtcagaaggatccaggttcaaatccatgactaacttacgaacttgagcgagtcacttcagcctttctgcattttagtttatgggggtgagagtgtaaaggctggagcgataaacccttcctggcttactttccagggctgccaggaagtgcaaatggagtactttatgtgaaagcagttggaaaactataaagtgctatgaaaacgcaggggctgtttttatttttaaagcattaattgattcagcaacaaaactcctaggtaagaacacagtaatgactgaacctggatgggctagacagcagttcagctcaaagctgtctctaacccaatcatccagggtctgaggaagtgtggttgatctttgtactttcatccctggaaggttacggttagcccttaaccaccacaaactttctcaaaaatcccaccattgtctgttgttgtagatcatctgaactccatccatccacctatttgtctgttcagccagccagccaatttaccaatctatccattcacccattcacctatccatccatccatccatacaacaaacctataatgaggacatccatggccagataccctgctcagtgttggggatacagaaaaaaattagaccccttctctgggctcaagaactctacagcttagtgggaaagacagccatataaatcatatatcattactctttctaaacccattttcagtcagttctacatttttgggggtaacaaattccagagaccacagattataggattttaaggctgagtgatctttgaactcttttttatcacactcattttactgatggggaaattgtgattattgtttgttgtagaaagcaatatgacttcctcttatttgcctccaaatgacctctccaagctttcaagttcagttcagttcagtgaacctttattaaacatctattgtgtgccaggctctgggcaagagctgcaggtgttggcagtgaagaagatgctgttcctgccctcagggatgcacagtctagggacaaagggacatgcagagagataatagctctagggcttgacaaagacagggatagaggtgggcacaggcactgaacacacaggagaagggtccctgctctgaatacgaggagcttgggagaggcttctcagaaagatgtcctgtgagccatgtcttgaagggcaaaaagcaatgtgttagatgaaagatgtcctggaaaggcatgctgggcagaaggcacagcgtgggcaaaggcatggaggcttattggaggagctcccctggagtaggaaatggcattccacttccgattttcttgcctacaaaatcccgtggacagaggagcctagcagactagagtgcattaggggtgcagagagttgtacacgactgagtgactgactatagactggaggaaccatatatgggtgttgggacttaaggggggaaagtggtgcaagatgaatgtggagagga

SEQ ID NO: 45815 - DNA, 1154 bp, Bovine  19866881235903
  misc_feature (1)..(1): n is a, c, g, or t
ntggaaaacctgcaggtaatccttgttctgccagtttaggagtaagtgcttaattatccataagatgggaaaagtaaatccttaccttaagggttgttttgaggcccctaggaggcaattaccatggtgctgatggtgctaagagtgaacatttactgggcacttatgtgcaaatgcatttaatctcacaacaaccctctcaggcaggtactcatattatccccattttacagatgaagacacggaggcacagacgaagaccataaagttataaatggcaaactgagtcaatgcgaatttaagtgttatagaaactgtaaagtaccggaaagatgttagttatcatcatctggcccaaattcccactgagaatatgaggaaatggcagttccagagatagataggatgtgaggatcagaatcccacagctagctaatggcagagtcaaaacaagagccaggtccaaaaagaacataaggttttcacgtggtctgaagaaagacctgacgagatgtcatctctacgcaaacaaaattatttcctgttttccaggatcaaggaactggaaaggacattagatttgtttttaatcatcccggccctcacttagcatatgacagcacagggagtctaggtcctgcacttaacttcagcccaaatataaggtactaaacccacagcacagcctgggtagctgagcgaagcagtcacagcgtctttatgggtttgaacaggaggcccccgcgtattcgggaaggcgatgttaaatgcgagccttggtgctgactctgaattaattgtcagcaaacagcctggcacaaagctaagtagatcaatatctgcaagagaaaaagaaataggcttttaactgcactgtgctttcccgagtcgacagtaaatgctattgtgaccaggttctccctccaattcccctggctgattgctttgggcatcactagaggtgggaagcggccagaggtcgtgtgcacctcctgggattccctgagcttcccagggttcccaagcactgtttcatgatgggggggttttgggtacctactgagcgctcctgatgggcaggggcatcagggcccaaagatactctggggggtgagactggggtgggtcagggaactggggaaggtctgggtaag

SEQ ID NO: 45816 - DNA, 565 bp, Bovine  19866881366577
  misc_feature (1)..(1): n is a, c, g, or t
nggacttgggctaaattgcagtcggcagacttgatttgtagtttgtcctttgtgagtaaaggtcatcatttgtcttttccagaaatgaggaaagcatcattttctcattccaggtgtttgaaaaacttcaacttttctatccagagtgccagcctgaacaaattctgatgtccatgaattctcagctcaaactccataccaacaggtaaggagaatagagaagaagataggctaggatctaactttaccctcagtgaaacactgcacataaaagaactattgccttctaggtgatttttctaactcacaaataaattttttagttgaagtgaaattcacataacataaaattaaattgtctgattcagtggtgtttagtacatacacagtattgtgtaaccattacctctagtttcaaaacattttcatttatcaccagagacccatacccattaaacactcactcaccattctcctctcctctcagtccctagcaatcactaatcagctgtctctgtggatttaaatattggatgtttcatgtaaatgaaaccataccatgtga

SEQ ID NO: 45817 - DNA, 1193 bp, Bovine  19866881623038
  misc_feature (1)..(1): n is a, c, g, or t
nacaggaactcttatcacttaggcagttgttagcaagtacccttaggtagtatgttcacaggaagtcctgcattgggggctactgccaggcagcagatagtcgcaagctcctggggaggtaagtagcgcctgtgttaggagagctgcatatatgtgtccttggagcctggatacacaggggagacagcaaggtcaagcactggtgaattagcagtggaggtttaggggggctttgaccatgtgtgggcttcaccggtggctcagatggtaaagaatctgcctgcaatgcaggggagctggatttgatccctgggtcaggaagatcccctggagaagggaatgtcaacccactctagcattcttgcctggagaattccatggacaggagcctggcgggctacaaagagtcagacacgactgagcgactaacactttcacacttgaccgtgtttgctcatctctgattttcttgcaatcaacaagaaaattaactgcaactaaagtgttattaattaatactttagattacttttaaaagaacttcatccaactcgccaggcccctacaatagaacagcacaaagactgctgtcaccacctcacgaccctgtgggagctgaaacaatcactgagggcaaggagatgaaacatttatgaataagactatttgcagttaccgagctgctgagattaagtgaccagagcagttgttcttttaaggcatacaccgactctgtttaggaaaccgatttcgccttcctgcttcccccgtgcgtcctgggttcgttcaattcaaagccgcggaggcaacagcgatgcagcttccctgcacggtagctgtgatgggtgcttttctggatcattcttgtggaagggtgagaggccttgggattgcttagcttgaaggcaagaaagcagagatgagacataactcattttacttaaatgaaaaagagaagacactggaattgctacaggaagagtttactgttgtttttaaccttttaaacttgtaaagtacagcacatacatacagaaaggtgcacaaagcatcagcgtgtgccttcatgaattattggaaagccacgtatgcagccaccacccaagtcaagaactagaatatcagcggcactgagaacattcctttccagtcaaaacctctccttcctaccctagagataaccagcatcctgt

SEQ ID NO: 45818 - DNA, 1227 bp, Bovine  19866881775396
  misc_feature (1)..(1): n is a, c, g, or t
nctgttccccttcccaaagctctatccagcttcttaccctcacagtctttgacttcagaattcaaaaatacagttgctgctgtttagtccctaagtcatgtctaactctttgtgacccccatggaccatagcccaccaggcttctctgtccatggcatttcccaagcaagaatactggagtggattaccatttccttctccaggcagtcttcgtgacccaggggttgaacccacatctcctgcattggcaggtggccaggaagcattggcaggtggactctttaccactgagccaccaggaaagctatcagtaaacaccatatgtggggtcaaatgttggcctcacttctgtgggattccctcttctccagtctcttcactcttaaatcctttgctatctcaatggatatgctttcgaatagatatttttaaaaaatattttatccagctcttctaactattcttcacgggaggtttggtctgatacaatttgttttgaaatgtccttggatgattttaatttattctacctagctcagagaatttttaaagggaagtccttaataacacccagaggatttctcaaatgtaaagttctgccaacaaaaactttgagaacccaccagaacattaacagaacacactgatctggctcttgagaagtcctgacatattcagtaccattcctggcagggatactgagatggaccattccaaaggcttttctttgcctttgctttttatctctaccaaactatcacggcaaaaacatttatgcccacaaacatcattttcttcttcccagtaacctgtaccctctatctgtaattactctcaatgttagaaattcaaattcatgtatatacaacctgaactttgagcttacagaaaaggctcacagaagtaaaaatacatctttaagaggtcacagaaaggaaattcttcagtttgaaagaaactgtttttcagctagcttagtcccctgtccagggattaaatgtgggcccctggcagtgggagctcggagtcctaaccactggactgccagggaattctcagaaattgctattcttgcatttccctaaaggaagagagctttcttccatccctgtgcctctaaaatgctattccttcttttgagaaccttctccctcttcatttttcattatatgctccacttggagatttccttggcctcacttttaatctgggccagctctgcataga

SEQ ID NO: 45819 - DNA, 848 bp, Bovine  19866881821860
  misc_feature (1)..(1): n is a, c, g, or t
ngtctcctgcagaagagctgctatgaaaataaatgcggtaacctatgtgaggtcacctcccacaccacacagggctagcccagtctcctgctgcttgtgtggagtcgctgattttcaagcttgatgttttacccagagggagctgacttacacacccattgcttctatccatctaacgatggtgctttctatcctcccccatgcctagatccaaccgactctatcagcataaaataaagagggctggaaatcccgacagagtgtcccaggggcggcaaatcaaggatgcagctcacacgactcttattacacccgggagtctaaagcacattatgcgctgtgattaaaaagaggcttgactgcctccgccgcgcaatcttgtcaatcctcccaatcatcaagaaatcgtaaggactgacaaatatctcctcccaatctcatttcacagaggtctgtaattcttaagggcatgcagagggaggcatggatcattcgggaaacccaggggccatgggaggcagcatcttcgagttcctgcggaggaggatgcccccggaacctcttcctgctgcatctcattcccccttgtccccacgcccgttcctgccccgactcccctgccccgttcccgccgcagctgagtgcccttctgcctcccttttgccaccttccacttggtaaggcgcagcgatcgattcaaacccttatccagcctccatgtcctctgctgtgaaaatactctctcttcctccttttacttccaaatgaggtaagtcagtgaaataatagccacttcacagtgcattcaattttcaacaatctactctcttgtctcaccaaaagcgcta

SEQ ID NO: 45820 - DNA, 727 bp, Bovine  19866881824871
  misc_feature (1)..(1): n is a, c, g, or t
natgatgacagttacaaggcagagagaaagctgacaatatttagtacccagaatgggcctcggaaggctttctggttctgcaggcatctgaaagacttttgggaccccaagactgattagtaggaatcccatttcaatatacaatttctaaagctggactcattaggaaagaccctgatgcagggaaagattgaaggcaagaggagaaggggacaacagaggatgaggtgtttagatggcatcactgactcaatggatgtgagtttgagcaatctctgagtgatggtgcaggacccagaaacctggcatgctgcagttcatggggctgcaaagcattggacacaactgagcgactgaaccacagcagagctggacccactctgtggacccttcaggagttagggacaaatggacaaaagattccaggatatgtgctgggctgagcttttcccctaagatttcatgcaagaggcttctttgaactgcaaaaggaaagggatgatgaagtaaaaggtggcacaaattgagtcatttggggaggaggtaaagaagagggctcagcaagacatctgcttaatgtcagttttagaagatgagcttctccctgaaacaccttggtttcaaaccaattgatgttattttagttgttacatggaatctgttgcagaaacagaatccaactgtaaatcctccaggcttccctcctccatttgtcactttcatttat

SEQ ID NO: 45821 - DNA, 1787 bp, Bovine  19866880453161
  misc_feature (1)..(1): n is a, c, g, or t
ncctgacctctccgtgcttcccatctcagctgtgtgatcttagccagttgcctgacctctctgtgcctccacttctgagctgtttgatcttaggcaagtttgggacctctctgtgcttccatccctgcacgtgtaaatgggcttacaacaagacctagcttagagggttcttatgaggatttcagtcaattgtgagttttcaggatagcacctggcacatagtcagtgctcgagccttttagtcctgtttctcaatctagcccgcttcctcttcccctctaatttcctagtaattaccctctgggtaacgtggaaggtgaatggctgctgagtcttaacctgacactgtttccacgtgtgtagaaaagaaggttcccagcagcctagggaagactgcctttcttcaaacactatgcatgcttgagtgtggccgaagccagagcagggttagtgtgcatgagtgctgctctgcttcacaagatcccagatgactcacatttcctaatggaaatgtactcatggcccttagtgcttgtgtttgtgctgttgtaactcttgcctgctctgtattcatctcttcaaagtgttaataagttatacatgtggctgatgctgtcttttttccttctccatgatgtagtttccacttggtggttctgaggtttcctggatcatgagctgggggtttctttgaggaaggagcagcactggaggctcagtaaggagagactgtggcctatgagctagttggaggggcaggagaaagcattctgctctagtctgacttttctccccaagctcccttccaactgcagtggcctgctaactcttcagtgagatgatggttaacagaatggttaacagatggttaacatttgtagcccaacatcctacaagggagaagaacaaacaagagtgagctctgcctcacttccaaaacccacagttaacctgtaaggaagatccagccacacttgatggtgccctggttgtctgttgcgatggtgctgccctctgctgtcacctcagggtagaggagccatttaaaacacagccggttagtgagtgaatttagaatttacttctctgaaagattttggacagctgggcagaagtaagactttctatctacaagctgctgcccagggcctgtcctcagtccctccctagcttcttatgctgttccagtgctacctaaagcagagacttgcttgaggaaaggtgtctggaaatgtcccaggatcagggaacctcaacccaccttagagtcctttcctcagagctgtgggaaagcattttcttctttgattaggccccagttttggctgaccagggaaccttttcccttgacctcaaccatgctccgactcaagttcagtcacatatgtctctttgttcccggcgttggatcagctcctcattgctcagtagatagtcatcaatgaacgtgaagatttcctcgggggtgacaggttccatgtagcgttcccggtcaattccctgcttgtcaatcaacaccatgttgaagtaggagcgagtgaggtgctgaaattgcctagagagatgagcccagggatgtgtgagaccttgtctggacatcattccgccagactctagtcctctctgatctttcacagctccactgatggactaattctttcttcaccgaatcccttgccccatcccctccagtaactatctcaagcccctttacttttctctgcttacaccttagtcttgctgccccaacatctctagctgtgttaagctgtcccttcctcacccca

SEQ ID NO: 45822 - DNA, 2547 bp, Bovine  19866880528333
  misc_feature (1)..(1): n is a, c, g, or t
ntgctctgctatgtaggctctttgctttgctggccttctgaccttttacagctctaagcacatgctattgtctgagtagactcagaagctctagcaagttctcaaagggcaaatattattattcctgttggaagcaaactaagcaaaaactaagttccagaaaaccctgtttctgagaaattctcaaatatcattaagaagaataaatggttaacttaaaaggaaaaacaactatgcaacattaaagtacaatattgcaataagggtagaaaacatgtgtgaggtttcacccttggagttcagccttttaaaagcaaaaaggttatgcatatcaatttgcagtatactaaaattgtgttcaaagtttatttcaagtcacagaaaatatacaaactaagacaacagaatgatctgattttgttctgagagaaggtgataggagtcctccacctggcaccaatttgagtcattcaagggttaggatgcagaagtcatctttttgcaacatttcaacaaagttataggattaatttccatatctgttgccaggtatttttgaaaacctgtaaggaaaagttgggagaaagccattacaagtggagacaaagttctcttccccaaacatcaggaagaaaagaatttaaaggtaggggaaggaggctatgcataagaacaaatcaccaggaacagattcctaaggtgtctgcctcctgcttccccaaaataatcatctcttacagtggagtttctcaacctcagcactactgacatctggggccagataactctttgttatcaggtggtgtcctgagcattacaggaggtttagcagtatctctggtccctacccactgaaagccagtagcataccatacccgctaaagctgtgataaccaaaaatgtctccagacatttcccagtatcatgtagggggcaaaaccacctctggctgagaaccactgacctaatggtaatggtacataagcctgtcagtgatagcagagctggatcacaaccagtaaggtagaggatggagggagagccaatctcttggctacagtatgcaccaataccagcaaatacacattaaaaccttcccagtggaaaattgcaaagaactacatgcaccacatgtacatattagtggaggtttaaaagagataaaaggtgaataaggtctgtagtctagttaagagtaatgtaccaatgtacatttcttccttttgcactataaaccaaaaaggtattgtgtacaatagattcccaaaattttatcattgtgggaagctaaaggaaaggtgcatgaggctctctgtactattttcccaacttcctgtgaatttctaattatttcaaaataaaagataaaacaaacaaaaaaccctgctctgtggtatatgtgcaaggctttgaaatgaggtaccttataagcaagaatacacaagcagagaaatttcagaaacgttttttacctctactatcccaaaacataattttctcacattctaggggatacgtttttttaaaaaaatagctttttaaaaatctattcctctaactataataggcagtctacactttcactaaagaaaatagaatgacttgggtatctggactaaaagttctagttgcactgttaagtctggtgccatccatctatgacagcttcccattaaagttcagtcaatttaatgtctagatacagatataatgcatatttacagtttaaaagttttaacaatattacaaatatggattaaaatacaatatatttagtaaagactgctagttagtataaatgagaccactgttaaataatatatggacagaaattattacaaagagggaataaaaagcagaaattcaaaatgtgaatttccaattgatattgggacaatgcaaaaaagtaattagcctctaattaaaataaataaattttttatgtttatgaaatacaagatgttggggaaaaacttttttaaaaaccctatacatgtaatcagggttaggtcacatgattatgttcctttctagctgactgaagagcaagaaaactaagggcagtagtgtacagcaacctctaaaatgtacagggcctgatggagatggtggacattcactaccttaaattatgtgctgtaacagtttaatctcaaaatattctatgtaaaataaatacttgaaactaaaatgtttgcatattttattgaaatggtttgtgttttcattttgatgggatagttgggaataaaataataactgattctggaagaatacataccaaactatatttagcagttatgtctttggaatgagactgagaaaccagagcttttaccctgaactttctacatttctgtatttgattaatttggttaaactgatcatatgtcactgttgcccattttagggaaaaaaggttaaatgagattacaatcaattcaacaactgaacaaatgcctatcaccttcccctaccatgacagggactgagttactgaagagtgaagggtctagtcaagaggggtacaggcctcgggtagtcttg

SEQ ID NO: 45823 - DNA, 794 bp, Bovine  19866880547589
  misc_feature (1)..(1): n is a, c, g, or t
nctcaggcacagtaagtctgctcacctttaaggagctccagtagatttctgtatttgttcttttaagatcaggatactctgcctctgctcaggaggcagcatggcgatctggtctgcagttagttgaagtacctgcataatcaaagcagcctgtgcagaggaaaaaaaaaacataatgagttctaacgatggtggctaaaaaactaccaccagcttctgtccaaggcagaaggataattcacatacattaaaccaaaaaaatttttaaaaatgaaaccaaaccaaagaaaaaaccaaaaccagctggtgagaagaggcaaaataaaaagcacaggtacaatggctaagattagaagattcaaagcagacaccttcatgaaccccaaattcttacagatgaagatggtattggtaacccctgggaaatctacagtttttaatcctttgaaagaattaaatcctttgaaaggagctttgaaagttgctccttttcacaagttttgagctccctacaatggtcaaatatagaaacagaaagatatgcttgtggggaatctgctatcatctttagggataaggtataaaagggaggaacaaagggatttggatttccaggtcaatcaggcctgcacagaaaatatctattggcagatgagtctgaaaagtaagacaagctaccactgacatatagccatttaagaattttaggatctggcccacagattttcgggtaacaagatcataaagaattctgagtataagcatcatttccaaagggactctaagacccggga

SEQ ID NO: 45824 - DNA, 1660 bp, Bovine  19866880637925
  misc_feature (1)..(1): n is a, c, g, or t
nagatatactgtactgggcctgagagggtatatttgtcattatctcatttcaattatcaatcatacttattacccactggctggctctttcagacttgccctcattattttcagtcttacatcaatttgtaggactgcactgaagaatgcttgtaaagtgctttgtaattctaaagtgtgttattaatgataatctcccattgcaaccttctcagcaacaacaaacaaatcctattccagcagttcattgccctctccccaatctaccattttacctgaattgttcccattatacctctttgcatcagtacaccctaacttctggagataatgcttgcaatcaactaagccttcagagagccttgcagtcttagaagcactttgattctgaattttgctttggaaatagaaagcaagcccaagagactgctcccatttcatcagggagaggctgaggcatatgaagattgtgacccaataatttaaaagagatcatgttatcagactgatgttctgtgtgtccttcctgttttacgcccacctctagccatgagaaaactgcagctattgaggttgtgggtttgggatacctattccccaggtctcaagactttctcctgagagtagttaagagtaagctggctgcctgagcacagctaattcatattcacagaccagagaacacaatttcacttttgaactgctctttacttttctgaagtgggactcaattgtgctcaaaaaagtcaagcacaacctaatcaccctcaaccatctgtctaaaccctgctcagagcaatgggtcagggtgttgtaaaaacatgtgattctgcctgagggaggccttggaggaagccctttggaaaataaagacctctcatcatagctttattcaaatatttattgagtacttactgatttgaatacttcagagtggtaatagcataggggtcatcagcacaggttctgaaggtcaactgcctgtgctcaaatcctgactctaatgcctgcttagtgactttagtttctctcttggtaaaatgaaaataataaaattactcatgccataagtgtagacatgaggacatatccatatgagatccctatctgaagtggctagtacattacctggtctgtaagaaattttcaataaatactatctaatattgttattcacacagaatcagagcaaacctgtcagggagccatgggtgggagtaaaatttgacagaccttaagccagtttcacgggcccattgctggaactgctctggggaagagtcaatgtgctgagaagagtggtaggaaaaatgccatgattggaggaagtaaagtagaaaccatacttgggtgccagggagccacttgcactacagaagtttcagaagaagatcagcaccaaagaggaaattattgcacatcaatacattctgttctagggtaaatgattcctgctaacacagctgagcccctcccactctcattttccatcacatgacagaggacaatgaaaatttagggaagtgattgttaggtgcaaagtctggaacctaatattattttaacttcctcccagcagcacttttcctggaattagtcctgtgagttggggtaccccaatgaccccaagaaaagacaaatatgcagaagagaagatcca

SEQ ID NO: 45825 - DNA, 3337 bp, Bovine  19866880944006
  misc_feature (1)..(1): n is a, c, g, or t
ncaaaatactctcaagacatggacctatatttccaaagagaagcaaaagcagttctcagagcgatccatccagtcacatgtttttagacaaaaacctaaaggaaaagtgcaatttacgtgagtggtggaattaggatgatttttcttttttttgtctcttgtgttttttcgatttttgaacactgttttaggaggtggggaaggggcacaagaataataaataaccacttattgaaagaattccaaaggtagataggaaagtaatgaattttagaatttctctacaagaatttgccaaaaattcttgcctttatccctctccctccttatcatctaaattactggagattaaggaaaagtgctttaaagtaattactcctgaaatgtaagttcagctattagctacaaactttcaaaagggaaggcgctacagagaatacccggtaaatgtgactctcttttaaatgttaagactgaaaggcactgtatattccagccctctgtattttcagatcaagaacagctgatcataaagaggctgaaatcttgggtcacacaactaacagcaaaggcaaaactagagataactgtgctttttcaatcctctcctctattatataagctgtatatggtatttggtgcctactcatcccaaagaaattctaccagttgcttagatcttcctagaacttgagactatgtgttcctaaggacttaaactgcttccaggatgggaatgaatcaccagaaagtttcctgtcccttatgtccacaggcagacctgagtcaaactctagggtaaagtggaattttaaaacacacacacacacacacacacatgcacaacagccctcttcacaatctcctaaatactagagacctcaggatagatagggatttttttttttcatctgttaaggtccggtttaacaaaagtataagctctttaagggaagaaactgtcaaatgtgtgtgtcagggggaggtgtttctagggggatgggattaaaagacagtattccgtttcctaaccaaccaattacatcatcagtgacacaagcttaacatcacaaatgggtattcattgtattgccacggcaataagccctgcattggtgaagaagaggtgactgcctaaacttttgtgctctaaatcttgctttaaacacataccacagaaccagaaaacaggaaagttccattaacttggtcacacagagcttccttgtgcttcaaatattgacctaggaccagctcctatagcatcatgccagatgtctgaggtccaagagagcaactgctggagaattattgcactgccatgccttatactaaagcatgaaaagcctagcacatacatacatggagagaacaggtaaatgatacatgtatacacttcgtaaacactaaggtcatcaggaaataaggcagacatcaaattttaaaacaccatatatgccacagccacaggaaatgaagttgagggggctctcagtatacccaaagtggtctccctaaactaaagagcacacatctggaggggttctcatattaaaacaaaaaagtatcaagggaaatcttgctaaattcttgtcatcttaaatgaagtttcctctaaagcttaggtttgtaccatgtcctgaaagggattttcattgtaagcctgagagcaaataaatatttctgtggctgaagaaaaaacaaaatagccaagcaaaagctgcatcttatttccaagaatgtgttgattttcctcccctcccttcctctgctactcacaacactgctttgtttgaataacagtcagtgccaaattaaaccaaaacctgacatggaatttaatattcctatggccacaacaccttgaacagtgcctcccaccctgctaaccccactcccaccattgccatgccaccaagcctagaagttcagtttagttcaaatttaggtctgggtctgggtcgaaacccagacaaagaggcatctaatcccatctaggcaatgtaagaagtaagtctctaggctataaaataaatttattccttaaattattaataaatgctgtactgagcattgactatgtaccaaccaccattgctaagcaaccaacaagtgttacctcatccttacatcacaaaagtccttattgtgaggccgcgactaccattgctcatgttttacagatgaggagacaggttcaaagaagctaagtaacttgcctaggactaaaccctggcaacttccatttctctcatcagaaacagagcccactctgtgatgagatatggctgcaattgtacatttaaccataaacaagggctctttggaacccctgaagcacaagaacctcaatggtttccccaattctgccttgtacttgtgggttttgttgaattttacttttgccttcactcaattagcccaaccacctaggaggtaaccctgcccatcccagagtggtaaagggagttcaatagcttttttggttcaacctcttaatttctccctcttttctgatcacaaaaaaacatttgatgttgaaaatgtagggggaaaaaggaagatactttccttaaatattgttactgcttgttttacagtcaacatttagtgtagatttggtcccttctctattaacttcctgtaacctttaagattaaagtgtttttctttgacatttaaatgatgcctcttccagcacatcagcttatttcctatagcttttccaaagtgaatttcctgttccataataagccagtacgattatctccccaataaataagatctgttccctacttcccaatctctaaactcaaaatacctgccccacaacttaaggttcagctcaaacccaacccaatgagaacaaccttccccccaactctccagcctggccaacacatatacttctttctttaacatcagtccttatactctgatcattcacattaactcatacccttaatcaattactatagtacctgctttcagtatctgcttcttctctacttacctgtcttacgtctggttgtctacatgttcagaaactacttgaagagccagtttggctgggctcctgcacccgcttttatactctccaggaccctaggacacaatgctcaattgatgaggtcatttggtgcttggccaatccctgttcagctcattggtcatagctggcctctgaggctaaccacttagtagtcactcaaggcttgattaattaaatgaaattaaaaactaaatgtctaagccatcccagtatcacactgacataaaacggaaaaattaagttgagctgttagataacgtcttgggacattacttcgctcagtca

SEQ ID NO: 45826 - DNA, 1316 bp, Bovine  19866881003164
  misc_feature (1)..(1): n is a, c, g, or t
ntctgactctttatgaccccatggactgtagcccgccggctcctctgtctatggtattctccaggcaggaatactggagtgagttgctatttcttccgctaggaaatcttcctgacccagggatcaaacccgagtctcttctgtcttctgcattggcaggtgtgttctttactactagtgccacctggccaatgcgagggccacggattcaatccctggttggggaactaagaccccatggtggtgcagccaagaacatagtaattaattaaaaaagaaaatatgttgacaacaatttaaaaaaagatggaggaaggggctacaaactgagaaatgaagctctaggatgaaaacaaggaaatagattgtcccataaggcctccagaaggagccaggccctgctgacactttgattttggcccatgaagctggttttggatttctgactgtcataactgtcggaaaatattttttaaaaaaaaactagtttatggtaatttattaaagcagcataggaaattaatacaaagggaagagatgattacttgatcctttaatgtcacattgaaagcattttccaacacacctatttaggtgtcatctgactctttaggtctagagaagtataatttagcacaactaatgaggatttagtcattttacaattctgtaaaactgatgcaatgatattttctgtccacctaaagaagacatcacgattttggttcttattgccctcttgggcattaatcaactttgattctaacttagcaatgttattttagcaatcctttgtttttttaactgactgtatataaataccagttctcacatcctcttttgagttaactttaccatcctgctggtttcctccttcatgagttaaaattaaactttgcacatgctcacactctttgtataaaacttttcctgaacactttgagactcatacttcaacaatgatcccattttttgtaaaaaaacaaaaacaaaaaacaaacaaacaaaaaaactaaaacaacaatatggtggtgggaggagctggaggaaaatgttccacactctttacggcagttctctggatggggaagcggggaagatgattggggatttcttttgtgttgtttgcaatatttgacttttgtataattttatgtggtgtttgtagtctgaaaaatatattactttaaaaagtaaatatatgctaaaaatgattcacgcagtgtctgtccccaacaagtttagtatctggttggagagggagagatgtaatgcatacaactcactagaaatataaggccaagtatgatagatgc

SEQ ID NO: 45827 - DNA, 767 bp, Bovine  19866881005098
  misc_feature (1)..(1): n is a, c, g, or t
ntctatccttaggcttgctttgtgaaccattctttttgtacgctgtgcacatttgtttctggaacacttacgaacactccctctccccctacctgcgggaaggttttcttcctaaagcgggagtaaatgggttaaggaagttttgaaccctagggtaaaaaaaaaacaaaacatcaagtttaagaattttgtcaagaagcctagctgccccctggttttgtcctggctacagctgtccagcgtgtgggtttatcaagacctgttcttgtgtgcagctccccttcctaaccctctgtacagtccccccttgtctgccatatcccagccacagttctgtggccacagagtgctacgtcaattctcacacctattgtttcttaaacatctagtggtgtgtggtttgaagatgttactgtatacagtgtataactctctattctctgatttcccacatagatcactggtgttatccttcttgccgttggcatttggggcaaggtgagcctagagaattatttttcccttttaaatgagaaggccaccaatgtcccctttgtgctcattggcactggcactgtcattattcttttgggcacctttggctgttttgctacctgccgagcttctgcatggatgctgaaactggtgagtccttgttttcttaaaattggttgttggtttttgaaaaggctaatatgttgtaggctttgtttctggaactaggcatggcccctttcgatttttcctcttccttataaaactagcaa

SEQ ID NO: 45828 - DNA, 1560 bp, Bovine  19866881455343
  misc_feature (1)..(1): n is a, c, g, or t
nttgctcagtctgtctgactgtttgtgaccccatggactgcagcacgccaggcttcactgtccatcaccatctcccagagcttgctcagactcatgtccattgagtcagtgatgccatccaaccatctcatcctctgccatccccttcccctcctgccttcaatctttcctagcatcagggtcttttccaatgagtaggctctttgcatcaggtggccaaagtattggagtttcagcttcagcatcagtccttccaataaatattcaggattgatttcctttaggattgactggtttgatctcctcgcagtccaagggactctcaagagtcttctccaacaccacagttcaaaagcatcaattcttcagcgctcagccttctttatagtccaactctcacatgcatacatgactactggaaaatgttaaataaaaaaggcaatgcagtgtgtatggtctgctaccacttgtacctaatgaaatactttcacttaaatatatattctccaaaaggattcacaaaataataatattgattttcttgaggagctgaggacagggctggaagggagatttactttttattgtatactcttttgtaattttgagttgtatgacatgtccgtatattacctactttaaaaataattttaaaaggacatacctcgcatatcttaatagcacatttcatttctaaagtcagtggaacttgtaggctatgaccagacacctttcatattatttgaccagtagacaagaggtccttaatgacagaaagctataaggcttgactagtcccttactagctaaggtagttagttacctgtcttatcttgagcatcagcttctatccttttcccattacctgagataaaggtatatttggcctatttggttgtatacttagaacttgggagttgctttgattaggcatgtaacactgcaagggagagaatatcagttttaccatctgtttgaatgtattggtttgtttctttcatgaacgcacacaaaaatactctctcatagtctccccatttaaaaattataacaataatattaacacatgcttattgtagaaaatttggaaaatacagaaaaatatttagaagaaaataaaaatttctttaccacctagaagtaataattttttttctttaatctatatcatggatgctttcctaactgtcaaatagtcttctgaaacttttttgttgttgcactgcactgcatgcagaatcttagttctccaaccaggggttgaacctatgccggctgcagcggaagcgtggagtccttaccacaggaccaacagggaattccccacagcatttgtttttattttttatttaatttatttattttattttattttatttttaattttattttatttttaaactttacataattgtattagttttgccaaatatcaaaatgaatccgccacaggtatacatatgttccccatcatgaaccctcctccctcctccctccccataccatcctctgggtcgtcccagtgcactagccccaagcattccagtatcgtgcatcgaa

SEQ ID NO: 45829 - DNA, 1218 bp, Bovine  19866881470501
  misc_feature (1)..(1): n is a, c, g, or t
ntgcagtgatgcctgttttctttctcttttagcagacttttaacagagagctaaagagaaaaatgaaggaacgtccaaagaaatatctcatatccctcctttggtaaatgggttcatctacagaaccattagaatttttcagttttcaaatttctgtctgttaatacctccacagtccccctataattccacctactctaacattatatcccttagaactcctgttgtgcccatacatcaatcttcgagccatcaaataaatcttatccccaccaaggggctcaaaaatagttagggggaatgaatagtttgaaatagtttaagaatgaagatgaccctggcaaagaagatcagaagatctttgtaccctaatgctcctgatgaagtctgtgagcaacatatcaagggtaaccaactgcaattgagtcttagaagtatagggtcagtttagaactacattttctccccttgtgttcttgggtggaaggggactggcataagtaaagtattctgctgagaattatgctctacggaatcatttttagtcacgcctccgaaaacaactcggttttaaattcccagccattgtctgtgaagcctggcaacaattcttctgctgtcccttcaggaatagcaactgatgtctctcctaacatttaggttaggcgtgcaaaaactgtacgagcttaaaaacattcaactgtccattccagagagggcagtgttagtggtgggaatcatcattcactatgactacagctgctactttcaccatcagtaccacagcccccatttcctgagtgccttctggttgtcagacatagcactaagctcttcacgttcattattttattcacaacaacccatgggtgtaggcagcgtatttgtttttgttttacagatgaagaaattaaggggcagagaaaaataacttacctaaggtcccagaggctgtaagatgcagaacaaggaaccaaacccagatctgactctgaagctactttaggccagaaagatcttcttaagcttttctcaaactttacccagaagagaaagctatatccagggaaaatgttgaagcttcatcatgcccatgttagaagaattaggttgactgcagtaagcacactgatggtagtggcagacccaggtgagctatgacttccattctgccagacactaggctaagggtttacgtacattactgcctttcatctt

SEQ ID NO: 45830 - DNA, 1484 bp, Bovine  19866880388439
  misc_feature (1)..(1): n is a, c, g, or t
ncgactaaccaccagcaaagagagttaggacaaaatcttaactagagacaggaagaggaaagggcggggggtggaaaagagaaaggacagaaaagaagaaacatgagtaaagaaagaaggtggctttttgaggggagtacagtttagctacaaatctgtagatcatcgaattgtgaagtatttaaattttctgggaaacagaaaccagcatgatgtttcaaaaaactaaatacaagatgaatgaagagagcctgtgaattgtatagtcttatttttctttgactcctcaaatattgttgtttggttcttagttgttttgaaaggaatctctttcttgacctaaattctttaaacaagtgtgtttgtttagtgacttaacatacagaaatattgtccttcaggctaggccacccagtgtagaaagccaagggcatcagtgcattatgttaaggactcaaaagagtgttggtacacaagagaaggagatgtacactttgttaatttcctctgtttcccagagaaagaccattaaactgtgtttgcaaaggacatggtaaaaaagaagttttgagtgattaaccaagtagctttgtagctgcggtcatctctgctgcctcttagaaccagcatataaatatagagaagtagggagaaaatatctgagttaacagggtgtgggtaatgatttaccctgggaaagttaattattatgatttagtagttttctaccattatagcactgacagacagcaaatatacattccagtgcctaatgaaactgtaaagaggctgaggtctgtgtacggtggcgggtagagctagatggcagggggaaccaaatcagccagggacacacagagccatttcaaaaatttaaaatgtgagtcaaaacactatataaaatattaataatatctaaatgttaaacatacataatcattctagcctgagataaattaaaaataatgaaactgatactataacaaatgaatgaaatttagttaatcatgaaaattgaaataattttattggatcttttaaaaaatagtgtgattttaaagagcaaagttcactgatggtgtcatcattgccatacaagtgtagttttggggttgaaatttccatcaggtttaaaaactcagactctatactagttgcagaatggtgaacagagttttgctctaattgctgttagcattttcttcttagctgttattttaaaataatttctcttgtttatttttttcttaaggaacagcgatgtttttatgctttagcatgttatatcctcactgcatcctatgaactagatactattattagcctcattttacagataggcaaactgaggcacagaaataacaagtaattcgctcacagacacattgttgttgttgttcagtcactcagttgtgtccagctctttgcgaccccatggactgcagcacaccaggattccctatccttcactatctccacaggtt

SEQ ID NO: 45831 - DNA, 1772 bp, Bovine  19866880391766
  misc_feature (1)..(1): n is a, c, g, or t
ntcagggagttaactttcaaactgagctttatttccaaagagaccctgtatgtataaaaaggtgcacagtagcagattcaaagaaaacatactctaatggagtcgtcttgtcaggagattgtcaagaagcttagatagcagaaagttacgaaagtaccaaaggaaggaaaagtagggtattctggggaaggaaatctgttatagcaagaaatcacggaaaggcttagaatttggagtagtgtaccttgcttagagctgaagtcagagctattcaatccaaggttcttccttaagagaagttatcttcaaactgaaaagacgggatggggacttccctggtggtccaggggttaaaatttcacactgccaatgtagggggcaagggtttgctccctggttggggagctaagatcctgcatgctgttcggcatggcccaaagattcaattatttgtttatttttgactgtgctgggtcttcattgctgcgctggcttttccttagtttcagcaagcaggggctcctctccagtctcagtgcactggcttctcattgcggtggcttctcttgttgtggagcacgggctctggagagggccctctgctcacggggttcagtagtcgcagaacatgggttcagtagttgcagttcctgggctctagagcacaggctcagtagttgtggtccacgggctttgttgctcagtggcatatgggatctttccagatcaaggactgaacctgtgtctcctgcattggctggcagattctttaccactgagccaccagggaagcccccaaatgattaaaaacaaaaaaaacaggataggatggacatggaccaaagaccatgtgcatgaactaagccctgcacagttgaaaagagttagacctccctttgcaactggtaatgagggccagtaacaacctgtaaccagaggtaaaaatgaatacgtttgcacaaatcaaagaattttggaaagtaggaaaaaccggttaatgcctcatttttcagaatgaacttaaaggtaaattgcaaaaaagactaccttgatgtggatcctaggaattctagaacagatcactacacagatggcatcttctaactccctggctcaaaatagtttcgtcttactgttgtcagagtgcctgcttcttgctcttctctactctgtgattactgtggtgcttatgtcccagggtctaggccttctctccctgattctcaacacaaggtgctgaggtgtgtaccagttctaccaggtgtgtacacacactgtacagatgagaaactggtggcagatgaagtaacttctccaaggtgtatctccaccaggtagcagagctgcacccggttctgcccccatctattggtgtgagcctctcatttctgtgctgcactgctatcgcaagtctgctgtggaaggcaaagccagacaaacaccaagttatttaaattatctcaaaaataaaaagaggctctaagtaaatatcttgagaaagatcttctatgataaggtttttttaaagattattattattttatttatttttttggctgtgctgattgatgcttcatcgctatgctggttcttcattgctgtgtttaggctttctctagttgtgaacgagttgagagctactctctagtttcagtaggtggtggtggcttctcttgtggcacccaggcttagttgctccacggtatgtgggatcttcccagctgctgctgctgctgctaagttgcttcattcgtgtccgactctgtgcgacc

SEQ ID NO: 45832 - DNA, 1427 bp, Bovine  19866880392635
  misc_feature (1)..(1): n is a, c, g, or t
nagtccattagtgagttataaatccatgtgaactgcaaccagctttatgaaatgaaaataaaaaagtaatataatagaaaaatagccaagtgcactgcatgtcataaaagtaagtattgttttgtgaaacctagttttatgtgaacgtatgcagtgggtactcttgcatgacataaaatgtattctgtggtaggggtcatggactaaaaactttaaaaaaccattatcttagatgataatacattatttgtatggctgaaaggaaaagaacagaatgtaaattttaggttaaatcatgtttactatgttaatacataggcatacatgtgtacatatatatataacaatagtacaaaacatagaaacataactattctgttgatttttaccactccatctgtggatataaggtagtttaagaacttagctgctgtattttagctaacagtatgtgataatgcatttttagatgccttttaagaaatatagcctttgtgaaaatactcaatatatttattcctagatttcagaactgtattttaggactagaaaaatccagtaacttgttgaatcaaattactaaacattcacagacatcaaacagcacatgaaaatatcttataatatccaatgttatgtttccattttccttcccatgaagggtgactggtggccacatggtaaagggctggaaaatcccttccaaccaccttatgacactaagagcacccagaggagtgactttaagaagccaacatgcccattggtttctccagtcaaacacagcaagttgcaaaagccttcttacggaataggtaaggttagcacgtctccattgtcttaagttactgctatcaaattaagatgtattagatgtgcttttacctcctggggaaaaacagtcctctacaggagttgaaaatatacatgcagcaagtgcagcccttgacaagtttgtttctcatcccttcctggtggacgatttagctctaaacatgtttaatataacataatgaaaattgtaatgatcattgataacactagtctccaagtcagaaatttagtggcattctgcacattattgccagcaaacttttaaaactgtaactgttaaaataggaggcaactctaacaagcagtatttctcaaagtgcacactgagggacactagtttttctgatgtttatagatactgctcaaaacaaaaaaaaaacagggaaaaactgaatttagaaagttaaacagtttttgtcttactacagaactcttaaaacccttattctaagcataagcataataaatttccaagaagaggaatgaagtatgctacgtttgaatgtaaaagacaacttcatccttttcagaagatcatctacatgactggtatctcacaaaacataatttaggaaatactgttctatacacta

SEQ ID NO: 45833 - DNA, 1126 bp, Bovine  19866880466524
  misc_feature (1)..(1): n is a, c, g, or t
nttttgttgtggtgtagttaaagtaattcaaaatcagaatgtttctgtgttttcatgtgccagtagcataactaaatttggaattggggaaaagaactttaaaaaagaatgattggagaaataaatttactcagacaattataatatttctggcaagtacagagtcaagagaaaacgtcggaatcttctctttcagtactttgtattgattgtaactagatatttttcctcagtgattgagtatcttggagtgatcatcatttggaacccagattgacagagtagcttagcattaggagattgtgagagcaatgcaactgagttttatggattccaaaagaatcatggatattgttttctgaaataattcccaccatcagtttattttctcacaacatgcttgtctttactgaatgtggaatttagcaaaacaagacaaaaaccatttaaatgaaggttcttgtaaatgtaggtattaccagaggttagctacataatttttggcatagactatattttagaaaaaaaataatcagcttttttgtgaccatacttttttgaaagttaggatcaagtgtgacgctgaactttgtctctcttgttttctcctgaaaccagtacactgaagatgaggctaggaaaattggagtggttggctgggtgaagaataccagcaaaggcactgtgacaggccaagtgcaaggccctgaagagaaagtcaattccatgtaagtaataagactagtaacacactcgtgtgatttatgaacttacttcagtgtttggttggacaataagaatagaattaatggaccaattttcgtttgtagaacgaaactaactaaactaacatgttttgacgcagaccagcaaagaaattcttagagttgagagtggaatttctactttcaggaatggatttcccacttgggcagaccctcagaaaagactgtagcatcattctccaatctgtatgaactgtgttctgtcagtctcctatcatccaagggagacatccagggtcaagtatttctcatcttaagtggttgtgacaggagcaggagcatagtgcttctgaagattctgaagttcttaaagaacctgcaaggcaaaaaggtgccatttc

SEQ ID NO: 45834 - DNA, 1424 bp, Bovine  19866880495480
  misc_feature (1)..(1): n is a, c, g, or t
nactggacttggggctgatggatatggagatgaaagaagagggagtaacaggcactcctgcctggagaactattattgctgtgacctgttaacactgccatttacacaggcagcgctgaacacaggcttatttcactgaacaccttcccacttatctcctataatttatataaaaatccaagtgacattctgggaagaaaataattatgaaacattatagaatttatatctcttccattatattttatcatatggacttaaacttgagtactatccaaggcaagaaggatgacatgaattcactgtcagcaggccaggttcccacatagataaacatggcctggccaaagtgagtgcactcatatctactatgcaaaataatagacctggaaaggctttccaccaagaagcaatgtctataatgatatctctcgttgttttgttttgttttttttttaaaaagaactagagtttgttagaggtaagtcattaagccgaaatgactgcttacttactaccagtgcagcataaaagtcactggagtatgagtgaaacgtataaaagagatgcaaggagaaaagtaaagctaaaaggaaatggcccttggaattctaactgctataacagaatgtttaaaacccagatgaaagtacaacccagaggaaaataatcattcccagtgtttctgtagtaaaagtaactcatcaactatcttctcattgctgaatccacagggccctttcctagacttaccgtgttgtactccagtcatactattgagggtctccttgacaccgtctctgctcttggcctccaggcactccgctctcctcctgtccctgtgactattcgcatcattcacatgcatctttatttactggtcacctgaaagctgaccttcccccaaatcctaagcctggcctcttcttcctccacatgctctctgggttatcaaatccactcccacatgctccctgaaactcatgaggctctctgctgagcaggaaagtggaagtgtcaccctgagtcgtgtctgactccttgcaatcccacggactgtagcctgtcctgagcgagagacccacataaatgtaaaatcacctcttggatgttccacaaacacttcaatctatatgtgttcaaagctgaattcatcatttcctggccctgaacgctcctcattctgcttcagtgaatgataaccaccacccaaccagttgattgttaaccttacaccttccttctcctctatcacctatatccaatcagtcagcaggaatccagagtctccagaacatactcattgctttccttgcatactatcataatgacctcatatctggattactttaagtgcctccagactttctctccaacaatctatcattcacaccgtagccagagaatcaaaacagagcctaaat

SEQ ID NO: 45835 - DNA, 1850 bp, Bovine  19866880634989
  misc_feature (1)..(1): n is a, c, g, or t
naatgtgtgctgcagtagatgattagcatattttggaatgtgtgatagaaaaatatttgcattgtaaagcaagactggactaaagagcttcggttcatttccagacctgccgtctattcttgtaatatgacagtatctgtttccaaatgtggaactcagggaaatggaacaaatgaaggaaaggaaaatgtgtgtgtttttattctcagggtgtcagttggagaattcacacatcctttatttaaagtactcactggcctttgaagtgaccctgcacccacacccctcccagagagactgtggccgtgatggggaagctggtgattttctgctttctggacctgaataccttagctctgctgtcatcgagaggctgatgtgaaggtttgtgactctaggaggcggtcacaaggacctgagaattgtaggctgcactgggcagcgtgcgctgagctcctgtgggatggtcaggccgccagagtggtctgatttccctgcctcccacctgctgctctgtgaggagctggtttacatcagagaggctgctcctgacctcactgtctatttctggcaagagaggcacagcagagatggaagagacctcctgccattcagaggaagtcagataaatactcacttcagagagtgtgtcttgagccaaaatgcatatgagtaggtgacagctcccagcctacattgcctgcacagtcctggatgtaaagattaacggatttctattggagaaggaaatggcaactcactccagtgttcttgcctggagaatcccagggacgggggagcctggtgggctgccgtctatggggtcgcacagagttggacacgactgaagcgacttagcagcagcagcagcagcagctctgagtcagagacgtgttaatgaaaactctccatcagtgcaaaaccaagggcaagtgctggccttgctgattttgttttcttcttcttctttttgaaatgtacgctgagagcaagggggaggggactcctcatccttcacctggaaagcctgtcgagctggttagcaggaactttctggaactttagagagagttcctggagtgtgtgtgagtggtgagcagtcaggttgaagagagcgcgtgtttgttggctgtgcctcccttcagtcaagagggagctctgcacagagtccagggctgacacagtagccagcttgcctctgaggagagagcacttgtcagcactgcatggtccctctggggggtgaccctcccctgcctgcgaagctggcactggattttccactaagaagggtttcagcaactgagtacattcttagtcttctggtagtgatcccgaagtttaaaacaaattttgttcccttgtagagcttattctactgagcttattggtttaagagaagagacatttttggaccctggtcatccaatctccacctgcccgcagaggctggagtctccattctgatgtatttcactctgtttctttccatctggagacaggagaatgatctcgcgggaacttggccagtctttcaacactctgtgtacacgggaagactaggcgtcatgtgaggggtctgtttgctcatttgcttagtgcctttgcagtcagagcatacaaagaagaccagcacacttcctgtcatccttctacagatcagtgtggggcaacatgcattttagagaaatctcttcgacagcggctccctagtccctcagagaatctgaggaatttcaaagtatccaaggtgaaaatgcaaaaagtctccataagcttgagaatgatcatcattgtaggtcaccgtgttgatccatactctcatccctggtcttacaaacaggccttct

SEQ ID NO: 45836 - DNA, 854 bp, Bovine  19866880702776
  misc_feature (1)..(1): n is a, c, g, or t
nctttgttcatagtgatgcttcctaaggcccacctgacttcatgctccaggatgtctggctctaggtgagtgatcacaccatcgtgatcatctgggtcatgaagatcttttttgtacagttcttctgtgtattcttgccgcctcttcttaatatcttctgcttctgttaggtgcatacaatttctgtcctttatcgagcccatctttgcatgaaatatttccttggtatctctaattttcttgaagagatctctagtctttcccattctattgttttcctctatttctttacactgatcactgaggaaggttttcttatctctccttgctattctttggaactctgcattcaaatgggtatatctttccttttctcctttgcttttcacttctcgtcttttcataggtatttgtaaggcctcctcagacagccattttgcctttttgcatttctttttcttggggatggtcttgatccctgtctcctgtacaaggtcatgaacctctgtccatagttcatcaggcattctatcagatctagtcccttaaatctatttctcacttccactgtatcatcataagggatttgatttagacccatttaaactcagaacacatataggcatatggtttatagcatataaaagtaataaggagcctagagaaaattacaagaaaactgctctttggccctatctaaacttcaaaggattgggttttctggtaaatattgtattaaatattctgaagatgcattaaactgagtaataattttctaaacatagttttaaaagactctgtgtataaaagcataatagagataaacagagtctgacagcttttattatttctat

SEQ ID NO: 45837 - DNA, 1491 bp, Bovine  19866880747730
  misc_feature (1)..(1): n is a, c, g, or t
ntttttttaagaaaaatgaccttgccagtctgagataaacaggacatgctagcaggaagcccaaggcctttctgatagaagaaaaaatatgctttagtatggtattttgatttgtaatttgtgactataagttatacagcttctgaggtgaggaaacaagactggagggtttgagtctctccttcttttagtaaaaggtggaaaatgctataataggcaagatgatgctataaagatggtgcagaaacagaaagggttaagtcccacattctttcattcgtccctggacagagccccagaagctgcaagcctcagtgctcgttaataaaggaccctgaaaaaatacagactgctgattcaggtgcattgagaaaacaatccctaagctaactattacatccacttagaaaaataaaagttagtaaatactttaatgccaacttccataaaaataattcaatttgtatttattttttctttcatcataaatttggggttttgtgtgaatgcaggttccaactgaatatattaaataagaacctccattattactattccccatgcagatggttaatttaagcagtgaagtgaggaaaaggtggggacatggccccactgagtaccactgggaagactaatgtgtggtcggcatatttggattttaataaaagacggtaccccacacatctggagatactgttagagcctatctagaaagtaacaaaatgccttttgtgattcacctctgtggtgatcacccagttaccatgggatgcaaaacaggttgcatgataattttgatctgtactaaagactggatatagataccaaacaattctatagttttaagtttctaatttcttgattttgtcttaatgtgaaaataaaaatctctggagatgggccaacgatgttgaaatgttattgattttaaaaagctgtaattctcatctctaatgagtcgattcttgtggtacccctagacagtgatgtaaaaactatggctcatcaaaactgttccacttaaattaggtaaagttttaagtgtctctaataattcttgatattgatttggatgtatttattgtatttactgacttctttgttataatattaggtaataaatacctgtacatatccagaagcatttataaagggcagtaattgctgttcaatattaaagtggccagaatttctctttagtgataatgatactagtttccataagaaaaatattcaagaagaatgggcgggtattttccgtgcgtccttccgtatctcccatctacccttctgttttgctctctgccctccatggctgcctgccatagattgcatcaaggcacggccttgcccttcaggcacagactgcattcagctaaagagaggcagcaggaggccagcaggcgaggagagaacgcagctgagacatccattccctcaacacctgctttctgggactcagattaattaccttcaaccctcccctca

SEQ ID NO: 45838 - DNA, 816 bp, Bovine  19866880875649
  misc_feature (1)..(1): n is a, c, g, or t
ntaatcagggtgaaacagcatggctttttgttccactggttggaaaaatttaaacagtttgacaccctgaagtcatcaactggatggaaaggcatggaagtctggctgggcaggcttcccaaagatgccgagaagtgctgcctcacccgccaggatccacgccccagcagcactgatggtgacccagatggaggtggaggcacctgactcctgaggccagctgtgttaactgctgtaagcgagcctaccactctcagctcgggacttggcagaaaaaaatagaggaactggttcgtaaaaaggtaataaatgacctgagggtctcaaaaccgttcagattctgcacctaaagcagcttcaactcttttctactgtttctcaataaatgactgcatccttcatggaatgttacacagctgaccttaggtttaatcctagtaccggaggtctccctcctcatccaccagtcttcctagttcctggtgaactgccgcaggttaataacatctgtgatgggagctacgtatggtgcaggactgcaccctgttagtacaactggatgtgccatacctgtcgattctagttttcttcttcattttgctgtaatctcatttaatttcaattactcacgtaaggcttttgctgcaacatcttaataaagtaaaaagctcacgataaataaacaaaaattatgtaggttgctttcaggcaatggagcatccatcatgttaaaagactcaaataaacatgaattaaatgcaaacaaatatgaaaccaaggaagactacgaattcggtaaaattttaacactgtggg

SEQ ID NO: 45839 - DNA, 1065 bp, Bovine  19866880878817
  misc_feature (1)..(1): n is a, c, g, or t
ncaagatgaagtacagttgaggagggcctcgcagacaaagacatgagaagagctggaaacgaccaactcagagtgcacatggtccatcccctctcattggataccacacacctgcaccttattgtccagcaggttagcacttaattggcttaaattatccttaatggacatacacagcattagccatggtcagttatagcaaacactgtgcctaattaatacatactgttccctaaaagagaaggaagcatctgggagatgcaggaggggaccggctatttggtggtaaacagcaagtagtccagaagctaccatctcatttagctaattacaaatctgtttctggtgggtggggggggatccgggctgcggggcagaagaaacctgaggcagttcacctcccttctcactgaggaatgaggcagctccagtgggaaaacagagggggtttctacttgggggaaagggacagggagctcaaggccctgtcctctgcactgggtcctgttttctgaagcctcctcgcctgactctgcacagggcagtccaagggcctttggggaaagatcaccagggatctgcaatcagagactctgctgtcccttccagaaaccaattaccccacattcaggtcagaaccaggggaggcttgggacaggtaacccagaggctctgggcctcggctgccttgtctatagagaggactgggccagaacagcagttcccaaccctgtgcacacattacaatcacttttggtgattctgtgattaaattagactcaggcagcaggatctgtaaaactaaagtgaaaggcgctcagtcatgtccgactctttgcaacaccatggactatacagtccatagaattctccaggccagaagactggagtgagtagcctttccctcctccagggactcttcccaacgcaggaatcaaacccaggtcccctgaactacaggcggattctttaccagctaagccacaagggaagcccaagaatattgcagtgggtagactctcccttctccagtggatcttcccgacccaggaatcgaaccagggt

SEQ ID NO: 45840 - DNA, 1029 bp, Bovine  19866880922630
  misc_feature (1)..(1): n is a, c, g, or t
nacacttttccattttacattacagctgctgctgttttcatccttcggtcagcgttcaggaagacttgcctggcttcctggggcacttagtcactcctccctctggctggcacagacctgcgctgagccttgcttagaggattatgtcacattctctccccagccagaccttgagttccttgaaggcagaaactgtttcttttcacctttataacccaatgtcgaccactatgcctgccacaaagtagggattcaataaacactgaattaatgcgagaaggagaaaacctttgataatgtttttgttctgatgtttcctgccatttttatacacctttatgtagacacatgggacttcccagtggtaaagaatccacctgggatgcaggagacacaggtttgatccctgagtcaggatgataccctggagaaggaaatgacaacccctgccagtgttcttgcctgagaaatcccatggacagtggagcctgatgggctatagtccatggggtcacaaaaaagtcagacatgacttagcgactaaacaaagcaatgtagacacagtggatttttcactgaagatagtcattctaaatgctcatagaaggtgtaagtttttcaaaaagtattaagtactcttggtccactccaggtgggggcttcacctctaagagaggaatttttggaagtgttggaaaattggaaacaatgatgtgtgtttcttatgggcgaatggaagatctggtgttctcaggagcagctactggagatatttttatttggaaagatattctcctactgaagacagtgaaagctcatgacgggcctgtgtttgctatgtatgcattggataaggtatggtctattttcctcactagctttctagaactttaaattaggcttagcacggtccacaccaagaggatgcctgtgtgtaaaaacagtgctctctgaattgggatggtagttgtcacggatggaggcgaagcacaagtgttatttaaatttctctttcgtttataattattt

SEQ ID NO: 45841 - DNA, 1282 bp, Bovine  19866881003533
  misc_feature (1)..(1): n is a, c, g, or t
naacagaatgctctctgtataggtaattaaatttctagggaacggttttatttcctcaggtagattataatctcaatgccaagaatgtttaatttcccgacatgcctagcacaatgcttcgcacgggaggggtgctaaataaatatgaagcactcagtgaatgattccaaacatttgtgaaccacttctttttgtctgaaactttgtctaaaacaaacttctagtctttctggcttcatcatgccatgaataaatttctcagctaaaaaaataactcaatcctcaagtgttcctgctgctgctataatagagggtctcggagacagaacctggcaaacaataccctcttgtcgcatttaataagggtgagtcactttaaactagacaagcgagcactgtattccagaaattgtctcttcccactgtgactgaaaatattcattgattttagatatattaaactaaaaacacactcagaaataataagtaactttcatatgtgtgtatgagtatggttgataccctccatactcaaaatgtgctccatggataaacagaatccatctcacttgggagcgtggattagaaatgcagagtatcaggctctatctcaaacttactgaatgagaattcctgttttttaacagaaaccctaggtgattttaaaagccttgaacaagccccaaatgggcagagctggttgcactggagttttttatgtaggctcccgagaatataggctttctgtcctttcgaaatagtctatacccatggttcagcacttgccggaccccactgccagggtttctcatttagtaggtctgggatgggaccccagaatctccatttctaaccagcttccaggtgatgcctgtggtgatgctgctggtccaggaatcacaaccactgactcacatcacctaaaaatcacatgttgcatattcaggggattctgcttcaactgcactcccaggagaagggggaatattaagatagcagagagaaaagagcaaaagaagtggcagcaaaacgtttcatttgtgttacaggaagatagcagttaaacgttcctttgtacacagtggggtaaaaatagttgaagaaattactatagcaacagctgtgttatcctctaggtttttctctactgacaattcagaaaaggaagcctgtcttcccatcttacagaaattgtttaaacactgagccttatcaaaaacaaaagccacaggaaacagatcccattcgttaagggactatgaggtaacaatacagatttaag

SEQ ID NO: 45842 - DNA, 1613 bp, Bovine  19866881004017
  misc_feature (1)..(1): n is a, c, g, or t
ntgtctcttggctgagctgttaaagctcttgagtgtgtgctgatgttccctatccttcccaaagcaagtgcattctcacagagtttttctaaagagaacaccttggcttgactcacggatccccaaccagttagttggaaaactcagtgaggctgatcacggggcaatccttctggctgcattccccatttcctgctgtcccagcagattccaataggaatgcctgcaggatcaaaattctggaattctttttgagacaaatttcttgtcaacactaacatacaatcttccccataagcaaacatgtcctttctccttcacactctcagttaattgccaggaaacagaggaaacaaatattctggtagaacttttgatggcataagacgcatcacatttagagcagtagggacagaatggagagtggccgtaccatccaccctttgattctggcatcactctaacccatcccaccccagcgccatgtggacatctccaatactgacaaccttggctgcttcccattggggctttctgcttccattcctactcctcctttgatttgattattggagcagcaatgggtttatccttgagtttacatcatgctgatccccttttctgtggggatccagtttttgttccagaccctaatgcaggccctggtgcttttaactattgttcactgaccagtgattcttccaagtccacctgatcctgtttcaagacaccaggtcctgacagtcacagctggtgagccatgtatgccagatcaaacctgggactgttttccaaaaaaccttgcctggctctgaactgtctgtcccacaagcccacttccattcagttccaaacccttgaggcagcaaacccaagctcagttgactcctgacttgactttgtatatgttcttccagttatttgacttggacttccctctacaattgttagcttggtccacctgtgtgctctctgtgtcatctagagacttttgcctgactcaccccagtacctgcccccctacaagaagtcacagttccaccaccaccattgtgggactcctggagaggataagccagttagggaaataattttacggagaggagctttttgattttctttaattcaccatgtaggtcaggagattatttctcagaaggaaatataaaataggggatgtaaacctggagtcttggtctagtcaagaaggaggtacaaacattttaaagagaaaaagtgatttaatctctctcctatcattccgccagatggaatgaagtcctctgggaatgtcgtgagggaaacatttatcaggaggatagtaaaggacttaggattattttgttatccaccttctgtaagcaagcacttctttttgcttttgtattttttttttttttatggagaaaaaaaagtgttgggtggaactccacgtgctttcttatgtaataaaaaagtcaagcaaagggcatgccttggttcgtcttggactcggcagtctgccgacattatcacaagtgctgggaggtggaggctctatgcgctttggggattatcacgcagtttctttctaagtgttaagcctctttctatgcagaaagggcccatcacag

SEQ ID NO: 45843 - DNA, 615 bp, Bovine  19866881024822
  misc_feature (1)..(1): n is a, c, g, or t
nttatggtaacttgttaaggcagcaaagggaaattctatagccactcagtcttttaactccattcctgtgttgttggaatccacaccctcttgaagcagaagccccctgtaaaaaattaggatacctcttcctggcttctcttgccgtgaaagagggcaagggaccctggatcctgtgtctaccaattatatgcacctgctgtaaaaaaaaccatgagccttgagccctggccctcctggagatgctgggagcttaataagttccttttctgctaaattagccagagttggtttttgtgaattgtaactcagaagcctcagtaaaccaggtatgaacagataatttattcaaaaggagaaagaaactctcaagctcaggagaggaagtttaccttagctggtagtaaaagaaactcaaagcagggttgagatgctatattataattactaaaattaaaagcaattgtttttgtggcaagacggttacttttgtttatagctagtaactatgtggatgcactgtatggaaagtggtaataggaaaatgaaaaaaaaaatctgtaaacatgttcttagctcttgacctaccaattcccggaaaacatggtaagtgtg

SEQ ID NO: 45844 - DNA, 1205 bp, Bovine  19866881070729
  misc_feature (1)..(1): n is a, c, g, or t
nttgtcatgattttctttctttcttttgtttttactcctttttcttatgggatgttcagatatatacaggacaatgaaccaaccccgtgtgtctgttaccgagtttcaataacaatatctgacattcttattttacatattcctccaacttttcttttgttattgttagagtttttgatgcagatttcctgcatcatgttacttacttgtaagttacattgaaccatataaaatagccaatgttggacaaaatttggaactacaaaacttaaatttcatgttgttcaatctaacactttactgtttttctctaaaagaaactccatatacctatcaaactatttttctaacccccagagaagatctacctccaaatgtccaagtgcatcttataacctatcagttatacttttccgcagaagcttgtcttcctctcttcctaaacagcagtcattctggtgtttagtgccttgcccatttcatagagtgggtttctcttttcctcagtcatgtgttttcattcctttagtcccttattttagtgatttagtcccttattttgttgaaacctaattctcctatgcttccccccaaaaggttcctgagagacaaaaagtttttgtccttgcctgccttcatctgccctcatactcggttgttggagttataaaatcttatgccccaaatcatcttccattcagaactatgaaggcatagttccgtgacttcttgtgttgagagatttgatgtcattttcatacaaaggtttgggagccatacctgtttgttcctatcagaaaactttttagatgttcaatttcttcctctttttctgcattttcacagtcatctaccttcatgaatgttttaattccactttagatgttggactcttagagaagaattgtcttcctttgacaatttctttctccctcactgtttaaaattttcttttttttggcttcactgagtcttcattgtggcatgcaggctttctttagttgtggacttcatttgttgcagtatgcaggcttaactgccccacagcatgtgggatcttagttccctgaccagggattgaacccaagtcccctgcattagaaggcgtatttttaaccacttgacctccagggaagttcctctctctcacttcatggttctcgtcttttgagatttctacgtggccctaatcctctaatttttga

SEQ ID NO: 45845 - DNA, 3287 bp, Bovine  19866881109904
  misc_feature (1)..(1): n is a, c, g, or t
natctccttgcagtccagggattctaagagtcctctccacaccacacttcaaagcatcaattctttggtgctcagccttcttcacggtccaactctcacatccatacatgaccactggaaaaaccatagccttgactagacagacctttgttggtaaagtaatgtctctgcttttcaatatgctatctaggtttactatgtcatttaatattaggcatcagttttctaacatgtaaatgagatggttagataaagtcatgttagttctctcacatcacgttgtatgaatttctaggagaagctaaaagcttatagtttatgatgacatacaatagaaataaatttgttcattcagggacttccctggtggtccactggctaagactctgtactcccaatgcaggcggcctgggttcaatccctggttaggaaactagatcccacatgctgcatctaagacctggcacagccaaataagtaaataaacattaaaaaaaatttttgttcattcagaagcctgagggaggtgttcatccagctccaatgaaattctaaaattacaaagtttaaatattagaaagaaggaagaacccaccctttgttgggcatctatcatctcattcagtcttctcaacaatctgtagagtatcttccccctttaatgtctgggggaacggagtctcagatgttaagtgctgcggccaaggtcacacacatgttatgaggcattgctgaccttacacaccagctcttatggactcccaagacctactcttggcacgtaggacctgtgttaccttctgctcacctttgctcagtagatttgtagggaccaacggcttagacatctgactagggttttccttttctttctcagagacctgtaagaaggcgctgatgtggaggagcagctgagacggtccaagatgacgaccacagtagccacagactacgacaacattgagatccagcagcagtacagcgatgtcaacaaccgctgggacgtggacgactgggacaatgagaacagctccgcacggctctttgagcggtcgcgcatcaaggctctggcaggtaggtctccctcccgccccaccgtcgaggcctgggatgccttacagatccctttgaaatcaggcactctgttgcccttgcacgatagactcatatctacttgaccatgtcctccaagagcaagctgaccattttagaagatggccagtcccctatttggagaatggtcagtctcaaggccagaatgattcagagcacagggtgtttgtatagccattcagaaagagttgccctgtgtttgtcagactgttttatttttagcacatcttacgtttcagaatattgaagtgtactgtaccttagacataaaaatacagttgaccgtggaacgacatgggagttagggacactgacctgctgcacattcgaaaatccacatttaacttttgactcccccagaacttaacttctaatagctcactgtcagaacttaatactaacatcccactgttgacctgaaaccttatcgataatataaacagttgatgaatacatattttgtaagttaaatgtattatatactatattcttgccataaagtaagttggagaaaagaagaaaacgttaataagaaaatcataaggaaacacatttactgtgtatctgtatatttattgaaaaaaattgtgtaagtgtacctgcacaattcaaactcatgttgtgtgaggcgggggtccccagcctctgggccatggactggtacttcctgtcagatcagcagcagctctagattagaaataaagtgcacaacaaatgtactgcactcgaatcatcccaaaaccatccccctactcctggtccatggaaaaatagtcttccacgaaagtggtccctggtgccagcaaggctggggactgctggtgtaagggtcaacagaatacaaataaacacgtttacttacggagtgtgctacatgaattaaccagatgtgttacagtactcactttgagtggctaaggttagtttgtatcacatggcagaagtttttgatctgaagagcagtagcttaatctggtgagggcacatttaatacaggtaagtctgccattgatcaagttaacaggcacgtgtcccctacgttgtgatttctcacccccttgttgctgttcagttcttaaagcacacttttaccagggccctaggtgagcagggagtgttctgtcctgagatggccctgaagatcaggaaggggctcagtcacagtgaaaagtcagcagtactgaatacatgtaaaccatgtggagtttattcagaatcttgcctctgtactttgagatttcaaataaaatgatttctgagtgagaaaatcaggtttatgtgttttttcctgatatctttaattatgacctataaattgaagtcacagcttaaaaaggtaagtttactgttaattgtgaagatagctcacttttttgttacctttacagcataatgtgattaagaggcatgtactgcttagaggaggaacttaatcctgaatggtttagatgacaaagagaagtgacagagcagtagataaattcacctttaagctagacttgctcctgaccttaaatggtgtgaccaggatccattttctgtctctctgcattttggctttgcttgctggtgtagacgccattatcaggtaggcttttgggtcctggagtcccaggatggctgccccaggttccggatctgtctgaaaggacatccagcagagaagcacacctctgattgcccagtcttgtgcttctccgaggccctgggatcgcctcaccagcttgactgattatgctcatttcacatgcctctctcagaacctttctccactggagtcacaagaggttatgctggttgacatcagctaatcagggtgcatcttggagtgcagggaatggggagtggtggggttgatgaggggtcagtcccacccagacagctaggctaaaaagtgtggaatataatgggaaaagaggaagagggaaatggatgttggggatgaagccaactgaatgctgtgggaaaattttcagttgcccttaggagagtttgtttcttgagtggtggtgacttaaagatctttcttgaacttacctgacttgaggtaagttgactcaagtaagtgactaaccagatagtcactctagaattggagtgttgttttctagcttattcactaacatggaacctcatggaaaccatgatcctgtcctgtgctagtggattgattt

SEQ ID NO: 45846 - DNA, 1330 bp, Bovine  19866881149015
  misc_feature (1)..(1): n is a, c, g, or t
ntggcaaacacttgctcggcgtggaagacctgttacagaagcatgccctggttgaagcagacattggcatccaggcagagcgggtgagaggtgtcaacgcttctgcccagaagtttgcaaccgacggggaaggtaaggatggaccgacccccacagtacctcctcatcaccagaggcccatctctagagacttggatgagctgtgtggtagtgcagccttgaaaggtaccagccacttgtgggttcccagtgggccgtgttggggatataacatgatgctgtagggtggccttctgaacacttttaactccttcttacatttttgaaatggacctatctttcccttcagtacccaagtgctacttgcttatgttgggcagtgaactttgccagaccacactctgcacacccactgcctggcatggctctcttggctttcacacctggtcgtgcagatatttgttctaagtttgtttggaaaggattggttttgtgcatgttcagaaacatttaaatgcagctgccttcttgcttatagtttgcctcgttttttggttcctgagtgacccaaaagaaaataatacttcaggggaaaaaaataacattgttcctccctcctctaccaatcaagattcaagaaggtggccctgcactttgtatgaatgggggacctaggaacgagaacaggggtgtagccgactgcctattgtgcacgggagcccatgctactgctgtcacacccatgtgcccgccttgatgttacacaggttacaagccctgcgacccccaggtaatccgagacagggtggcccacatggagttctgttaccaagagctttgccagctggcggccgagcgccgggcccgcctggaagagtcccgtcgcctctggaagttcttctgggagatggcagaggaggagggctggatccgggagaaggagaagatcctgtcctccgatgactacggcaaggacctcacaagcgtcatgcgcctgctcagcaagcaccgggcattcgaggatgagatgagcggccgcagtggccacttcgagcaagccatcaaggagggcgaagacatgatcgccgaggagcacttcgggtcagagaagatccgggagcggattgcctacatccgcgagcagtgggcccacctggagcagctctcggccatccgcaagaagcgcctggaggaggcctcgctgctgcaccagttccaggcggatgccgacgacatcgatgcctggatgctggacatcctcaagatcgtctccagcaacgacgtgggccacgatgagtactccacccagtcccggtcaagaagcacaagg

SEQ ID NO: 45847 - DNA, 1133 bp, Bovine  19866881215701
  misc_feature (1)..(1): n is a, c, g, or t
ncttttgactatgagacacctggggcgtgtttctatgaaaatatcttattcaggccatcattccatatttactgcaagggtacaattattctactggaaaattgtgtagttcatttgaggtatttccctaaagagttgtaattattatacctcatcttagaaaatgacataatcactgtttgttttttaaactcgaattctcctccaggtctcgaatatgatagtttccttaattgctggggaaaatagagaatataggaagaaagaagagcttttttaaaccattgacagcccagggcatccctctttggagagcaagcatatgtaaagacaatctgtctcctgaaagtcagtcattttcctagacagtcaatcatctatatgtgcaagtctagagctataaacatcatttttgccaatgcattctcaatgccaagggatcgtaaatttctctgggttttgagctttttaaatcactctagcttttgaattaccactttcaacaatacagtctagtaaattatttatatttatgtaaaagtacagactggaatcatttttatcatatctaattattcatttccaattacatttcaacagatattacagtaattgggttaaaaggcactttgttgtgtactatttgtaatagtgaaaaactgtaagcaactaaatgtgtctcagttgattaaatgcatatatgctggcatctacctagataaatgcctataaacacccaactgtaaatagtagtgattcttgtaaagcaggatatgtttgggaggtacaggggggagtctcattccacattacatttctgcattatttgatagttttacaaccatcttgtttcactttttcaacttttgcaaagacttaaaaaaaaaaaattctaaaagaacaagtaagtaccatatcagacagaaaaacatgtcagttgagaaaaacatgtcaaaactccttccattctcttccgcaattctacaactgacaagttcatgagactgtggccaaaatggctttcccctcctgttgactctgtcatttgaaatatctactcaaattttactaacaccatcttaagtaaaattctgaaggtctgtcatttctcaggtgagagaatcaagtattaa

SEQ ID NO: 45848 - DNA, 937 bp, Bovine  19866881278143
  misc_feature (1)..(1): n is a, c, g, or t
ngacctggccatttcgtaaaggaacaaccccataatcactgtctataggtctgtcagttttctcaaagaggaatcctcccaagctctgcctggagtaggggagggtgcagcttcaacttgcaccactttgcacgctcctggcctcagaagcatctgatgccaaacactggggcaggaactagattaattttcaccccacctcctcctccacaagcacttagcttccagttttctgggatctactcaagtcaactgccacttatccatctgctttccaacctccaaatttgttagtatctttgctcatatttagttctcttttttttccttaaggctttaagacattttaatttctttactatcactgtactatctttttcctctttctgtctcttcctctctctcttgttcttttattggtatttctcattgccaagatcattactatattccaggtcctaccactatgcccagactcaacaattatttattaagttaaatgataattcatattattcagtagattatttattttaaagtcataatataacttaaactaataacataatataaacctgcaatttattcatagtttagatggtgtttggatactagatgagaatgattttagtttatgtaacattttacaatgtgtatataaaccagtctgtatgtcagatttttaacatatatatacatgtgtacatgtttatatatattcatacagacagaaaatgtgtatatcaacatgctttactaacaaaagtcatctcatagttattcttttccatcagcccacttaattacgcatggcttttggcattttagtaatgtcatcttgtgctgataatgaaagtgccctttatgtcttgtaccaccacacaatttccggctgccacccaggtcagttcaacaaaggctatactccatcatatcc

SEQ ID NO: 45849 - DNA, 1228 bp, Bovine  19866881281641
  misc_feature (1)..(1): n is a, c, g, or t
nactgagccaaaaggcaagagtgagtagtgctagaaataatttaagtaaaatagaaatcagtttaggaaatattttgatattctaggtattcatgcctttgaattaagtgggtatgtttgtgtatcttttactgggaggaatgtttgtagttttcacactgttaactgtgcataaaagggttcaaaattttagaataaggaggaaaattcaagcatatgggagaatgttatccttaaatttaaattttatttatagtaatagtgatgatgtggttacattgatcactgatcagtgtgcatgatctcatgcttaatatccttatgaagttgctattatcctaattttatagatgaggaaactgacttctagagaggttaagtaatttatccaaggtcacatcgcttatatgtgctggagccaaaatttcaaccccagtttgattctaaagccatgattaacgactatctaacaaagcctctcatatttgttaattacatccattgttgtacaaaacaaagttgttatatttataaatatgacatagaaatatgtctcatgtctatcactcattgaagaccacacttgaatttttggtgtagtttattatccctttttcattttcccaaattgtaatttttgaggttattgatcaaagaaaaaacaaatgtgagggcctgtatgacgattctgaaatttctgtacattcaaaggtttatttttttttctgaagaaggtaatttatcctgatttgtcttgactttttattggtggacttaaaggatcatgcctggtgagaagagcatttactacagctatttgaaagacttttgcagtcttctcccttttctcaggccttctgagggaggcattggctgccactctgatgtctgtttctgataagtgagttttagtctctaacaactcctgggaattttgtcggcagagaccgggtgagatcattttgctttccgctgagtttcctttctctgtttttttggactgttctgatgagcatgaccctgaagcattcagtaatacctctgttctctcaggaactgttggcctactccctggttttatctctgtctgcacaaaaactccatgtctctggaaaggaaaacaaagttgatgttaaccagggcacacaagttgctggaagacgcagctgtgaccctgagttcatgtattagctcaagtcctggttgaaacaggctcttacttctctgc

SEQ ID NO: 45850 - DNA, 2244 bp, Bovine  19866881340449
  misc_feature (1)..(1): n is a, c, g, or t
ntatatagaaatagataacgcagcgtttgcctgatctttggagagaacgcctccctttaatttggcgtcctaagcgtccctgctgcctcagcctggcccagctctgatgtgaactgtggtttagaatatgtgcaaacgcagtacctgaacaagcagtgtcaccgggccgctcttatccatttccaggatctctcccattttttgttcccaccaggatatgtccatgtcccagagtgatggcacgaattgaaggattatcttccaaaagcaagcctgaggaggggaaatactgcatttaatattgtaaatgctgtatttaatataacaaaaataaaatgattatagtgattctataaattctggttttatagttccaaagtactaagtacaaggcaatcctctgtggtatttctaccaacggccacaagctctgaatgtggaagaaaaagggagagttgattcggtcatggttttctaagaactttattcctatcttttgcatttctacgaacagaaggacttccatcgcatactcgggagtggcaccttttgagctagttgacaaggctgctcttttaatggcgtaagtcttcaagcatctttcaaacatatcatcccagagctccacaattccatcctttccacctgttacaaaaccctgtgaaggcacacatcagaaggattatatacacatcaaagtgacaaggacccacccagtctcaaaaggatccctccttgggtaaagaagcttagtctgtcttttcttcctaagtatggagactgaaaaacctgatgataacatcatattttctggacacacctctcatttctctagcgctattaaacactttctcactgggtgtccatttcactttcttcagaccactgattcgagtttagcaccctggatttcggatggctgtttccgtgtccagttccctgactgggatgtggactgctagagaacaggaccagcctcaaagtttgcagagtttctgatatctcatgctcctgctgaataaactggaattaatgtcacaatcaaaaatgattgctaactatttttaaatatttacttccaggaaaaacatcattatttctctattaagaataacaagtatttcatgtaacaagaatatcttgctctttctgttcatgagatatcaatttctaccataattaagatccagattaatttttataaaacctggaaagtataaagcctatactttattggatatttatttatgtatattatatatttatttatgtaatatccaatatacatattggatatttttttgctagacaatgatctttattcttattctaattttatgatttcttggccttattagttttcctttctggcaactaccaactgttcttagaaattttttaaaaagaaaattactgagtaattcattctgttttttcaaaaacttttaatttacttcatttcaatgatgttgaaaaggaaataatattttgaagttattacattaaatatcttaaatatccttatttatccttattatagattgtgaacctatagacatttactcccaaaattaaatcctgccttttcccatgatctttaagcttaagttactaagcaataaaagagtttaaacatgctatatcacaccaacttccaggcctgcaaaaattttctttctgctttaatcttttctaaaatttgcagtttaaacaaaacaaatttgctagtgaaaaacagctttaccactaaaacaatcattgtaattacacatctaacaagaacctactactatagcagaatcagcatatttacctgggaataagcaaacgcaaaatgaatcttctcttaatatgctgtattgggtggcttaggctgtttggaggtcagataacatacataaactggaaccatcagcaaactagcagtgaataaaacacttctattttctggcaaattgattgaaggaagtgttttaagagcgctgaaggtaagtatgatctttttaaattaagcagaatttttttttggccatacgttgaacataagggatcttagtgccttgactagagatggtacccatgccctctgcagtggaaccatggtgtcctaaacactgtattgccagggaagtccccagtgtgatctttatttagaaagaacaagaacaacaacaccgcaaggcaggaggttagcgggacagatcaggacaaagacgagcctgagtagaaatacagctggtgtga

SEQ ID NO: 45851 - DNA, 1762 bp, Bovine  19866881381948
  misc_feature (1)..(1): n is a, c, g, or t
ncaccgtgctcatcacactcatcaagtctctgtacctcacaagtatcagtcattaaccacataaatctgcaagagacaagcccagacttgatttttcaaaaacatttccccacctatggtacaagacacttcacagccgccacccaccaccccccttaccagtctctctccagagaggacctccagtagcttgatgagcatccgtccatcccgaaggtcagtgtacagatctgtgatccggcaggacacccgggcaaggtgggagttgacccacttggtgaaggtcttcttttgcacagcttcacgttcatctgtaagcagaggagaacttgctttaccaccaatcacagccttgggggtggtgggtgaggggcatgagatgccagccaaaggaagaagagcaaagctcaactgtaatgaacctcaaagtcaacaactcgggaacagaagaactggacaacccttgactgtctgagcccctaagcataaccaccggcagagcatcctttgcttgcactcacttcattttctccacctctgctgaggaggcagcaggatatggaaggccacagtgggcagtcccgcctgatagtatatacttggctggcgaagtttctaatgtgtgcgtcacagcaatcactcctctaaggcaagtgcaggagaagcactctgtgcagaaggacatggggcaggaaaactcagcagacggccagcaactgcttcttcatgtacaaagggtcaggcatcacctgacaggacaaactcacctgtgaccttgatctactatgacccttttgcctgcttagctggatgttcagtgaacaacagagaagatggtgggcagtgtggcagagtacaaggagcgctggccaagccctgggagagcagggcatgggcctgaggagacttggtcaaatacgttctgagaccctgggctcagtgtccccttccatagagtggacgaccatcatttccaagctttcgtggaagcttgtgcgttcgtggaaaacaccactgctggtttacagtctaaagtggggtggctgtacatctaaatcatcaaggaaacaggattaagctttccaagcctcagtgatcagtctgtccaagccaaagccagaaactctagacccaactgcctagaacaggcccttcgcaccccatacaaacaggcttcccatctccttgctctgcagagtgttttaaacgcaggccattgcagatcttcaatggagagccatggagtgtgcccaggccactgattcaaactccttgactgttctctaccaagctcagcagagagccacagagtgtgcccgggcccactaactcaaacgccaactgtcctctaccaagctatcctttaatcacatactcaccccaccgccaacagcatgaatttgtcctgaaaggacccaagacttcctctttcctgtgtgaggcccaagcccaccaagaagaaactacaagaaagggaggagactccaacaacgttttatgtatttctgcaccaccaagtggcaagtaaaaagcagccttgctgatggggcgtgtacttggtggccttggatgttctgggttcctaggatggtcagggggccctgggaatatctgcctggaaggttctgctaaggcctccacccaccacagggaggaagctagacagagacaagcctgtgtgaatcactcaagtcgtgtccgactctttgcaaccccatggactgtagcccaccaggctcctctgtccacgggattctccaag

SEQ ID NO: 45852 - DNA, 2184 bp, Bovine  19866881404681
  misc_feature (1)..(1): n is a, c, g, or t
naaccaggtccactgatttgcgatcatgcttatatctcaaatcagtggacctggtagatttactatatttttgtatgtagttttaatgaatatttaaaaataaaactaaacaaaatcatctcagcaaagtgaagatgatccttcctttcaggccttcaccatatgtttgaatgtttgaccaaagtttatatttgaactgtatgaaaaaaattgaggaaggcaaataatttaacatttttctcacaaggctgatcaccacagccaggtgaactctcaaagggcaggtttctttgtccattgtttatacatagtaggcatttaaaaggtactcaaaaaatacttgttgaattggacagaatcaacatgtctgtggctgcccttattaggtaaggtgaaatccgactagaaataaaagttgtttccctttcacttattttgtgccagagcccctagcccctccccccccccaatgttaatgaaataccaaagaaaacaatggcagtactgagaaatgcctgtttaaattctttcagtgttattctgaaattgtgactcttaactgtttcctttatcacagataacagtatttgaataaatcttcatttgatggatgagtcacctgccgtaccccagtctactcccccttactttaaaaatttttccttcagaaagggaagccagacatatctttagcaaggtactccagtaaagtggcagcaagtattcaaaaaatgtgaaagacaaggattcagagtttcactgtaaatacctgatagcaacctttggtgggaaaaaaacatcacccaggagagcccagggtatcactgaccaggaaaaattaacatgtcccccatccccaaaaaagtcaatctggagagatcactgaagaaggcacatatctctgtagaaggacagaaccgagaaaaagaaaaaacatttaggcaataataaaggtaactcaaaaggattattcttaagtatctcagatgcagctttgaagtctttcctcatattagacttaaggttgatttaaaggaacctaaaactcatcagtgtcctctctgtaacttcgtactctccattttcaaaaccttgtgagtatatatggctttgtcgccaggcattatttgtctccaataaagtggatatagcactttatttcaaattttttttacagatatatatagttactttaactttccattagaaatgtagggggaaatcttgtcaacctacttattagtcagtatagactaggttatgatgctgtaacacccaggtccccaaatctcagtataatatgctagttacgaatcagcaaaaacgttgttgcttatacacagtcaactgtggttccaagaaactctctgaggaagctgtcttccaaatgtcagctcagcattctggaatacttagatgctatggtaccttcatatcagaaatacttctgcccagaaatggcacaaagttttctccacttgcattttacatgacttgctttgtcaggtgactacaactaaaatcaaagattgatgaacaatagtgatgtctgccaccacttgttttatttagaaaagaggaaatggtactttatttacttgattatattagcccaactaatacctgtatacctacaaactattatgtataaaataagctacaacgacatattgtacaacacagaggatacagacaatattttaaaataacaaaaaaattattaagattataaactttaagttgtatatattttaccacaataaaaatttagaaaaaggaagcccatcttttattgtactaattaacatgctaaaattttaaaaggacacattttgaaaacttgaataaatttttttcatttctaatattcttaaacttgacttccttttcacactgaactagtctgagaagtctcctcatattagaaatgttccatctggtgatttacacatatttattttgcactggggaaacctccagacttacatgtttcaagtatcattaccattaatgaatagtttctgagcaccaatagcacatttattgctcagtaaaataattcattctttcaattattcaagaaatatgtatgccttaatctgttctgggctgtgaaataaagcagtgggcaaaacagtaaaaaaaaaatcactgccttcagggagcttccattgtagaagaggg

SEQ ID NO: 45853 - DNA, 1748 bp, Bovine  19866881464916
  misc_feature (1)..(1): n is a, c, g, or t
nttgcctgagctctgtatccattaaaacatgcatatttggcctatcatttaactatagatacctttcttggttttttacttttcatttttgatctgtaaacatttcatggagccacatacattgacatttctttctgatattttaaactctttataagattgcagataccactgccatccatatttcattaatgtccatgtttcttttagtttacctattaatttgtctttgataattaaattaatgtttcacttatttctggaaaaataagaaaaatctgaattagtttagtaacagataaatagcttaaacattattagtaaacaatcaatagatttctacatatttcatcatacttatgtggtagattaactggatactaagtagaattgaaccatctttgtatttcctcttttagatgcattaataaaattttagtatttctttccccactccagtactcttgcctggaaaattctatggacggaggagcctggaaggctgcagtccatggggttgcgaagagtcagacatgactaagcgacttcactttcacttttcactttcacgcattggagaagaaaatggcaacccactccagtgttcttgcctggagaatcccagggacgggggaacctggtgggctgccgtctacggggtcgcacagagtcggacacgactgaagcgacttagccgcagcagcattagtatttctttattgcctttcaccagactataaacttcataaagccagggactgtgtatttactattttgtgatctcacatatatttgaatcagaatggtactcaagatgagtacgtttaaaatatgtgtatatatctgtgtgtgcataaaaacttaaatgtagatacatctacatgtaggcactgataaacagtattaatatctacatgtatgtatacacacacactcatactccttgtttagactggctgataaaaggaaataacattgtaaaaaatgcatgaagtatttttaaaggatctctatgcaatgacattctgagactggcagttcaggtccctaatgaaagatggagagtgaatgaagcacattctgccacctctcctctccctccatcccctggaaatgagagtctgttcccttttcctccctgtctccctgtcttgcacactcccacttcctcttttaagcgcatcaatatagttcagaaactgaagatgtcaacctaaaaaccagcacttgtttcccatgcatcagagacagatgaggacattctcactatatggaacctgcaagcatcgttatctcctatgcttttacttttagttctttgagggctcttttttatttatttttaaaggataaaattgtccattgatttttggctagccaccaaaaagaaatcacagctagttgacaagaaactcaggagaaataaacagtaagggaacataagaaatgaacaaaactatgattccatggtgtcagagacaggctccatgaagatattttagcatttcaaacaaaattttgtcccattgcttccagtgggcataattgtttaataatctttagttgaaattatgaactaaaaatcataggtgttattaaaaacagtcttataagaacctccttgaattagaagaatatggaatctggttttggactttcttctggatcaaggaccagagtttgttttggtcactattgttctcacataaaataaaatttagaaggatataatgtacatcacaggaaat

SEQ ID NO: 45854 - DNA, 1523 bp, Bovine  19866881627677
  misc_feature (1)..(1): n is a, c, g, or t
nttattttctgtttcccaattgtaaaggattgcctgttgtatctcatacttaagtaagaatgtgtaagaaatttattctttagcttttatttgcagaatcagtgaagcagtaggtgttatttggaacaggttcagatgtgtctttagaaacagagctcagattttaagacctagttttagcttaatccatgctagaatgattgacatatcttttgaaacattcacttatgtattatatataagactgaagattatattttctagtgtatttaaataggaatgtaattctttaaccaacaagttcttttttttcccataactaatcttcttaataatgtctttcaggagccaaatttagaaagtatgtgggccattctgcacatgttacaaatgtccgctggtctcatgactttcagtgggtattaagcacaggaggggctgaccactcagttttccagtggagatttattccagaaggtgtcagcaatggcctgctggaaaccgcaccccagggtaaaaccagtaataatgtttcaacatctgttttttttttcaataaaaatttcatgtaatggcctgacatctcttctgaagataaagagttaaaccattttaaaaaattcattcctaccataaatttaaaaattaaaaaaaaaaaaacacagaaaaacgttttgagatatgggtcaatcgaatatgggtcaattggataatttccttcaaagaattttgcttatactaaatgaaagctgaaggtctaaagtttacatgaagaattaacttttgaaaataatactacacatacatttcagtctccttaggacaattctgatggatggtggggctgctgggtcaggtgacaaagtaacatttgaaataggagtcgccttcctaatagggatcaaagaatgatccacagtcaggatcagctgtgttccaggtcaatggatatgttggtcctttaatttattgtactttcagtagtaatgaccatgtactatgtgagggaatggtttttattgggagggattctgcagcagttttgaccatgacacttaccagcacctggtggtcatgttaacaggctaaagaggatttttactgaataagtggttgaatttccttctgacccagcttcctccgtggtaaaaccttcccgtctcccctctccccttttctctctttcaaagcaagatttaaaacccaaagatccattatccaatacaagtgtggaaatggtggggggagttacactagtctgttaatactcctaaaaagagggtgagaggtatgccaaacgtaaccaaaaatgaaagaaaaaagatgttttaagaatctacagcaaatgaaaattatggtgtatggtgtatttttattgaactcagtaggatagaagaaagaaaatatttttaaactttttagccattaagagtctcagaatttctgcttgtttcttgtgggggtatttctgcagacggtggtactgattcctacagtgaagaatctgattcggatttatctga

SEQ ID NO: 45855 - DNA, 633 bp, Bovine  19866881651577
  misc_feature (1)..(1): n is a, c, g, or t
ncttagagagaattcgctggcagttggaggctgtggttggcatttctcatgcagaattgtggtgtggtgggggaaggcactttatgttaggactttgggggaaagatactggtgtattttgtgtgaccaagggaagagccaaacagccgatcagaagagaaggcaaggtgcagacaggccccagaacaacagaaagtaagggtttctattcctcagtctgttgattttagcttctatttctgctcctgcaggtagtcttccaggtagcagggaatgtagctgccatgtgcccctgagctttgctatccacctcttgcctcatttttctagtttcagttggcaacattggtggctgtttgataaggaggctgtaatttactagactttggtcaaggggtaacttgacctgaacgggtgaactgtgatgtgggggtgcagagggatggaagaacatggtagctctccctggaaccacatggagctcttcctacaaaagggggtggatgctgggcagatggcagtgcataacagtagatgctcatggcctgttttcggatagattgatgttcttgattcagagataaaactattttataaaatggcacggtgactttcaccattgactaactgctt

SEQ ID NO: 45856 - DNA, 727 bp, Bovine  19866881912629
  misc_feature (1)..(1): n is a, c, g, or t
ngcaactgcatagcctgtgtgcaagacagtgtgagcagcagagacagtgaggagggaaggggcgtctcggatcctcgagatttcaggctccttctctcgcaatagcctgtgtgcaagacagtgtgagcagcagagacagtgaggagggaaggggcgtctcggatcctcgagatttcaggctccttctctcgcaatagcctgtgtgcaagacagtgtgagcagcagagacagtgaggagggaaggggcgtctcggatcctcgagatttcaggctccttctctcgcaatagcctgtgtgcaagacagtgtgagcagcagagacaatgaggagggaaggggcgtctcggatcctcgagatttcaggctccttctctcgctcaaggctgagggaatgctgcttgacctaacgcgagacatcgccagactcggagttcattagacacagcaacaattcaattaatatgtgttgagagttaaaataaacacaccaaaaactccaacaaaatgcccgaggcagactttttagaaaagcctaaccagttctaggcatgtatctgacacttagtagatgtctaataaatgcttaatgagtggataaatgaatgatgcatcttatactgtgtgaataattactgtactcctttagacatactcatttataaccattaactccaagtattttattaccatatatgtaattcattttgattgccatgtgttaacactta

SEQ ID NO: 45857 - DNA, 3339 bp, Bovine  19866880144045
  misc_feature (1)..(1): n is a, c, g, or t
nactgatcttctttagaatggactggttggatctccttgcagtccaagggactctcaagagtcttctccaacaccacagttcaaaagcatcaattcttcagcactcagctttcttcacagtccaactctcacatccatacatgactactggaaaaaccatagccttgactaaacaggcctttgttggcaaagtaatgtctctgcttttgaatatgctatctaggctggttgtaactttgcttccaaggagtaagcatcttttaatttcatggctgcaatcaccatctgcagtgattttggagcccaaaaaaataaagtctgacactgtttccactgtttccccattcttttgtacatattaataccatttttcaggttcaatgagttcccttattttcctagtttagtaagaatttttatcctgaatagatactgaattttgtcaaatgctttcccacctttattgagaaatcatctggtttttcttccttagtctgttaatttgatagattatgtcaactaatttttttctttttggctctgtcacgtggcttgcaagatcttagttccctgactagggcttaaacccggccatggcaaagaaaaggtcaagttctaaccactggaccaccaggaccaccaactgatttttaaatgttgaaccagacccttcatttccaggataaaccccactaggttgaagtgtgttattatttttttttacatgttgcattccatttgctaatattttgtggtgtgtttttgcatgtatgtttataggagatactgcttttctaatgtctttatctggctttggtaatgaggtcatgctgtttgatttggagatgtctcctgttctattctcagaaaagattgtatggaattagtattatttctttgtcaatgatttggtagaatttgccagtgaagtcagctagcctaaaattttctttatggaatgatttttaaactacaaatttaatttctttaatagatataggattgttcatgttatatatttctttttgagtgagctttgctagtttgtacctatgaatgaactggtgtaaaattgtttgtaatattcccttattatcttttaaatatttgtagtgtctgtaattatattagcttgcattcctgagtttggtaatgtgtctgctttgtttttttttgggggggagcagtataggtagaagtttatagattttattgataaattaaacaaatttattttggttttatttacttttctctgttgttttcctgttttaatgttattgatttctgctctttattattttctttcttctgtttggttcagatttaatttgctctcttttatctggattataaaggcgaaagtttagatcattcgagatctttatttttttccaatttaagcatatgattttatacatttccttctaagcactagtttggctgaattgcatgaattttgatttgttttatttttattttaactcagttcaaaatattctaatttcccttatgactttttgatccctatggtttctttaaaagtgtgttgtttaatttccaaatatttgtgacttttccagatatctattattggtctctaatttaattctgctgtagtcagagagcatgcccttcatgatttcaattctttgaaatttgtattatgacctagcatatcatatgtctcgatgaatactccaggtgcacttgaaaagaattagtattttgctgttcttgggtagactgttctgtaaataccttattacatcaaagttggttgatagtgttgtttaggtcttctcaatttttggtgattttctattctaaccattgctaagagaaatattgaagtctccaagaataattaggaatttataatagctgtgtgaataagaaatatatttggtctctgcccccgctttctaacacaaagcttctaaaacccttgtaatttcctaagcagtggaggtgataggagcatcttacatagaggtcctaaaccccctgaaatgttctgagtgacaggagctgcttttgttctaaggagttgaccttggtgggcttctggagagcttcaggatgggagctggtcaccagaaataccaagccgtgacataaagcttggaattttcaagcctgccctccatcttcaggagaagggagagggaatggagactgaggtaatgattgatcctacctatataatgaagcttcaataaaaatccctaaactatggggtttacagagcttctaactggtaacacttgcacgccagggcataggtatattccagctttatgggggcagatgcttctacacatggaaccctggtagactttacactgtgtaactgttgatctatatcctttacaataccttttataaaaaaccagtcaccataagtaaatattttcatgagttttatgagccattctacaaattattaagcctgagggaatggttatggaaagccccgactttgtagccaaggtataaaaatgtggataccctagggacccattacttgtgagtgccatctaaattaaggacagttttgtgggacggagcccttaagtctgtggagtctgaccctacccagagtagaactgaattaaagtatagggcatccacttgctatccagagagttgaaaaattagttgatttggtgaaagaaaaaaaaaaaaaaaacccacatgctttgtttcagaactattctgtgggtagaggaatagttttcctttagttggtatcaaagaaatgggatttgcaagaatggctcctgtctcaaggaaacataggaaacatgtagtttgtgggaaaaaggggtgaaaggatgaggatggggaacttttgacccctgaatggctacctagccacccatggtatgaaacttcagctgcactgcagtaagttactaaaggtaaaaattaccaatggaatttagcagtggtggtagattccaactcctgaaaagttggcttattggatctgtaaggaaatgaaaaataataagaagcatgccaactatataatcccttggttattggtatctgtaatagccaaaatggaatgaagttctgggtcaggccttgttgctggacctaactctgattttggatggtctgaactttagtcactagtcttaaagcttccctcaaagagaaaaattatgctagagcaacagaaattagctgtaatatctctcgttgccaagaaagtagtcaacacaggggtttcagaaactcctgaaaccaagaggtttaatgtgaaggagctgtctcattttgtagatcagtatcatcagccttctgaaaaacctttactaaaatggatag

SEQ ID NO: 45858 - DNA, 934 bp, Bovine  19866880422030
  misc_feature (1)..(1): n is a, c, g, or t
nctgagagaggaggattcaactgaagagtgaatacatgagaaagaagggctctagagatctcaggctagagaggctgggatgagcacaagaccaggaattatctggaagatgaaaggtgtgactctagggaaagggaaacagcagaaggtttatgtttggtgtggtgaactgcacttctttttttatactagttagacacaagggtattgggttgagagtgaaagagagaatgggtgtcgggggaagctgaggtctgagctgagatttgacatccttgtgaggggtgtgaaagaatgagctgaccagagattgttttaggatggtctagcagagggagccaagtatgaagcaaaggccggaaattagccacttggctcctttggggaattgcaaaaatagtaggggagtgccacctactatttttgctaggtggcactagtgataaactcacctgccagtgcaggagatgtaagagacacgggttccatctcttgagtggggaagatcccctggaggagggcatggcaacccactccagtattcttgcctggaaaatcccatggacagaggagcctggcgggctacagtccatagggtcacaaagagtcaatacgactaaagtaacttagcacgcacgcacaaggatgcaggctagctagaaacagaagctacatttaatatgacataacgaaggaaacatcacaaatcatggggaaggaaaggattgtttaaaaatggtgcttagatatagctaaactattgataaagtctatttacatcctcagctcacaaccagaaatttcaaatgaattaaaggagctggcttttaagattcaaacagtaatatagaaggaaataggaatgaatttttatcttctcatctgatgcataaaagcagtaggaatcctaaaggaaagggatacttccctgact

SEQ ID NO: 45859 - DNA, 2222 bp, Bovine  19866880516454
  misc_feature (1)..(1): n is a, c, g, or t
ncagcaggaccttatgaaaagaccccatttccccatttacatttgagaggctccttgtccaagcagagggcttttttttttttttcctggtgacactgaggagagacaacccagaaaccctttttatgcacagttgtaaattaatggtcctgtttcgagtaacacattgagtgggaactgcaagttcacagtttagtgtaaaaagaaaatagaaagaggcatttttcaatgaagccctcattttttttccctttaaataacagaaagcaattactctacttaatggctgtccaatgcaggttaattgggagcttgggggcaaggcaaggaacattgggcagaagagctgcaacaaggtctcagaggacacaaatatgggatggatgggaccaaacgaagagtcgagttgattcaaaaatgagcacagccagggcctctgctttccctggagatggggtggactcgcttccggcagacctactcctgacccagatcaggtaaggaggcctgcctggtctgctcactggactctaagtactgtcttgctaatttcctggggctcacggttaagaatcaccagcctgtgtcagtttggggacctttgtgagttagcttctcactcaaataacgtgagtggctcagttcagctagtaaagaatctgcctgtaatgtgggagacctgggttcgatccctcggttaggaagatcccctggagaagggaaaggctacccactccagtattgtggcctggagaattccaaggactacagtccatggggtcgcaaagactgagcgactttcactttcactttcaaataatttgacatacagagattccagttctagccctctgagttcaaaattcagttcaatagaacactaaatatttgacaagaatttcattgagttcccctcccctgtagcattttcttcagcttttgtttcacagactagttcactatgggtcattcgtgtattcattggacattcaacaggtatttcccaagctaagggcaatgtgttaggtgcttagaatgcagaactcaactggacacagcacagttaagcagaaaaagaaaagatgatttgaaatgggactctgccacttaggagttgtgtggctttcggtaaaacatttatccttttaagtcttagttttcttatctataaaatgagaataataatacctttcatgtgcttaaagcatttggcacacagcaggtggtctggaaatagtggatgtatttttgccccaagccataacatcaccactatacatcaccactgaaggcagtttggggttttaatatgatgccctgaggatagaagcagggtgtatacagaagtttcagtgggcaggggcagggtgaggcgggtgggagagtgggggtgggtcctgtccatctcctgctggtgaaatactcggtaacctttctgaattctcacatctccaatttagttttgaggacagcattcacaatacctggtacagagcaaactgtagatcctcagacctggaaggaacaaaggtctgactaacgttctgatattatagaggcagatacagtccacccatatcatctagaaatacccaggcttcccccagagacagggagtcatgtctagtgatgaaagctctgcctggagaactggattcaatttcaactcatcaactcacaggtgtggttgatcttagacaagttatttatcccttcttaccttcattcccacatctatgtggatacattggaagtagctcatgtagatttttcatagttccctagattaacatctattattgttggctattaagaaggctatagtcaggggctctgccctcaaccccgagcagcctagttcaagaagaacagggacagctgggaacaaactctctccatcccgccgttgctggaacaacagtggtttctggaatccgcacgggcagagtaacctttgaatatgaagaacagttctctatgtacacagacagggcaaggctgtattgattcagaccatagagcaagtcagtctaaattacagtcagatcagaaaagaaggcaattttattactttccatcgccgacgtggcttatcaacatgcctctgcacacacattctacggggctgacttaatgaatggagggaacctattcataattagcagcacctatttgtgtgccaacaattcatatgcgaaagtcaaattcaacagcaacgacag

SEQ ID NO: 45860 - DNA, 996 bp, Bovine  19866880588385
  misc_feature (1)..(1): n is a, c, g, or t
ntaagggagagggactggattccaacacttaattgccttaccccttctaaatggaatgggtcagagcccctttcagagtggatgggagtagcccagcaggtcaatggcagtttcacctgtggtagccatttttgtagagtactgaagttctagtgggtaggataggggtagcaggttttcctggttgtactcttcttgagttagtgcctttttgtctagagctgtagttgacttggcgttttatctaagattacccattcatctatccttgcccttgacattctgtccctgggttattaggagagaattactgtactaactcttcctagaacacatgagaaattcagctttgttctctatcatacctgaaactggcaccagccacaaatgcgccagacctagaattatggtcaaagaagaggtctcagagagggagctcctacatgaactccccctgagcctcagtactcggacagaataacagtgtatggaaagctcattttcccccagcactgtacatttaaaacctttttatctgcccagttgaattttttctttctattgaaatagaaaagaagcaagctcttgagtcttatagcagtaagctagtgattcttgtgggtctctgacattgtaatgtattggactctgtttatcaaaataagagttaatgctaaagagtattttaaatctgcaagtttaaatagttctctctagagaattacctgcttaattactaaaatgtagaatcccaggaatgggggagcctggtgggctgccgtctatggggtcgcacagagtcggacacgactgaagcgacttagcagcagcagcagttaaataagattcatctaaattagggtctcttcacattccttttagtgtccacaaaagaaatttttaaaaaatgtattagttcttaactcatttgtttatttcttaggcattccgtttagtagacactcttattaaggaggaaaaacctggttaaaaata

SEQ ID NO: 45861 - DNA, 2557 bp, Bovine  19866880595398
  misc_feature (1)..(1): n is a, c, g, or t
ntggatgtgagagttggactataaagaagatgagcaccaaagaattgatgcttttgaactgtggtgttggagaagactcttgacagtcccttggactgcaaggcgatccaaccagtccatcctaaagaaaattagtcctgaatattcattgaaaggactgatgctgaagttgaaactccaaaactttggccaactgatgtgaaaaactgactccttggaaaagaccttgatgctgggaaagattgaaggcgggaggagaaggggatgacagaggatgaggtggttgggtggcatcaccgactcgatggacatgagtttgagcaaacactgggagttagtgatggacagggaggcctggcatgctgcagttcatggcgtctcaaagagtcggacaagactgagtgactgaactgaactaaactgaaacagtgagagaagcttgggctattcaaggcagtaggaaaaatctgcgaaagccaaaaggagtgaaagatactggtgtgttccaaatcctgtatgacgtgctcctcaggtgggaatggaagtgtatgaagagctgttggtctggggaggtactatgggaccaggacctttgcatccgtgaagatgactcttttgcagtgctcacatgtatgtacgggaggctgtgcagtgtgcagggctgagaacccggttccagagtcggttttcctgggtgtgaagcttgtgaagcttgcctctgcactcatcagcttcactcctcacgtttcaccctgctctgcaaacaaggcttcatactccgttatctgtaattgcaaaagccccagaggtctggaaaccagaggattttttttttttttcatgaacctggcacaaagtcatctggcagctgaacctggcccatcgggcgggaggctgtctgcagccttcttattccaagtggggacagtcctaggagtgtctgcaggagcattaaggtgatggatcctttgagtgttagtaatctacccgcaatatcatctttctaaaatttaaaaattcgttaattctcaaacacatctgggccccaggactgtggaaaacggattgtgtatctgtggcatctatctcatgggattgccaagagggataaaaatcagtttattcaagtggagcgctaagaacagtgccagacagcacgtgggtgacaatagacgggagctccctgtgtcattagttggatgaactatcaaactctaacatcccctgtctgcagagttggggtgcagtgagcaaccaggagggaagagagccaactgcgcagacattggcctgagcttctcgggggccacatgaaagcaggcctttgtgtgtgctgtttcagagaccagcaggcttgcccactctggccagtgctcccagtgggcaccctgtggctgcagcaagctcggcctggcctggcatgtggcagacagcctgcaagctcctggcagcccgaggctgtcttgtcattctcttgtcctcagcaccagctgggacattcgataattgttcactgaattgaatccatctattgactctagaagcagctaagtcaagtcttgcttgggaagctacgttattctccagcccaagagacacgcacacaggcatacacacatgcacacacccccccacacacacacatcaagacccaacctatattttgacccactcagggctccagagaaaccagtttcttgaagcaatgctctttttcctcctgcttttctttattggagactttggagaaaggaccaggagaacaggctttgttttacgtcaaaggtcattccctgctttggtttatgatttctggagccgccttgctgcctgctgcccaccagtacaaagagcagaggcatggctggctgcaggggctccaggtgtggtcaccaaccttccctccagatgggatccgcccgaccaggccgaaagtgcctgccctcaccacttgccaaagcaaaaggaggcgcctgcagagacccttaacccccttgtctttgccttgacttgagagattcttgagctctgctaaaacctgtccaggctttttacaactgggacatgccaaatctgtcctctgcccctgcatttttacataggatcccttctcgcaggagctgaggtcatctgaattgaaaacaaaaccgcgcccctcagaaaagctgagcattggggaattaaccttgcattaatcaagcaaaaaaggggaaaatctgaagagcaagtcctccctggcagccgtgaaggtggagctggagccagccagcgtgggctatttattcttcacttctgtgggcctggcaggggaaaggcgctcccaacccgactcactgggagagagggaagctggccagacagtgacctcgtgagtgggccgagtttaaggggcctctggcttgtggcaggcccctgcccagggccataggaattacagatggtaaggaaatctcatgtgagcaacatactgtgagggcctgcagggatgggcaggggtccttgaagggtgaccttaaaataaacagcgcctcttcaaagacacactgggatggggccg

SEQ ID NO: 45862 - DNA, 2073 bp, Bovine  19866880641430
  misc_feature (1)..(1): n is a, c, g, or t
ntccgaccagtgatcaaacccaggtgccctgcattgggagcaggaccaccagggaagtcctggttcaagagatattgaggagccttgggttccagtcaccccccgagtctcagtttctgcctctgaaaagtggggagattatgtctgctatgtctattgcagggggacagggtgattatcagatccaagaggaaaagtccaggagctcaatggctggggtcaatgttgcaattggacagaaagctctaaggcaagggaaccaactcttgacaactcaaggtactaggatgaattagtgccactgtgtcattgaacctcagtctttgagagagaggcattcttgggtccacttcagagatgaagatactgaggcacagagaactcacccactgtggcgtcaggacagatgagcccagggagccccagtggtctgtcttatagcctgacccactggactgaagaagaaggagctgctgctcctttccagggtctccagggccatctgccatgcatcctatttgtaaaagctacaccacacactggggacagaactcacaccaactcaaagtattgctgctctaaggattaaataaggtgaaccagctcaagggcttggtatagaactcaggacacagaaagggctcaatatctcccaggcacttttgaaaataaaaatacaactacttcctctcctctattctttttttttgtcttctctctttaaattgcactgggagcctctatttctattaccaaccctaagattctaggtaaatgaagaacagattctggaagaagattaagttaactcagagaatccctacagatctccaaattttgtgatctgtctcttatccctaatacttcttagttgtatattacgatggttactgaacttctctctgtgctttagtttcctcatctataaaatggggtaataataacttccatagagttctcatgagaatacagagtaggtaaataagtatgtaggtaagtaaacaaataaatacatgcttagattaacacttgattgaaagcactacataagtttgcttttataatttacgctgaaaacacttacagagaacggctgtgtacttatagcccctccatccacacatcaagccattcaacgacttattatttattaaacgcctcctcgatggctggcacattcggtacttcacatctgttctctctgacagcaacaattcccaacaactgttctaaggtgctggagatccgaatgggaataagatgcccacatgccagcctcccacccctgtcactcccggtttagactaagatctcatttcacccaggtggccagtgaggcatcaggcaggccacagctttccagatggcttggtgcttcctcccccgagtctccattctcggtgggtttccttctctctggccaccatcccaagtagcacaagcagcccctcccagctggggcccagccagccagagccaggcactgggagaggtgccacaagaccagggttggttaatcttgcctttaattagcagacatgctaagtgatgaggcccaggggtgaccccacagatggctgcccactcagctttgagtgataaattggaagcatccaggtctgcaaaggtccatgttcacactggttcctgtgactgcgcttctcatacctgctgttcagtgggtgaggtgggggggaatggtggggccatccttggggccaaggtcccaaaggtgacacagaacaacaacactcagatcacacagtgactgtgagagttagatgttatatatcataatttcaagattccttgaaaactttgatgcaatgtgtgcgtgtgtgctaattcccttaatttgtgtccaattctttgagatccaatgtactgtagcctgccaggctcctctgtccatgggattctccaggccagaatactgaagtgggttgccacgccctcctctaggggatcttctcccagagattgagcttgcagcttctgcattgcaggtggattctttaccactgaaccactggagaagccctgtttgatgcaatagttaatgctaaatgtcag

SEQ ID NO: 45863 - DNA, 783 bp, Bovine  19866880654689
  misc_feature (1)..(1): n is a, c, g, or t
nttgttgctagtgacaatttgccagcctcccctcattccctagttttattgtggtggtaaatcagatacagggaacatctcaacacaagagaaatgtggccccaaagcctgcccaccatttatgtttcatgtctgactttcccagagtctaaagtctttgagggtcactgggatttatttgggacacttggccaagttcctgaacataactttttatagagtttttacccaagcctggttctcattgaattttaattatgtgcattcctactcttaacacaactgaaaataaacaacatgtgactatctttatcattttacctagtccttataaaaaccactccagtgacccatcacccacggtaaggtgagaaagccaccagaattaagctaagcaaattcacaggatttaatcacacattcagtgattcatttaacacacatttattgattcattcaacagtcattctttcattcactcaaagaatgttggttgaggacctacgaagttccaggcaccacagaagtgtttgggataaagcagagcacaggataaatccctgctctcatgaagctgacagtctagtggaggagacagaataaatcaggacactaatatcaaatgtcatcctgagtggcaagcactatgatgttcaagtttgggggatacaaagctgaatagttcatgcccctacagttagctgggatagtagtaaagacataaattgcaataataatatgatacatatgggattatggaattacatacacaatgcttatcaa

SEQ ID NO: 45864 - DNA, 1507 bp, Bovine  19866880740705
  misc_feature (1)..(1): n is a, c, g, or t
nctcacattgtggttgttgtttagtcgctaattctaatctgactctttgagaccccatgaatggtagcccaccaggctcctctgtccatgtgcttccccaggcaagaatactggagtgggttgccatgtccttctccagggcatctttcccactcaggaatcaaaactgtgtatcctgcttggcaggtggattctttaccactgagccatcaggcaagcctcacctcataccatacacaaagacaaattccagccagattaaaggctaaaatgtagaaagtaaaatgataaaactttgataaaacaaacaggagaatatgtttatgaccttggaagagaaaaggatttctgaatgagacatcacgagtcaaaagagacttatgagtgaatttcagctacgttgtgggttaaggacttcaagggtagagaaactaatcaccatgtttgacatggtttacacaggaaaatacttttcatattctaagagtataggactaatttataaatcctctatgcactcatttaaaatgtttaatataattttggttgtactttctaaaaatatctgcagctgttaatcaaagccaggtaaagcatattcacttaaagcagccagagggacttctctggtgatccagtggctaagactcccagctcccaatgccaggtgtcccggttcaatcccagggcagggaactaaatcccacatgcccacaacgaaagaattcgtacactacaactaaatatccttcatgctgcaacttaagagcaactaaggatcccacgtgctaaaactaaggactcagggcagacaaataaacaaatattttaaaaatttgttttgattgcagatgaggaacaagggatactcgtgtgctcttctaatggaagtagaagtagataccaccagcacctaacctatagtccagcaattctacttccaagtgtatttgctgaagaacttttgaaaataaatatcagaaggcaaagtatttatagcagcaatgtttgcaataatttaaaaaaaatgaaatttacccaaattggttgataagagaatgacttgttctttaaatggaatattaggtatgaagttggctgcctttcaaggtgagcaaaaaagcacatggtaagcaaaagtcacagaagactagactcagtataattctacttacataaagttcaaaaatacagaaaaccaaacaacatattggttggagactgttatgtgataagatcataaagaaaaataagggaataataaatataaaattcaggattgtggttacctctaggaagagagaggaatgagagcaaggagacacagagtgggcttggctacaaaggtattgtaattgtccatttttaaaccagctactgaattcattgggtgttcatggtattggtattctttaagccttccacatgtgttataattattactttacatatattcagtatccaataaaactgataagaaaattcaggtctttacaaatgcatggaa

SEQ ID NO: 45865 - DNA, 1461 bp, Bovine  19866880785591
  misc_feature (1)..(1): n is a, c, g, or t
ncttacactgtttctaagactgattacttatagcagtatgttaagctccaaatgattcagaactaggagtctgcctagcaacttcaaagatgaacgtctgaagacagcagagacaaatcaacttgcaaagtccttcatcttacacctcatctgccttacagtagctatgtgatttaggacgagtcccataaatgcaactagcctcagtgttcctatctgtaaaatgggacaataaagtctgccttgcggaatttgtttgggatggcacactgtgaagacttagtgcaaggcaggtgtccagtacctattgttggctctctaaatgaacaacacttctttgatcccatcccttgaaaactggagacaataattcctacttcacatcacactaaatgtgattgtaaaatatatgtatagatgtatctatatattgcccaggctgaaaaatagatactcaaaaaacaaacaaacaaacaaacaaacaactggctgatcatatcatggactgaatttagcctagttgatggaacttatcttacatttattacttaggaaaatttttaactaaatattttagttctttttgaaaatgatttccaaatgtgaggaaaatttagctggaacaaccaattagcatatttcctagacacaaatcatcttgtgcacaaatgagtcaagaactgagagaaaaatgcctaaaaatagcttagagacgcaggtgaactggcttcctttgcttccctgctcactgtgtgcgtcgtggcctggcaggtgatcacactcacatcccgaatggcaaggctgattcgtcaaactggacaaacccctgaaactgaaatccttggtgcaactgtcagagcagcacaccccctggtcactagaccctgcagtgaaagctctgtgctgggggaggggcctacagatgacagtggtccttggagttcatgttcagtctatggatttaggaaaggaaaagaagcatctggaaggtgatcagcatcctccaagggggctgactccagatccagggcaggggccagaaaagttggttatctctctgggcatctgggtttgatgttcgacttctaactctcacttaacatctgtgtgatgttagaagagttacctaatcttgttgggccttgatatctttctttgtaaaatagggaagcactattttcccagttaacaagagtgtttgttttgaggttcaaatgagagccttaagataaagcaatacctagatatgaacctccattattactacagcgatagtagagatttacactgctgctgctactgctgctaagtcacttcagtcgtgtccgactctgtgcgaccccatagacggcagctcaccaggctcccccatccctgggattctccaggcaagaatgctggagtgggttgccatttctttctccaatgcagaaagtgaaaaggaaagggaagtcgttcagt

SEQ ID NO: 45866 - DNA, 723 bp, Bovine  19866880839750
  misc_feature (1)..(1): n is a, c, g, or t
ntcttgtatcagtcaggttatgctagataatgcttcagtaacaaacaattcccaaatttcaacagcctaaaacagcaatgctttctttcttgtttaggtccaatgtgcaacatgggttgataggttaactacactacttgtagtgttcacttaggggcccaggctcttggaagcaccatcactgcacatgctttcaaaatttatgaggcaggaaaagcagtgagaacaaaagaacaacactctgacttttaaagttttcacctggaagttatacactcatatttcactggctaatgccattcatacaactgtatctaacttaaaagaacttcaaagcataatctcacatgtactcagaaagggaactggaatatttgtaaacaatcataagggctaccatgaatgtagcttctgctcctctgggagtgttattccataggaggacaatttatttgattgatagactctggaggagctgttctctccaagttcattatttgcaagcagtctggtcagttaaaagctgaggatgttggtgacaagcactgagagagcagcagagaacagaaaacagttgcttgagtttctggaccctctgatgtgtggcttaaatgagatacagatgaaaacttctccagaacactttctaccacccaaccccctggactttcaaggcttagccaaaactgacttcctggagaagacttaggggaccaccagacc

SEQ ID NO: 45867 - DNA, 1334 bp, Bovine  19866880862461
  misc_feature (1)..(1): n is a, c, g, or t
nccagtcccctcctgggactcatcttttccttcccctcctctgctttcctcactccttgggtgcggcgattctcctgcgttcggaggtgtcggttatgagctggaccctcctaccctgaatttctcggcggaggagctcggcggcgccgcaccgcgctccccttcctcgcccccgggatgggggtgaacgccgtgcactggttccgaaaggggctcaggcttcacgacaaccccgccctgaaggagtgcatccagggcgccgacaccatccgctgcgtctacatcctcgacccctggttcgccggctcctccaacgtggggatcaacaggtggcggtgagtcaaaatcctgtgggaaattgatttcgctgttttaatgaatcaagactttacatgccatcagccagacctgagaattgaactcttgcaccgccttgcccgtactgttttaattattgcaggtgctctaagcattaaatagaacggacttaatactgaggcgagagagttccggcagccagaaacaccttggccttcaggtgtgagttacgtgtctctgcgctcgtaggaattctttccctggatttatggagaattcttagtggtggagttaaagaaacacccttccagttctcagtggcccgtgtgttgatttccttggcctctgtggcatttgggattgcggtctttactgtttacgtttgtgtgttaactcatagtatggagaaaatcattcattcagtagagtcccctccaaatctagttttcttccaccttgaggttgccagagaaaaagcaagggaaacatttctttgctcagctcttcctctcaactcctccttgtggttggctagacaaagcacagtttttctttctaggcaaagtataatccttccaggatttagagcgcaggaagaaatcttagagaagctttatgatcttttcctgaaatgccaggccagatgattattaggccccgtggtggaaatgaaagcattgtttcaacagagtattgatcacctactgtatagcagggcttcccttgtggctcatctggtacaaaatccccctgcaaagcgggagacctgggttctatccctgggttgagaagataccctggcaaggggaaaggctacccactccagtataatggcctggagaaatccatggactgtatagtttttggggtcgcgaagagcctgacacgactgagcgatttcactcattatcactcacagccacagctttaaactgtataccagccacagctttaaacaccagggatacagtaatgaatgaaacaaatagaaattcttgtccttttctagcacatgt

SEQ ID NO: 45868 - DNA, 1925 bp, Bovine  19866880897784
  misc_feature (1)..(1): n is a, c, g, or t
ntatgctccatcaagaggtggtcccttaaaagatgggaggcccagttatcagttgaaagaggggagctgtggagacctccaaacacttgttagaggccaactacagaatccagtctccagtgtctgagtgtttctcctcttaggcatcccttccaattctgagagctccttcctgtcacagaggtaatggttcagaaaagaaaaagccactgggaggctagttctttgtaggaggagaacttgacataaagcatactaatagggactcagagaatatgtgttggggcctgactcaaggatctaaagctgggtggagaattctgaaggaaagcaatagctgactcagccttgaccaaaaaaacacaaggaaaatgccagaaagggagagaatgagcctgtttagtaaaaagatgggaagacctggcagatatgattttggttttattcacagaacttatcaagttccagtaaataaataatcaacttgtgagcaggttaaaagggcagtaaaggtggcctctggatttgtacctgtgcaggttttcaaagtatgcagttgttttctttaactgccttcacctctgtccaaataaaaatgaaagtcccctttcaattcccttttgtggtgaaggtacagttcctttctctatcctttgcttttccttcatagtgctcagaccagttaggatgcttcaccaggatattcttagaacagttaggttgcagtaaacagaacacctgactaagagtgacttaaataatagcagttacgagtcttaggaaataagagatttccgagcagtactggtgcagtggctcaacgatgtggtcaaatgagggaggcgtgccttgtgccccttcctgaaatttccttccatgtgaatgacactcagtcactgtaagtcctgttctctttcttcccttttaccttctctgtccttagtggggaggagtggctaaaatcaagctccccttggtctctcctgctctgggtgtgatctctaactagtgctaagtctgcctaacttgggggagtcaggcccagtgattcttccatgaagttacatccacatatttagcatttatcagcaaccaaggtaatactgttctccttcatctctgcctccattacccaaattctcaattggttcatggctcagaattggaaaaagggagttattcattgggctgctttagactccagcagatgacatcaacagcccaggtgtgttcactctgcctactctgctatcatccgtctatcaacaatgtgtccccttagtgtcacaacacggctgccacagctgccaatatcacatcacatgaatgcatcccgagcaggaaggatggggaaaggggcaaaagggattttcccttgagaatatttcctagacgcccccaggtgactctcccttacagcctattcaccagaactgagtcacatgtccactccagaccagtgactggcagagagaaatggaagcatcatgacagtttagtccaattcaactaagttatgttgagtcactcagaactgggcatatagcctcccaaacaaagcagacttctgttagtaaaagacagaaggaacagctcaataggcagctactagtgtttgttgcattgctgttcacaatttgtggctgagtatttattggtatggtgattctttaatgatctgactattctttctagcttaagtcccaggaggcaggatgggtggctgtgttgttagtgctgtgccctcagaacctactgtagaacattcctcaaagttggggctcaataaatattcatgggaatatgtgaataattacatgctcagaattgctgggcactgtagtgaataccaagagaaatgtcagacacattccttgtttttaaagactttatggtgcaaatgaggcaagattaacatttaaatt

SEQ ID NO: 45869 - DNA, 1338 bp, Bovine  19866880912980
  misc_feature (1)..(1): n is a, c, g, or t
ncctgacacacggtactcacggatactcacagacttagggacagagactgcctaatatcaagaggggtgggagagccctgtctgcgggagcaattttgcaaggatgtgaggtttaatgtgggtttggaatgtagctgcctgtcttattcacgccatacacacacgtgtgcacacacacactttccatttccttctacttctcccccccggaaggtccaggccactgtgacacaccaaggatatcactgtgacatgacacaattagaaagctgtgtgtggcagctgcagtcaaaggatggagcagggcgaggctgagcaagccgatctgccaggaccccaggaactcctccccttgcctggtctgcaacaaaggccaagggatgatgggtcagtattgtcagctcactgggcacaggctgacacaggacagacttggacaagtgtcctttgagattctagaagaattatccaaattcctgaagatactgagatgcttcttccaggtcgatgttacaatcctgttgataataacacatttcccttttgcttagtgtttttcactgacaaagtcgtcacttacataatcttatcagaataggtgctcagcaacagacacttattgggcatctaccatctactgtatgccaagcattctgctatatgctaaaggtatagccatggataagacagcaaggtgcctgccttcactgggatcaataaagatgtcactggcccaagaatcctacaaacaaatgccagctgacaacactgaccaagggaaagaaggcagctctgtgcaggcccatgagagggataatggggagctgacctggttaggtaggtgtgatgattgactgagacctgatggaggaatgggcttcattagataaaagggaaagagataaggaagagcattctagcagagggaagagcctgtgcaaaggtcctgacgcagaagagaataaccttgagaggctggcaaggctctattcaccttatccccatttcacagatgagggattaaaacccaaagaaccacacagcagaatcaggatcagaactcagacttctgactcaaaacctggttttgtgaaactccatggatcttcaaagcctccagcttgccttttctggggccttccatggtcctggctcaggctgggttgggtgagctggtggggatgggaggaaggtgggggcaggactgttctcacaaggcatttccgttccagatcagccagaagcaggaaatggcagagaacgctcattctcacaagactgcccaacttgtgtctaggccttggaggaggggtggggggagtagggagggtttgtgca

SEQ ID NO: 45870 - DNA, 2247 bp, Bovine  19866880935196
  misc_feature (1)..(1): n is a, c, g, or t
nttgtttgacagggaagaaagctgatgggatctgcccaaggtcaggcagcagaagtaagtggtagaacttacacctccaactactttatcttttatgattccggaactccagaaaaaagaaataatttggatgttttctaacagaaaaaaagctaatcaaatatttcctataaagatggtcaaacaggaaaatcttcgtgaggcagcaagtagaccaattttcgactccagtctttttttctagctattataatttgaagccacgcttggggaatttgacagtgggattacaggaggtcattacagagtaaaatgccttactttagtcaggacaggccagctgctataataaagaatcagtcactcttaccaaaataaaagtttacttgtcactttctaactgtggctattcctggtcacatggcagaatgcttttaggtaagtagtgacttaggtatttgcgtctattctatgtgacatctcagtttttgcatctgatctccgttgtcactgtgagcatgaggtcacactgcatgctctgcagacacacaccacctctcatttcattggccagaactagaacgtgagtctgggtgatgtagttcctggctgggtggctgcttcccagtaccaaggctacataatggaagggaaacatgatcctccgtgtcagctgtctcagctgtaggctgcatagtaatcaggcatgtggttcctctcagcctgctaaaacctagagaggcctagaaacattgttgcattgctgcaatctagaaagaaggcattctgtaccagaaatatttgcagaattggaggcttgtggcaccatccgcattggctcagataaaatggctaagcgaagcaaaagtagctggagccaaagaaatgctgtgaagagtctgtgcttcaaagatgcgctggtggttaatatttggtattcacttcatatgggtggttttagaagcactgtgtcatggaggcatcatgccagccatcttctggggaaacagtgcctcccctagtttaatgctcacccttttcagctttgcccactgccctctaccctaggaacttccctgtatgttctacattaaaaggttccattgacctctggattctagatggatttggctaaggggactccacacaagagactggagggaagggcagggacttaggcaacctcacctctcccccattcctgcaaagtccctctcttggaagttactgctctctctctataggcttcttggtctatacgattctcttttctcccagattctggcaatctctcctcatgtccctttgatcctaggggtagtaacaacccctttgttgctggcctaggatttctgcactgtctttgtggtctgcctacatcctaatcacgttttcattcctagttcctttgtagacatattattctaattttattttaccatttgttatttcttttttcttatctgttaacattgtggttccagccctgagcagaaggcctattctctgtgtaaactacaagaatcctttttcattgttcttagcatttttaaataagccttagagattcaaggctttagcttcccagatatagctcttactgggctttgctaagtctttgtactttcagtttgattctgtgtccctcatctctcttcttgcacatgccctttgaaaatctgagctcatcagcacactctccacccggtcacatgtccctcatcattgctccctgaatcttctaaaagaagaaattgctaacaaggcaagtggaacattcatcaagtattttcctttttgcagaatgaaagttccatcagatatcaaaaaagccgaattaggacaaacccagtacaggaggtaaaaacttgttttgaaatgtactgttaccagagaaatccagatacaccggataccagaattcagctgttttttgttcaattctttttcttcctgattattttagaagtctgcatttgatttttcagttttacctgtgtctatcccagttccaagctgagtcatctcccctcccccaactctctcaaatctccaaggaagattttgttcgatttccagttcctgctcctagcctacacttctttgatcctgcctagctaagaagcatcttcttctagccttgactgtactgaacccactcttccttttaatattcctcttctttttattttcctgagtgccagtgtagaataatggtaaacaaaaggatttttcagtcagatagat

SEQ ID NO: 45871 - DNA, 870 bp, Bovine  19866881004515
  misc_feature (1)..(1): n is a, c, g, or t
ntgccatctgtggggtcgcacagagttgggacacgactgaagtgacatagcagcagcagtgttgggtaaagcagggttgggggccactagaaccaagacaggaggagccaactagggatcaatccctacacaattgttacttattgtgtaaaaagcagagatcaaggctaaaaatactatgcacttaaaaaaaagagagaggttgcttttctactttattgttttgccttgttttctatgctattcctttatatgtaaagcagtgagtctcagaattaaggatttcatagatctagaatttctctctgagtggaccaactttgtgtcctatcaaaataacagaggcaaccattaattattaccagcgtcatttttgatttcttaaaagacattttgacatcagctcaagatcaagcatcagccttcaaactgtacatactttgaagttttttggggaaaacctgctactctgcccttatttccgtgtcattctgccacagacggtggagactgtcccctactcaaggataggggaccagagacagaacagtgatcagctgttcctggtattcaatctcccctatcccgccacttgggaatgctggtgactggagaggtgtctatttcctataattactgagtcttaatgtaatcaccgaagcagagagccagctggaaaggatggagtctgacatcccgcaaagagagacagctaaataagtcatacggcttgcagacagcctggctgctggcttatgtaatcacctccgcttggctccctttccgttggtccgtttctccgtttggccttttcgtgcttttgctttctgaggctgagcctctacaataggcagggaaaatattggacat

SEQ ID NO: 45872 - DNA, 1393 bp, Bovine  19866881006949
  misc_feature (1)..(1): n is a, c, g, or t
ntgggagcaataatgcagtacattacaaggctgtgcctgcagcagacagcacactgcactgcccatgagacgctaaataaatattgcttgaataaatgtatagggtattctctgtaaattaatctctctaggttgaaaaaaacccactggttggtaaggattacctaacatggcaggctaatgtattaagagattaatttgtgtttgttcttcctaaatctttccctccctgcggttacatcagggagccaggtagacttgtatgcctgcttacagggtagaagagctgaagcaatctggagctgagagcttctcccatcttttgttgaagcctcagccatttgaagaggaaatgccagtctcccctaaagagaagggagggcagaaagactctggagagagaatgacctgcccagccagggaggggagcactgatgtgaattcttcatacacagagtcccacacttggctctgtggcctagtttagaagaaggaagagcttcagggaggctggttgcttggtgtgcctgaggtaccatgggcccctcagtaaagagccccaaaccctatgactgacccagaagcagggacttctggacatcaagagttccccctgagcttggacagtaaggacgcatgaccacttctgcctcccaggttctattaactccttgaaacatgaaggcattcctgtaaggtctgaaattaaattttccacatccaagagaataaggatctagtgtcagaattaaggtgatttaaaggagataaagaaaatgctattttctgtacacccgagttagagaacagttattcatacctattaaagtatgaaaattgtagctgggaattggcaaattaaggctctttgaaagattaatgtaataatagtatttaaatatttcgattgtaagtattttcacgtgaaaccttataaatccatacaaaggcctgcacacagcactaagagaaagatgctaataaaaaaataaagccctttcctccccaccttccagggctggaggtatcttttgtaaagcccacacaatcctagattgtgaagttaaatgagcaatcatggctaaattatgcaggctcccagctgtgctgtgatgtttgcacactttctaggaagtgactaattataattagtgcttaaatacaaaagacataccgtcattacaagaaaagcagaaaaataaatcttacatgtgtagacccttggtctcccagcactggctgcttgcattcacttgtgctgggctgctagctgagtgacaggagggaaatgaatgttggttttcacacttcatgtgagaagatggatctagatgttcataggtcaaatgaggacaccagacacagaacaattcccgagactaagaatgtgatg

SEQ ID NO: 45873 - DNA, 772 bp, Bovine  19866881137579
  misc_feature (1)..(1): n is a, c, g, or t
ntgtaggttacttaaagcctctcgcagattatttttatgctgcatctagtacagaggctggtgcctgctagcactcagcatgtttactgcgtgaatgaagcggtagtgacaccaacaactagactttttatattgcttttgttactgttgccccataaaaagaacttttacctgccaaactatggtaatttatatgcattctgagcaaaaaaaaaccccaaaaattttacttgtatccacttacatttttccacagggatgaaaaattacacatgatctaataaattcgtcttatgtagaaaaagagcatggcaggtcacacagaataccttactgaaatttacttatataattaactctgtgaaaccttgggaaataagtatttctaggctaagcttatctgtaaaatacagaaatgactgttttcttacttcaggaagattttttaagaaccaacagaatgtctatatatcacttggcttatgtgagaaaaaggcaccacattaacacaaaggacaatacacaggcaaacagaagtttcaaagtctagttactttctacactcccgtaattaacacctgactttgcgactaaacctgttaaggatgatgaccctttctatcaatatctccaaaagaaaaaggctaagcacactcacaaattgtaaacaaggttgccatattttccttgtttgaattggagtcttccatttgcagtgaaggcggtacaaaagaaagactgtctgaagaaacatctacatgacctgtcccca

SEQ ID NO: 45874 - DNA, 1022 bp, Bovine  19866881389625
  misc_feature (1)..(1): n is a, c, g, or t
ngggtgccgatctcttttttccatgaagtaaagttttaagatctagagtgaaccgagtttaagatctagaatatactggatggctgtccattgaataccaactctacaacaaccggaaatggtgagggcaaaacaacttatgtgcccaaaggatcttggatgaggacatctctccatatttgggtatctgtttcagaagacacacaagaaaaccctaccctagacctcttatgtgggattctccataagtgggatccaagcaagtgtcatttggaaccacttccttggtggctcggctgcttctttccactggttggaaacccctagactctatgcaagcactggggtcacacctaagggaagtttctaaggtctcacaccagccacgtcttaggttcacgttatgacaagtataaatgaaaaaatccacaaaatcatagctcaggccccacctttgagccattgggaacaacttggtaggtttgccactctgtgtgtaaggctgcatgtaggtatgtgataagttcatattggttaaagccaggccatatagatcattccatatagtattttcattcatatgatatgaatgtgctgcatttcattgcaattaaccaatatgaatctctgggggaataggcatgccgggagaggtacagatttgcgtaatgaaagaggtacaattaaatgtcagatgtggatagggaaatacgttaatacctgaactacaggaatatgtccatgcaacacagcaaaagtcagagccgtccaatggcgggtctcagggtggacggatggatatttatgaggagtactgacaacctataaacaaattgaaattattttcaaaatgtaaccttcacaatacttagactagcaaatctgacctatctgtggctgggcacgcgggctagagatgtacagaggatgtcctggaaggcgccttgggcaatgctggagacatacagggtagtgactttatatcctctgtgcacaacaaaaactccttttgctgctcatta

SEQ ID NO: 45875 - DNA, 696 bp, Bovine  19866881393141
  misc_feature (1)..(1): n is a, c, g, or t
nattcgttgtctcctctgtgattgactacagcaggtgtatctgttagtctcaccataatgatactgagtaacaaacaaccctgggtatctcaatggcatattaaattaacacttgcttttgtggggcagctccaagctacagattatactggatcggctctgtgggtctctcaccttccttacaccagcaggctaagcagggtgtgtttttctcatgacaatgcaaaagcgcaaaagagcaagttcaactgcacaggtgcttttcagacgtttggttccatcatatctcttaacatacctttagccaaagtttgtgaaaccaaaagtcaaggagcaagaaagcacactctgcctatggaggctgtggtgatgacaggaacagtgaatatttctgagtagttaatcgaagtaagttctcaggttctcactaaatgatcatggaatggaaaggacgggataaaaataattggactccagggatctcccatgggtattcaccatacaagctacaaaagcccgtggggactttttagctcctgaaatacagctctatggagaaagtcagagctttgtctgacagataacagcccaaccacccagagtggaatttgctgggggaagtaaagcgagccctcagaggactgccaggaaaagatgtcttccagggcgcttggggtggcagctgcctcgggaagg

SEQ ID NO: 45876 - DNA, 1681 bp, Bovine  19866881422873
  misc_feature (1)..(1): n is a, c, g, or t
nggtttcaggtgacgctgcttattttcatcaagctgaagagggccatgttacctgccatctgcccaaaaggactctggttatgggttgggagctgggatggctctgtggttgcagaattctttctgctctaacaagattgaatgctgggaatctgtacctggagaccctgtccattagttgattaaaagccatagatcagcatgcctgggacctgccagtgccattatgaataagaagtgtcaggaaatctttcggcataaccaatgtctttgaaatcgccatggtgacagttaataaaacttccgagtctatctttggacaagccggctctgctgccaggcagtaaaatttgggacagcttttgaagcagtttgtatttagatgagccgtgagtgccatatctcaaagtcccacaccctcagattaaaaggcaccatagccatcaacaacgaccttgtcaaacagctattccaggctaatagaaggggttgtgaacaatattaaggtcttcccaggattatggagagagagaggcgataagactacctttctggctatttacatgctctctgcagccaaatgactgtccatgttcaaatccaggttctatcacctcctggctgtgtgatattgggctacttacacaaactctatgtttctgttcttcatctctaaaggggataaaacttagtaactacttcaggatgttgttgtcaggatcagatgtgttaatatggatgtcttaacccatttggggtgctaagacaaaataccatagactaggtggcatataaacagaaaattaaatctcacaattctggaggctgttagctcgaggtaccggcagagtcagtgtctggcagggactggtctcctgcttcataaatggccatctttctgccataacctcacatggcagaaggtgcaggggagctttcctgggtctctttagaaaagtggaagttttactcatgtctgactctttgcgaccctgtggactgcagcccgccaggctcctctgtccatggtattctccaggcaagaatactggagtgggtagccattcccttcttcagggaaccttccctacccagggtttgaacctaggactcctgcattgcaggtagattcattaccaactgaaccaccagggaagccttttataagagcactgctgctgctgctgctgctaaagtcgtttcagtcgtgtctgactctgtgtgaccccatagacgacagcccaccaggctcccctgtccctgggattctccaggcaagaacactggagtgggttgccatttccttctccaatgcatgaaagtgaaaagtgaaagcgaagctgctcagctgtgtccgactcctagcgaccctcatggactgcagcctaccaggctcctccgtccatgggattttccaggcaagagtactggagtgggttgccattgccttctcgagtcataggagctaagacagggagaaaagagaaaaagaagaccccagagctactttgaactccacgtggacagaaatctcccatcggtactcatgattttgatgcctcttcctaaaataagtaggttctagagtcatcatcaggatgttagtgagtattctcccccttgtctggagagcaggaaggaggtggtggtgtaagtgtgccgagggcaatgcccacatttg

SEQ ID NO: 45877 - DNA, 1656 bp, Bovine  19866881463103
  misc_feature (1)..(1): n is a, c, g, or t
ncaacttttttaagctattataaaagaggagtgaggtctccgagcccctttcctgggagaaggccactgaagggttattgcctgaagttcactctgagattttttttttttcatgtgcatctcttaatgtgctgagtctgtggaggagaatgttgcctccgagagaaggtgcaagaataggcaagaagcacagtcctactgagaggctttttaattagcctcatccacagatcgatttgcctttcctatttaaacctaacatctctgtagttttagagaagtttgccaatttctctaaattgcatgcggtaaaagaaaaaggagagatttgtccccaagtgagggaagggatttcccttaaacacctgaagcacgaggacttctctactgggaccttccatagcagaaggggttggttggcaagtagccatcagataatatatcggcacctgaagccagtaacccctctgtgcttctttaataaagagaatctgcttaaactttctcagaatttaaggcaaagagaaaaagcctgcaaagctctactgctcagagaaaatgtaaaaagtgctgaaatgacttagagaaatgggaaccgtgggcttgcaggcctagcactgaaatcatctgaaagaccatcccagcccccttgtaacagcggcacactttcatttcttccgcggaacaatatatgtaaaaataaaaattgagctgctccatcaaagccggaagtggcctgagagtgccccccaccctcctgagtctaaaagtgaactatactttgaaagctgtagatctcatctgatctcttccttcacatacggaaaattgatggaccagagaggctgttaatcacccaaggttattcggcacacgtttagcacttactcaggctcctgacaaagatttattgagtgcttacaatgtgccaggcattgttctgggccccaggctacagcggtgcataggacagactaagtccctgcctaaatggtacctccattccagtggagaagacaagcagtatacaagtggaaaaacatgacattgggtagtagaaagtgctacagaataaagtcaggcaagggaataagagtaagcagggcttattggtttcaataaaattgacagttcactcaccataagtcatctgtgcatcactctgtccaaggaaatgaaatatatcgattggtgccctgtgtcatgttctcaacctagaatcaggggtggtggcagaaagactacttccccttccccccagaaaataattgtgcatcaatagaagaaggaaaaatggatgccgtgtaggcaaaaataaccgatttacactacccgggcataataagattttttttttaaataaatgagaattctgccctctcgtttttcttgtgtcacacaatatgctttcctggagacacaaaaaagtaattgtagcaatgagaactacaatatgctggataccagttttcaaagagcttccccatacatgatccagctgcagagcaggttagctccatgccaagaaaaggagcttgagcctgaaaagctgacagtcacatgttctctagccacctgatgagcccagtgagaacagaaagaagcccagtatttcgtgcattcagaagggatagagccctgtattgtgtaggcaga

SEQ ID NO: 45878 - DNA, 1129 bp, Bovine  19866881496815
  misc_feature (1)..(1): n is a, c, g, or t
nttataaaggccaaatcaataatagtgatggtaagagccataataataactgtccttgaaaacagggtctctccagttacaaagcacttctgccagcatgctatctcatttcctcaaggttgcgttgttgactggaaatgttgctttcaggagcaggcatggagccccattaaccatggggctaatggaattaaattgggctgtgctgtggcaccttcagactcagccagcacgagccttttatgcaagggagtgaaacggaccctgattaggccaaagggtctgtttatggagttgtttttcttggcagctgccaacctgcatgaagcaggatgtaaatcgcgtccacagcctggtggaagccctgctcccgggtgcagcctcagttgcaaggggctcttgcccgcgtgtgatgttaaacagtcttgcagggaggaaactcaaagccatctcatttactaaaattcttctgttcagcatggaagggaagtgagctggcccctgggagcctccttctgggtcagattcagcctgacttggcctattttgagccacgaatgaggcttttcttcttttatggggaaggggcaggcacgtggagaattccccagggtctgctcaatcttctctgccaattacagtaactcaaggctaacgtggctgggaagctttccctagccaaaagtaaatacaggcgttcgattcctctggggctgtgccttcctgtgtaggtctctcattcaactagcccccacagcaaacatttattgagtgcctaccacaagtcaggttctgatgacaagaacccctccaattagtcctaggcttgatggcataagtgcccttccatgagcacttggaaagctggggaggggggtgcacggttttcagcattgggctcatgctccaaacactaatgggcctttccttggggctgggtgatttttagggaggacccaaggccccatagcagggagacagttaagagatcaggtctggaagtcagccaggcctgggtctgaagttcagcttggccacttcctctacctgtttgtccagggggagaagagccacctggagagggagctgggaggcctgaactgaattagatgacatggggcatggttct

SEQ ID NO: 45879 - DNA, 1222 bp, Bovine  19866881498016
  misc_feature (1)..(1): n is a, c, g, or t
naaacaaacttaattcatcaataaaggtagcattcaagatactgaggctggctatgtaagatgtttttgtacagctaggcctcctgacattcatctcacagatttttttttaaatttagcaaatattggcattgacccattatgcactaagcactgttcaaagccctttacaaatgttaaccaattcagtcctcataataacaacttttatatctacatgcctattactatccccactatgcagatgagaaggtaagagacttgcctaagatttcacagctgagaggaactgagcttcaaacccgtcggcaatccagcttcagaacctgtgctcttcaccatatgtgtggctcacagaatcaggcacagtgctagaggatggaggctcagtgaaaagtaaaagccccgacattcttggggcttatattccactgcagggagatagcaatcaacatgcaaatcagtaagtatagaataccatgggattataagtgctaggaagagaaataaagcaggataagggtgctaaagagagatggactggtgagcttttttcagaagactggttggaaaatctctctgaagagctgagacctaaatgaggtcaagaagaaagatacaaaaagtgaaacccagcaaagcgggtaggaagtagaaaggctctgagttcagctgcatgcttggcaggttcagagaagagcagtgcggttagagtagacataagtggatgcgtggtcagaagacactgaagagactgccaatggttatcatatgtagaaagagttgggcttttgttttaagtgtgataggaagccatttacagatttttaggaaggaagtgatatgatgtgatatccagacatgttgttgagtggagaataaacattggggaaccaggaatggacacagggcagccagttagggtgctggttcagtaaccaaggccagaaatgatggtggtttgtacagtggtatcagcaaaggcagtatgcacggtcagatttgagatatatcttgaagatacagtttgcaggacttgatgccatcttattcatttatttgttcatttattatccatctctggtggtaggaaatgacctccaaacaggcaagaactttgagtttttgttctgtctgacttttcatcactttatctccggttcctaaaatagtgcctgccatacaattggcactcaatatatatttgttatgtatttgttta

SEQ ID NO: 45880 - DNA, 1009 bp, Bovine  19866881727402
  misc_feature (1)..(1): n is a, c, g, or t
ntttcttgggtccaggcaagtctgcgtgaacagactctagcaatgagccgagatggctccagaccctaccaccaggttcggccacctcagctatgttaccacagggcctcgtgggagggcaaagccccctcatttacattgtagtctccaaggggatttctgaggtttagcttcttccaatcctggtatcttggcatagatggaggcctctgggaggtcaagagaaatccaggtcatatccattttggaagctccaagtataaaaataaagaaaggcagaaacaagattacaaaaataccaattaattttaaatacttgcatataaggaattaatatttctacccctgaataatagaatgcaatatacttgtgctcttcgcaatataactacaatgtttataaaattcaaatgttatttcagagtgccctgcaaacaaggttgtcccataataggacacaaccttataggtggacagtgaaagtcttttcttcagtcttgttggtctgtagctctaaatatactttacttggaaaaatattaaagatctaaatgtacagctctttgaggctatgtcattagcagtgaaagttcaaagacagaaagtaatagttaaaacatataaaagcttacctatgtatgtatgtatctgtgtaactatatatttatggtcaatgcatataagtactggatggcctaggtaatattctgagttaaatcaataataaatgaatatcctatgttgttttcaattccattttacagaagggaaaactgaaatggagtgaaatcaagtgatttgccaaaggtcacatactttagaactttaggtatgttcgtagaatcaggtatataagtaaacccaggattcaggctgagggaggtggactctggaggccacacccttaagtcttgtgatacatagcctctcaaaaggaaagacaggggctcaagaagatgtgcagaagcactgaatggctttagaaattctagcatcagtgtgactggat

SEQ ID NO: 45881 - DNA, 1058 bp, Bovine  19866881850509
  misc_feature (1)..(1): n is a, c, g, or t
natggtattgacgtataataatacatgagtacacgttaattatttggctcaaatacactatgggaataattttcatttttaaatacttaacttttctgcttccagtgtaaaggatttagcagttcctaatttttttccccaaaggcatattttcagggttttgttggggccagaaaccattgttcttccccttcacaccacatgccacaacagggaatatggatcagtcttgactgattcgtgggaaatgaagtagagaaggacttttgggaagaagggaggtcatataaagagaaatccagggcataagaaatcaccaagatggttaagaattaagtacacctactagtacagaaggtgcctgagcatcatttggcaaaagcaagaattctggaaccagactgctgatttcaaatcaccacataacagctgcatgaccttagccagtgttattcaacctttatgtgctttccttctcatctacagattagaggtcatactggtgattgcttcagaggcattgtgtacatcacatgaattaagatatgtgaagtgcttagggctgtgcctggctcatgacaagtctcaataaaggttctctatacagtgtgtatataccatgtatttataacacatatttgaattctaatgagactttcatgcccattaggagggctattatataagtcagggttctccaaagaaatagaaccaatacaatttttataatatagaaccaatacaatattatatatatatatatatatatatatatatacacacacaggtatacatatatatacatacacacacgtatatatatatatatatatatatatatatatattcccaaacatatatatatataagtttgggaactgagtcatgtgattataaaggctgacaagtccaaaatctttagggtgggccaacaggctggaacaccaggagagctgatgccacctttccagttcaaaacctgtcaggttggagaaccaggaagagccagtattccagttctagtccaaaaaactgactgctggaaaattcccactggt

SEQ ID NO: 45882 - DNA, 1340 bp, Bovine  19866880442123
  misc_feature (1)..(1): n is a, c, g, or t
nctcacacacacacacacttcacacgcacatacataactaatcactttgctgtatacctgaaactacactccaatataagataaaaagttctttctttactcccagaaatgaaagctttgatggtgagcccagcctagaccaacatgctcacaagtctgatgtcacttttaagcacaaactgaacaaactattaaacttcagatttcaactttaagacattcaaaaaatagttaagggaatctcatttgcatggcttgaaaataaattgagaagagggtaaattaagagacagaatgacttcccagaaatgtacccagaggtgaaggggctgaggcttcttcttacagtcatcaaactgggtaccacaagaagcttaagagtttctacagtggagagactgttaggaaggaaactgacaaagtcttaatagctaactatgggctctctcagggagtaccagagaagagagagggatatggcagaactctgtaaatttccccccgaatctattgccatgttaaagcagcataaaaccagcgaaaaaaggaggctcggaaaatgaacaaagtttatttacaaccacctagccttgtctctgctttagaagctgagatgtatgaaagaacaaaggtccttgcattcccacctaccaaatagcaggtcaatgatctttctggttctttgcttaagaggttgtttacttttaccctaattgtgtcccctagattattagttatttgcccctcccagattcatgcaatcattcatgcatttgttcagacatgcattcttatatttcatcactcagcaaatacttatatctatcatgtaccagacactgtatatacgttttcacaaaaggtagtgcatataaacgtaaaataaggcaagatttagggtagagcttctcctatttgcagctgagattaatttgtttatagcatactttgactactgttagctaaaagtcccagcttcaatgccatccataacatatccctccatcttgtccacaagtgtatcaaaattttatacactttttaaagaaaattgttttggtatatgatcaaatgtccaagtccctagaactcaattggcataagtgtaaaataaatagtacatctctccatctctcctatgctgtggatctcactccacagaaacaaccaccattaatattttctagggaggagttcttaaatgagcatttttgtagtatcatttttaaggattaaacaataaataattgcataatactgtgataaacaataagagggaaaaaaatgttgggaatctccaacatatcgaacagggaatttcacatttcaaatcccctatt

SEQ ID NO: 45883 - DNA, 2318 bp, Bovine  19866880666628
  misc_feature (1)..(1): n is a, c, g, or t
ntctatatttctgtttttgtaccagatcttttagtcctggaaaatgaccagcttctcagtttaatttttttaatataaatttatttattttaattggaggttaattactttacaatattgtattggttttgccatacacctgcatgaatccaaaatttaaaaaaaaagtcacacaaaaaatcaccttgggttctattggtcataatgtgattatatgttcatctctgaatgaatttcagtgataacagagaaaaagaagtaatatgattaatttaagccagtctggacccacatctacaattgaggatggggtccatccttatctaattataaaggtgaaaatggaaaagaggttaatttctcaaagtagaatcaagacattatgaatagttggagagaaagaatagtttacaatgaagcatgatgctaataaaactactcagatttgcatacccctaggagtatctgattttgttagcatttgaaacctgcatgccccaaactgctataatctgatgtccaaattctcatgctttgtaaaacttagttttatgtaagtacgtattccccacaaattatagttcctgagccagtttcacattagttataatttgcaagaaggcatgattacctaccttgtctctggtctgcctttggcctggtattcaacatctgactgcagctctttgctggttaatatgcatccctgttctgcctgatgggaggcttatttgtggctctgttccactggatcaatccttgtccttgcctgctagttgaccatccttaagaaccaatgatctacttttaaggagccatctagaccatgggatgtcatcccaaatcaatctctgtgactcgttacttcatttattagttaaatgttagtcactcagttgtgtctgacactttgcgaccccatggactataacctaccaggaattcttcaggcaagaatactggagtgggtagccattcccttctccaggggatcttccagacccaggcattgaactcgggtctcctgcatttcaggtgggttctttactgtctgagccaccagggaagatctacttcatttataatgggaaataataacattttgtctacctatatatttaagatgacatcagatatagaaatggtatttaataatctttctagttaatttatagtatcaagttaaaatgatccatgtgaaatttaaatattaaaggttcattagatgcaaatactgatgtttgtaatataataatatgaccctggagtctgtggtatgttttaaaacaaaagattattgaaaatagaagtgttattattagcaatagtgcaataggaaagtggtacaagaaatgaagaacttagagtggtgggaaatttccttggaaaaagaaaaagggggagatttaaaaatgcagtctctcagctcatgatgatggatgaatcttttgaagctgtattacaagcacaaggtggcaatggcatggggtgagcctgcgaatgagactagagattttgttggtgaggattcccaacacactttggaaaagggtgtgtggatgccatgctttcaatctttggatttgattctttgggcaggaagccttagtaaacatacatttcatgggaacctaggaggatcatttgccctttggaatgaagttttgatggacaaaactttgtttctcagggtaagatgtggtttaaaacatcctggaaaaatacacctacacctgattcattggggcagctctggccaggatacagtttcagcttggcttgagctggcagtccagatgttccctgagaacacagcatatccccctggctctagaggaatcactcactatgcttaacaatccaaacaaaaccttctttgtgaaaggggaagggagagtcaagttgcgatcccagcccagctgccagtccctcccagtttgggaccctttcttgctctccccagagctccatcaaaagttgagcagaaacatttgcctcccagcactgactgtgtcagaagtctgacagcttgtttttatatatattttgttacatttaagtatgggtactgttttaggggagaaataaagaaataagatgaaaagtccatttgttggctttgctttgtaattctttctgtagtcttttttttttccagtcctagccaaggcacaaccatcagatgactttattccaaagaaaggcttatttgaggagtgatccatagaaaggattagaaagtaggagatatgatgagcgagtttggtatctagaaaaaagaagttcttcctccaagtaaggcttttccttagacccag

SEQ ID NO: 45884 - DNA, 1595 bp, Bovine  19866880702039
  misc_feature (1)..(1): n is a, c, g, or t
nctggagtgggtagcctttcccctctccaggggctctttccacccaggatcgaacccaggtctcccgcattgcacgcagattcatcaccagctgagccacaaggaaagcccaggcatactggagtgggtagcctaccccttctccaggggatcttccctacccaggaatcgaaccagggtctcctgcattgtaggtggattctttaccaactgagctatcagggaagcccttagatatctaggcactaagtattcaaaagagaatgaatcaggcatgaatttttatttaagagaaagagaagtaattgtcttccaggcttacaggaagcttagtgaaaatttacctggggattgaaaattatatggggtttacctgtgcaatagcgcaccctcccaacacaaccatcctttaaaatatatatatatatttttaatttatatatatatatatatatatatatatatatatataaaacctaggccctggtagtgaaagcactgagtcttaaccgttggactgccagggaattccccaaacatcatttgcttaatattgtaaacatttattttttttgtcagtgcctaaaatggccaccatcagagaaggcaatggcacccgactccagtacttttgcctgtaatatcccatcgatggaggagcctggtgggctgcagtccatggggtcgctaagagtcggacatgactgagcgacttcactttcacttttcactttcatgcattggagaaggaaatggcaacccactccagtgttcttgcctggagaatcccagggacaggggagcctagtgggctgccgactatggggttgcacagagtcaggcacgactgaagcgacttagcagcagcagcagcagcaaaatggccaccatggttagttaacttaccccactgggctgcctggtctccccaacctccactccctacatagggtctcaagcccagcacatctactactaaagtggggcaaaatgaatttttagcagttcgggccatcaattcctttaaacctgatttgcagtggttgccaatctttctattactgtaattgctggctaaatgaactataattgtattaagaagtaactctgaaatatgtatgcgctctctgctaattctcagaatatgcagggagaaaggaattgattcactgtgcttggaagaaccattcagaaatgctccctctgggatctgttagttggaggcctcttttgcatcctggggaaagtcaaggccagatgcccgagaatctaggagatggaacaggaatttcagggggttcctcacagcatttcaggttggtggcagaaatttctcacaactgtcaaaagagctaaagatcaagtcggaattctctgtggtcttggacacaactaattctgattaaagctcatattctgattgtttataatgctaagagctatgcaggagcttttcaaatattcctttccttcaaataacctctgcagtatgatacagcactaaagcttggggatggtaaatggcttgtcagtgtccgcttgttggtaatcaagaaaatggactctcaaaccccagtccactgagcccaggtcca

SEQ ID NO: 45885 - DNA, 911 bp, Bovine  19866880737974
  misc_feature (1)..(1): n is a, c, g, or t
ntgctgcccaaagactcctgggaaacaatgacactgacatcccatctggcgttattactttttaaacacactgtgagctttttatgggatgagcgcattgagtctatggcccatgccggaggcctgtgtcttcctggtagagagtagtttctcagggctacccagatgagggtaaggatgcctttgaaaatgctttctgtttaatgaagtcccaagaaggggcctggctgcctctgtcttccttcaactgctgcttgaggctgtgtccgatcccagaataagcatccccatctgtgttattctgttaactgaaaaggaaggaattagcacatggacttgtcacatcttatgacctgttgcacactgagatgcgaggtggcggcagaacaaatggcattctttctctctgcacctttcagactcactgaggagacccagaagagcaactctgactacatgaaacacaccaacgccatccctaaaaatcagatggggcctctccaagctgcaccttatgcagaactgatggggaaggggtggcagggcctcaaaggaaacttcccctctctgccaagctccagatggaggaccttcccacggaaatgcttgctggaggcgctttgctgacacagagtgctgccagggaaaagggcctctggtggggctactcttgccctttctcacgggagaaaaccagaacactctgaaggtgggaaaggccctcaaaggccaggtcttgacagaggggccggatgggaggtccctcatgaagcgtctcagggaagttctgatcctggactggtggcttgccactgactcctggcacaaagattttcaatgcaacacgacaacacactgaaggtgtgtttgatctgtgtttctgttttccaaggctttcacaggaatccaca

SEQ ID NO: 45886 - DNA, 5066 bp, Bovine  19866880744579
  misc_feature (1)..(1): n is a, c, g, or t
ntacgacgctcactcacagaggatttatgagaaatgaaatggaaactctttcagattttattaagagatatagtcttcctgcataacttctttccctcctggacatttatgaatgtttggctggaagggtggtctgggagcttggttttgatatatgtggttcctacaagaaggtgccaagggagacatttttccatcaaaagccatatgcatgaggatcctggaaagtcttccagcaacagtggacactggcaataaaaatgatctaggaagaaaacacgccggcagtgccagtcactgcagatgctgaaggaccaggggccaaatacgtaaataccttcagaactttgtgtggaaaacaaagcgggtttaaatcatctttctcccagattcagagtttttcaggacacagtcacagctagagaacggccagcacagtgatttggtaatacaacctccaagtgtactgttgaaacccacaagagacaggaaatgagaaaggtgtgtgaccttgcagtcatggactccaccacactgggcccacgccattgctcaacaaatagactgagggacttccctggtggtccagtggttaaaactctgcacttctactgcagagggtgcaggttcaacccctgctttgggaactaagatactgcagggccaaaaaaatccccaaatagactgagcttcccacaatgccatgggcaggatgacctgagtgtaaccaaggtagcctcatgtctctcagcattctttatggtgtatgtggtttgacactaatcttaacaaaactcctcaaagcaggaagaaaaaaattgtaatggagtataccaagcaagcaagcaaacacagaatacacacacaccactaccatcatcatcaacaacaacagagtgtaacttttgtatttctcttttatctttctttccaaattaatcttgaactatactctccttccccttctgaacatagcacccactgataatttttggttccttgacattcctatttgccacaggaatttttgcacaagatgtttggaaaatttttgatttgttttcttgatgcccattcaacttctattcatcctttagacatcagttctgacagcagcttcttaggaaatctgtgatacccgactcatacctcctacattaggttacattccttgtcatccataggcacagttttgtattcctgacacctataggacttattataaacatactgtgtatgtatgtgtgtgatgattatttgattaatatttgttttccctacaggctgaacactttccaaggaaaacaactatgcctgttttcctttaccattttatttttagagctttttctggaattgggccagaggagcacccaataattatttgtcaactaagtggctaaatgtgatgttgtgatgtataataagaaatatatatatttcatattcatccccatttctggagcagagctaacccccttggaatttcctaagtgatgaaagtgataacaatgtctagttatgtgaatgaggggacttttggaaagtccctgaagatgggagctggttcccaaggaaaccaacctgtggttagagggttggaaccttcagtaccactccctcaacctccagggagtaaagagtgcctggaaattgagatcagtcaccaatggtcaatgatctactcaatcttgcctatgtaattaagccttcagaaaaacccaaagggagaaggtccagagaacttcctggttggttactattgaggactggggagaatggcccatctgaagagggcgtggaagctccaccctccttccccatgcattgtcctatggatctccaaccctgagttacatccttttctgatgaactggtgacctagtaaataaaatgtttctctgagttctacgtgctgctccactacttggttgaacctaagaaagtggccactggaacctgcaacttgtagccagagggtcagatgcacagaagataaactgggcttgtggctggtatctgaagtctatgcgtggaagtgagagcctggtgtcaaaatattatttgctgagcacgttgccacttcctggcaagtgatgcaggtgctgcttatctggaaaccagattttcagaaccagtgaaccaatggtgttccattttagctgtacattatagaatcacttggaaggctttaaaaaaaattcagttgcccatggggcttccctgatgactcatggttaagaatctgcctgccagtgcagaagacacaggtttgatccctggcctgggagtcacatgccatggagctattaagcctgtgtgccacaactattgagcctgtgctctagcacccgggagctgcaacttttgaccccatgcactgccactgctgaactatatgttctagaactcgtgctgcacaacaagagaacccacggcagtgagaagcctgcttgctgcaattagagagtagcttgctgcaactagagaaaagcccatgcagcgatgaagtctcagaaataaataaataaatgaaatcctgatgttcacaccataccccacacaaatgaaatcctaatcaatggggggtaggtctgagacatgagtatttgcaaagtttcctaggtgatttctggaccataaagacagctgagtgctgaagaactgatacttttgaaatgtggtgttggagaagactcttgagactcccttggactgcaaggagatcaatccagtcagtcataaagaaaatcagtcttgaatattcattagtaggactaatgctgaaactgaaactccagtgctttggccacctgatgcaaagaactgactcgttgggaaacaccctgatgctgggaaagaatgaaggcaggaggagaaggggacaacagaggatgagatggttggatggcatccctgactcattggacaggaatttgagcaagctctgggagttggtgaaggacagggaagcccagtgtgctgcggtccatggggtcacaaagagtcagacacactgagcgactgaactgaactgaactaggtgatttcagggagcagttaaggctaaaaccatttgtgcttgctggagttcattttctctcctccttctagaataagtgaggagagataggccagacaaagacttctgaaaatatgactgctcagaagacatcataaagaatctgccttttcccatctctctttttaaaagtaatagatatataagatgtgtaacacaatacacaccacacacacacacacacacacacaccacatttccaggctatactttgtgatgaggctgctcagacagattgttcatcaaaatcgcaccagagggcttttgaaatacagattgatagactgcgcctccagagtttctgatccggtaagtctagggtggcatctgagaatctgtgcttttgccaagttctcaagtgaggctgatgccacttgttcaaggaccacatttggcacaccactctgcctgaggaaaataataagaatgggaggaatacttccagcttctctctttcctattcattcctttgctgccagtgactttgtgtggaatgatgcagaaagaaggaactcataaatacctgtgactcagccctttgtgagatttctctttcaacttggccctcactgaatgttggcattctggacccagaggctctccagggtcagggaccaagcctggctttgaacatatacctaaggctctgattctaataagattgtctgctccccaaacccctcaggtgactgatcctgaacactagattttagatccatctagagtttattaagggacccagctgactatacatagatctagttcagtgttatcagcagtttttcgacatatcattcagtttctcatgtctgttccttaattggttactaacttggggagaggtgaaaggtgtaattaattttcactactcaaatcccatcagcaacttgaaattaacttaaaactttgagtcttgtcacatctaaaaatctcttcattaatccctgcatgtgattgatagtttgactggagacacaaatctatgagaaggagacacttcccttataatcattgagttattaggcctagagttagagaatttgcaagactttcagcatctttgtagatcctaagtactcttagggttggaagccccgcccctcagcatatgaaacataatacaatcgtcacataataatattacatttcacattcatttacttaatgatctctcattttttatttttatgtttttgattccatctctatgtatacacacacataaacactacatatggatataatatttctatgttatatgacatatatcctgcattatttataatatcacatattatataatacattatatgctatatgcagatatagatataatatatatctttataagaaagttcctttctagaaaacattttcatagaacttaagaaactcacgagaccctagactctctgtcttattgtctaaaggataaaataaccttaagatacaatattggtgaggaaaagcttgaggttagtttaatttttacttctttataggcaactattctacatcttgggaactttttagatctgctctttattcttaatgcttgaagtgttacagcaatgtatctaggtttggacgttcctattgcactggactcttaatctatcccttcaatatgaatggtgtgacctttatttctctgggaaattctcatatattaaaactttgatatttttactcttagcattattttttccctggatctttattaatggggaagaatcctattaacacaacatttcattaaatagataggcattggccctaatgttataaacttcagttcagtcactcggttgtgtccaactctttgcgaccccatggactgcagcatgccagacctccctgtccatcaccaactcctggagtttacccaaattcatgtctattgagtcactaatgccatccaaccaactcatcctctgtcagccccttcctcctttcgccttcaatctttctcagcattagggtc

SEQ ID NO: 45887 - DNA, 2213 bp, Bovine  19866880787572
  misc_feature (1)..(1): n is a, c, g, or t
ntgggataacttgcatggtgtggcaggagatgctagtggtcaagagagcagggactgcagcccaggtggttgggctctcggatccacaggtaagttgactgacctggaagaaaatgaagatcagtgaaggtcacctatccctgaatgatccaggtaaagaatagttacaggcccaggtatttgccatctggactgtgtacagagtagattcctttggtaggaaaaaaaaaagtcatgataatgcttctgccccacagcccagggatggcaggggctgcagaaattgctccagaagaagagagactgcaggttcgcagtatgtcctcagccctgcatccccgactcaccctgtgagctcagcctcaaagccaagaccaacacaaagcaaaagtcacttcccgacttggcggtgggcactgggtctgcattgtgctgatgctgcttcaaccttgtggccatccctggcgttcccatggggagacccttactttgtgcttgtgcttagaatacgcagtcttctagagcaagtccagtctaaccctattgcaacatcgccaagacattttttttttaatatgacccggcaccttctacctcttccagatttctcagtcccacctgctgcctgcctttttctctttgctccctgtttctaccttccatgataccctcttgtcccacctttatctcatcccctgtgactcccttcttcaggtctttctcatttctatctctggattccaatcagcacacagaccctgatgccattccaggacctctcggggtcttaatagaaattcaaattccattgtttaagatcctagaatttggtgccattaaccaaaatagcagagcccaggcaagggggggaggggtcctaaggcagagctgatttaaaatttaaattatttgcacactttgagccagcacatatatcttggtattgatcgaagctctttggaagctatttacgttttcagcacacctataagactgagatttatactgcatttggtgtttaactagcctcttaatgcatcttgttgagccatagtattggtgggcatattgtaaattttagtgttggtgctgaattgatttgcttagtggagttgaatttaggctattaaaataaataaataaaacaaataagaaggacctccagtacctcatatcatattaaaatcaatcaaaggcatagagccaccacctccagagtcaggattcagtatgttttgtggaaccgacttagagtgcgaaggatttctctcagggtggcctctcgtagtaaacacaaacagtgtggaattaagggtgagaccacagtgtggcctgtctacatgatgatttgaaattgagaaaacttgaactcacaccctgactttatccagacacccatagctggatcttcctgttcttggtttccaaaggagtggcccagccagtttcttagagttctagcttccttctaggcatctagacaattgcagctggattctgagatgtgtccagcccttgaggtggaacaagatgggagcagctctcagcatccagggctggtcttggtggcatctctttatcttgcaacccctcagaatcatgggtgggtctcagttattttcatattctagtgactctaatgaaccttagtgcatctcagaaacccgaggatccaagctgatgtcaacacagggcaaatactttccaaaagattcactccagataagaggtttattttgtcttctagagctcgggcagggtgggggtggagggttctttttttgtttggttctttgaagctcattccatcagactgtttcattattagtattgttttttatttttaaaaaatttagcagggaaagttctgaaatcaacagacaatttacaattgttgtcctggttctctgaaaaggtagtttcgttttcaattcagtgcaagggtgctggttaattgggctggatttttactgagactcgacacatactggggaccaggcatgatcaagagtaggttgccatcaaaagtcttctctggaggaggagcaggttcctagaggctggctgtgactccaggagcagctctgtgggggtgagaacaccagaaaccctccctgtctcctgagctgggacaggctaggtctttctcactcacagtcagcctgggtactcttgattagccctttcagatttcccacagatggggcaatctt

SEQ ID NO: 45888 - DNA, 2062 bp, Bovine  19866880856865
  misc_feature (1)..(1): n is a, c, g, or t
ncatggaccttttcgatgtagcgcttgggctcaacaattgcagcgtgagggtttagttgctctgcagaatgtgagattccagctccccaaccagggactgaacccgtgttccctgcattacaaggtggattctttatcactaagccaccagggaagtcagaagaatttctaattatgatgctacttcccagtctatattatctttgtgatttttttttatgctttcatttttcaaaagttaaaatatcactagcctttctaatagaatccactgttgtgaaatgactccctattaactcattttgctttttggtcattttcactacttgtatccaccatgaactgatgcatgaataatttttctagttattaaatcaggttttctcacaacattcaataactgcagctaaacaataatttctggctcaatattcatctacaaatctgagtgttttccctatgtccctaaacgtctgtatggtattttggaagtgactagatccatgctgtcaaatatggtggccacatgtagctactgagcacttgaaatgcgcccagtccaaactcagacatgctgtaccagatttaaaaaacttaatataaaataaaatgcaaaatattgcattcatatatttatattgattacatgttggagtgacaatattggttggcaatactttgtctctgacacacttcaaattgctgcagaattacaccattcaggtcacagccccttctgtatccaatcacaacagaattgtggagtggaacacaaaattaggaccccatatagatacccactgccctttccctaaagacttatcttctttactggaaactcacctcccaccctggaacctgatcccctgctccagaaatccatctgcatctctgtctctgtctctgtctctctcaccctattacaggctcccaccccaatcttttccctcacatgcgtcatgttcaatcttgaagaaataaaaagttggatgtataaacacacattcacgcaagcaacaggaatgcattttggacccatttttcctctctcacatcctgaatcctcagtctttctgtagcacatctgatatgtgccactttatatgaatctgaattttctctctacctttttcttgagccagttatcgcctagcttcacagtctctccacccactctgtccaggtggcacttgtggaaagcccatattttctcttctcttaccccattctctctgttagtaggaagacagaaaactagagatggttccattggctgtagaccaccccgcccaatccatcctactcaagtgtcttttttaaaattctctataccagagtcattcataacaggcaggaaggggaaaaaaaaaactttatatgtttttcattaacatatactgttaactacgccagtaaattatggataatttaatttagacttaatggcaacatttttcctcactaatgaaatggttatttgttattaggaaaatatttattgaagtggaattgtgtgatctctcacatcactattaaaccttgttaaacctttttttaaatttcaatttggatttaattaagattcattaagcattttattaaatctaaattaaattctaatggaaacaaggtttgcccaggaaagacagttgtgccatccttccctctcagttcttttaaagtgacacgggaagacttagaatcaagccagctccatcattattgcagaacagaaagaatgaaggaatgcaggttagtcccagattgatcattgttcaaattgcagaactgctgctgactcaccatgagaccttggataagtcatcttatttctgtgatgctcagattatcctgtataagatgaggatggtaacagtggagtggtttcagagatggaagggcaagggttaaatagcaacaaatatttatatctccttttcctgtttcagctatctataactccttagaaagtggaattaaataaatacgttctttgaataagaaagataagttactatccccaggacaccgccccaccctttgtggtatgcccacagcctgc

SEQ ID NO: 45889 - DNA, 2371 bp, Bovine  19866880870502
  misc_feature (1)..(1): n is a, c, g, or t
nctcagtcacgtctaactctttgctatcccacggactgtagccttcccggctcctctgtccatggaattctccaggcatgatactggagttggttgccatttccttctctgggggaatcttccctacccaggccttgaacctaggtctcctgaattgcaggcagattctttaccaacagagccactggggaagcccaacttagggtcaaacccaggattttcaacttatggtactgagaaatggagtatttcctgctatatcagtaggcaagaatgtcacagtcatcagggattccggccctccaaatgtgaatttctgaacccccaagggtacccaggaagagcaatgcctactacttcttccactccgtaaggtgagcactgaggaactgggggtggggggtggggtaaaaaaatgtgaaaagactgcagtatactggcccctgatagctgagatatacatgcaaggaatgatgtcagtgagcccagactcttgcatctttccatacatagaaaagggctaaattctttaacttgagatatacgatttgccttaatcaacggtaatcttttgatattcagactacctgcctcttgctgcaaacttctatatgacctgattcctccctcccgtttccaacccgcctgcctccttggagcggttatctcagggttacttgagatgctgtctcccaagcctgaaatttctaaaaattcccaccaaagaaaacataactctcaccttccagtttgtgactatttttttttggtggacaatacccattcctctcctaaggggagcacctctaatttcatttctctctgggtcctgacaggtccacagagtctttgaagagcagcggggcagaggaataggaaagtctcaaaccccaggatgagcttctttggttttttggataagagactctgctgggctgtcccccttctcatcccttctgagactcgggcagtaactaactcactgatcatttctgctttttcatcttaggtaggcaaaaagccatttaaaaaaaaaaagggggggggagagaaaaatgaaagagaaaacacacacatgcatccctcatgagcattaaaaaatagtatttcagggaacaaagaaaatgcttgatcccacaggcagccctgcttgaaagacatcttgttaagctagagcttgtgcaaaagagaaagactgcagttttcctgggtttgatgtttatctccagccgagcaccgccattcaaaccaatcaaagtttgactgggttcagaaatgccacagcagcacattctgagttcctagtccccccgaaacactgcaagtgaaaacatctgcatctaaaacaaggcagttaaggagacaggcacacatgctaacgctgggcgtctatttttggtcaccagcttactgaagagcagaagcagggaagagcatgtgcgttccttttattttccatttattgttattttttcaaccttggcaaaatatacacaacgtaaaattgaccgttttaaccactttctaagtgcactgtgtaatgacattacatacattcatgatgttgtgcaagcatcagaaacatccatcttcagaactttttcaggttttcaaacagaaactccatacccaggacttccctggtagtctagtggttaaaaatccatctgcaggggacatgggttcgatccctggtccaggaggaccccacatgcctcgggacagctaagcctgtgctcaagaagccaccactgcaatgagaagactgtacaccccaaccagagagtaggccctgctctccgcaactagagaaaggccgtgcacatcaaacgaagacccagcaacaacccctaaataaataaataaaatttaaaaagaaaaagaaactctatatccattaaactggggtttcccaggtgactcagtggtaaagaatcctcctacaaatgcaagagatgcaggttcaatccctgggtgggaaacatcccctggagaaggaaacgacaaacccactccagcattccttttttttttaaaggtctatttatttatctggccacggtaggtcttcattgctgtaggcaagttttctctgctgtagttgcagtgattgaaggttactctcgagttgtggtgtgcgagcttctcattgcggcggcttctgttgtgtagcatgggctctaggtacacaggcttcagtagctgctgttcttgggctagagcgctggcttagtcgttgtgatgcactggtttggttgctcctaggtatgagagatcttcccggaccagggattgaactggagtcccttgcattgcaaggtggatttttaaccactggaccactagagaagcacccctcccccaccccact

SEQ ID NO: 45890 - DNA, 2098 bp, Bovine  19866880962536
  misc_feature (1)..(1): n is a, c, g, or t
naaaaattaaagtgtataatttcccatgagtctgaagaacggttgcattttatcagccactgcatagaatactttctccatgagaatttagagtccagagtgtccaacagagcttttcatagaatcaacactgatccctccaccctcttttcaagtgtagctttgtctccagtgggaccttgagctcttcatgctggtgaaaccgagagaagctctgagtgccctgtgactcattctccaaggctgagggctttatcggactccattcagtaggtttttttttgataacaggggtttgaaatatccttgtgacaggaaattctcactgttatatttgtgctttcctgttggacccagtagattttgttttcatttattatttaatttacagacaggaaaatcatttgggtctggagacctcttgataacacagttaatgcaattgccaggacatccccggtgtgcgctaagccctcggactctgaatggctgtcctttcagagttccaggtgttggtttcaagggtgaccatgtgacatcccataatcacacttatgaaagggctaattaaaaatacagatgtcttcaactcacaatagccagacagctgaaatacttattagtattttttttaatgttaaatctctatatactcacttctttccaacagaaaaactaataatagataacaaagcccagacagaagggccctgaatccttttcctcccaataaatgacatggggttttgtttttttaaatagagaaatcacctagtacttctacaaattgatcttttacaaacatgcctttttagattactctgttttcccttttaggaaggctcagacacacagtattgtttatctagggcaagaagattttaaaggtctgcagcctgactcctccaacacagagctgatggccatacaaaacagcatctgagtctgagaacagagaaccattaaggacccttgagccttaagaggcggatctcttgtactgtaaacatcaagtagtctctaacttctgggaggcagaataaacagaaacattatcatgttaaaaaatgtcttagtgatgtgttgtgtggacttaagaactgggtcctgatgaaggaaaaatcctttacagaaatgttgggtttgcatatgtgaaccaacgcaaatgtattccccctgctctggcgggtaaatactttggacctgaatgtatagttaaaataaccatcaagaataccaaatttatgttctgccaaaataatgacccattaaattaaaaagatgtcttaaaaatgctgatgtgaccttttgttaactttctttcttcctcccttcattttttttatcttctttttttttctttctttctctttctttctttcttgtatgtcttcctatataaaaaactgctattctgaagggcttgctaggttaaaggcactgtgctagacacttagttgggtgcatggagatgaacaaaacttgccctggaggaagtcataggctatcaagaattatattccacaggcagtttggagaataggttggggagagtaaaactatagaaatcaaaaggttggagaaataacacagattgttgtataatctttttgtgcagctccagggaagttggtgacacatatcagggcagggaagttgtacatgttttaatcatctcacctccttgggatgagagtgaagatgaggtacagctggagaaaggtggcattaacccctctcctcatgtaggattcccctttctggctttgcatctctgtattcagctctcaggaaattttcatgtgcttttgctgtctactttcctctctttcatttaatgcacttcagaaacttttttatttttattttttttttttgagcatccactaaggtactctaatgggtaagacagatttgacactcgccctcatactgcttataaatcctaagacatcaaggagtcctgctctagagttctaatgccaacagcaactcttgggattgggataagtaagataattttcttaaaaaaattatttatttatttgggtgtgttgggtctttgttgaagcacatggaaatctccgttgtgtcatat

SEQ ID NO: 45891 - DNA, 1779 bp, Bovine  19866881005907
  misc_feature (1)..(1): n is a, c, g, or t
ngattctcaaggcaagaacactggagtgggttgctgtgtcctcttccagagggtctttccaacccagggattgaacccgcgtctgtctcctccattgacaggtgggttctttcccactcataccacctgacaagccctctcggatcttacctaacccattttagaaacaagatcccagaaaattaaactgcttccaaataacttcactatatccaggaacaatctaatatttttaggaatataaaaatctccagtggtaacaaagtaaaatggacaatgtcttgtatccaattagagattactgggcatgcaacgaagtaacaaattatgacccatgatgaggaaaaagagaaattgaaacccagccagaactcacacagatgttaaaaggagcaaacacatttaaaaaagttgtgataagtgtatgccaattgtgcctcagtaagtctttttttttttttttttagaagagggattcagcaagtggtcaaaaatgtttgtctagtactaaactctcttctcaataaaatcagaagtagagaaaaagagatgaaaagagaattactttctatgtgagtcagtgttgctcaaagatgtggccgagtgccatgtaaatccatcacccagagtgacatacaagagcaccccaagcctgggaaagctcttggtcagcctgtgcctaggactggaggaagaggatgctgggagtctttcagaaactgcaaaatgccacctagctggaacatatagtgcaaaagaaagaccagggaggggtttccctggtggtccggtggttaagaatccatcttgcaatgcagaggacaccagtccgatccctggtcggggaagattccacatgcctcagggaaactaagcctgtacagcacaaccactgaagcccgtgggccctagaacccatgctccacagcaaggagaagtcactgcagtgagaagcccgcacaccgcaactagaaagtagccctcgctcactgcaaccagagaaagcccacacacagcaacaaagacccagtgcagctaaaaataaacactttaaaaaaagaaagaccagggagaggggactgttgctgtaattgaaagctgacctgagattttaaactcttctggcccaagtgagtttggtatattagctcaaatattggtcagatccccattcctgtctgttctttggaacttctgtaggctaaataaaccctctgaacatcctttccctcagagataacgtgggaatattagcccctgtctaccatgatggtttgaggagattaaattttataacgtagggctctcacttacgtcatagaggtgagcgccatctgaaattatgatattttgatattgctgatattctgtactccttatttcgccatcacccaaggagggatcttgtctgttctgttcaaggttgtatatctcacacttcgtatgcatagggctggaccactagcaaccctcagtagatatttgttgagtgaatgaatgaactcagggagtgtaacactacatctggaacatgataaatgaacacttaaaaaaatgtttatttaggttcttaggacaaggcgatggaatcaaagttatgaatttctcccaccgagatctttctgatatgtcaaatgacaggtgaagcagggtagctggtagtctaactctgagttctcccagagctcactgtttcatccaaggtcaagaaaactttttctgccttgggccaggttgagtcatcccagatttaaggagcgaagcaagtaaataaaatgt

SEQ ID NO: 45892 - DNA, 2395 bp, Bovine  19866881256657
  misc_feature (1)..(1): n is a, c, g, or t
nattcatccactcacttttcctgctctttctgttttttttttctttattttaaatttccaactctccttactccccgctgccaccaagacacttagcacctgcatccccactctgtgctgagtctcaacagctattgtcaagaggacgaaggaagtacggaaaactgggagtttaccaacgcattcctaatacaattcataggctgtcagcagttgtttatgccttcatattaatccgggatttatatttattttattcggatgatatcatatgatgcctaattgctttggagagtttagaattgcttttgtagaactatggggcttgagtcatgaatcctaatgccttgctgctaacaggcttttgtcaggcttttgtcatgctccagaggatgtttcctgtctcttctcattcagaagagagtgctcacaccctagtgagttaataaaagtggagagagagtgtgatcttgatcttgcagcaggctttcgcagaagctcttagttggggctgcatatgccagacacatttgaagcacttgccagatccctagcccttagcttggaaatgtttctcccagcccatcttttaagagagaccattttaaagaaagaccaagatagtgtcacctacaaattggcacttgccatctacctctacaaggatggaggagcctggtgggctacagtccttagggtcacaaaaagttgagcatgactgagcagctgagtatgtcgcccatatatgcacactggtctatctgccaggcacaccttgtctccatacgtgtgttcacatcgttcctccagtgttaatgcccctccttccctctcttccttaaactccctgctcatactcaccctccaaagtcctatatgcatgtcgcctcttttctgtttaacttctcctaatatgctggtggggcttcccaggtagcactagaggtaaagaaccctcttgccaatgcaggacactgtaagagacctgggttcagttcctgagtaggggaagatcttctggaggagggcatggcaacccactccagtagtcttgcctggagaatcccatggacagaggagcctgggggaatacagtccatggggttgcacagagttggacacgactgaagcgacttagcatgcactcactgctgatactgggaaagcatcttgtacccctcccaatgtttcatgtatctcctgcctagctctcttgtcacatttatcccattctgtggttggaccaagaaacaaaaaccatgctaaggtgtaaagacagaaaataaaaaccgaagctatgccaagtattgaagacaggaaactatgccaagtattgaagacagggaaaggttgtataggtgctgaaaaagctcagaagccaaggaacatgatctgaaccctggctaaggtgtgaatccctgaatttcagtctcagcctctgggttaatcttaggacttccctagaatcaccaaccccagctcagaacagcacaatccgctgaatgctgaaatgagcagtgctcagtaattccaaacaagtgatgggaacatcttagactatgtgttctttccctagcccttcaaattactaagttcttctcatctgtcacttggtggtgagtaattccgagtggttccctggaaagactgaattgcagcttgtgtgctgttgggccaatgaccatggattttcccttgccttctccactcagcctccaaggagggaatgtggatcaggacattctcttctgggaaacagagaaagaaatgctctggggagtggtgtgtgtgtcccttgtaaagagagtatcaaccaggccctggggattggtgacgtggttctgttgaaggtgtgtttaacaaagtcttgatgcaacttcccattggtctctcttcatccttgagaattaatcctataaactaacatctattgctacttattatttaccagggcttccctggtggctaagcagtaaagaatttgcctgccgtgcaagagacacaggtttgattcctgcatcaggaagatcactggagaaggaaatggaaacccactccagtattcttaactgggaaatcccatggacagaggagcctggtgggctacagttcatgggtcacagaagagtcggacacgactaagcaactaaacaacaattatgtaccaggcaccatgctaactcatttgtacatgttatttcatttcaaactcataatgcttggcagagcaggtatcatcatcaatatcccattttacacatgggcaaactgaggctcagagagggaaaacaactcagagcaaacagtggtggcggaatttgaatcaaggagtatctaaatctaggcccccggggttattcttgactctccagttccgacatttgctcacatctta

SEQ ID NO: 45893 - DNA, 1135 bp, Bovine  19866881304350
  misc_feature (1)..(1): n is a, c, g, or t
ngtactcttgcctggaaaattccagagacagaggagcctggcgggctacagtccatggggtctcaaacagtcagacaatgaccaggcacagtacagtacatagtgacagtccagcttagaggtctgaaaccctggacgctagctttcttatcttggcctcccagctctttctctatgacctgggttctccccaggcccccaagctccgtgtgaataggaaatttgcccagatatcaacatctgtgtctggttgacttagagtttttctgacacaggggcattcctggacacagttcgcagcacccggagtccttgctttcagaaccttctcctggtgttggaacttgtacaggccagcccctcgctctctattttgtgtctgggactggccaactgcccatgttgcagtaatctctgcaaacctgtggcccaaaatgctcagctgctcattttcaggttttagtatatctgatgctgcagcccaacttgtttatggcagagctccctgtgatggggagaggagtcattcgatgtgtccaggcaaagggtggccaacacccagcacttgtgacactgcttgtttccaagcagggatctaagcagacttttctaattaaccaattagcgtgcactttcacatctaggccagacatagccacagggattttcttactttattattttatacagctagtgccaatagatcacagttaaatgaaacccacattctatctctggtgaaaggcttgctgctaaggcaggcacgtagaaaagaaggcaccctgagttgactcagagaataagtgcatggggcaggacaaggtccctggggacagaacagagggagaaaaagttactgaattccactgagggctcattacgaagggaatctttattgtgatggcccaatgaaactcacaatcttggctttggctacattcaattctttagcgatcttggctcagcagaccagggtcagagaaagcagctggatgccttgatccaaatctggcaagtctcaggataaccacactggcagcggtgtttctccattactgttgtgatggcaagtcgagcatattataagcacgattcttttcagagaagcccttccaccaagcttcagaagggctct

SEQ ID NO: 45894 - DNA, 907 bp, Bovine  19866881404738
  misc_feature (1)..(1): n is a, c, g, or t
ngccatatgataatcagatgacaaaaggttcatacaccaggagtatgaagaaaacccacatgtagttaagtcccctgtaaataatgcagagcatcaggcttgcctctaaccagctgggatggcatgacatacagacttctttctagtctatgattcttcactcagtatttattctgtaatcatctcacagtactgagaatttggcattttaattttatctctcaggggaatacgtggatacaggcaccatgacaagtataacagtataacagaaggacagttaccttaggcttatactccatccttattttttttttcagatttccaagaaagaaagatattttcaaggttcatagcaaaaaattttactgtgacttcatatgcatcatctttcactacatgaaatctaaaaaaaaactgtatgttccaaactctatttcttatctggatagtctaaccataagtcattcatttttaaccattccacaaatgtatgttctgcattcattgaatcccagacaccgcggtggccattaggaagcagtatagtatagtggtgaagaatgggagctttgaacacagatagggcttgaatcctagttgtcatttactgtcttgtatgccttgtatgtgttctttaacttctctgagtcttattttctcattatgagaagagtaaaatattcaagccaatttatcagatagtcgtgagggttaggaattccctgatggtacagtagttaagtttctgtgtttccaatgtaagggctacagaattgatccctggttggagaactaagattccacatgccatgtgcgcaaccaaaaaaaaaagattattgtgaggattataggagcataaacacaaaatatgctcagataatgatggtgatgatgaagatgattt

SEQ ID NO: 45895 - DNA, 1456 bp, Bovine  19866881451166
  misc_feature (1)..(1): n is a, c, g, or t
nactagtggtgggaatttgaaggcaaaggagtctcccttccctccttcaaaacatatggcataggccatcccccattctgtttttgcaatgcatggtcttcctccaccccactggagatcagccgagaacagaaaaacagagggtcgaaattctagaaggtacataaaggtaaggtactgtgtccggggcaatttaattgagaatagttcaacaacacggatctcattcggaacaactcaggctcccactactaagacctcaggtcaacaaggtgatatctctgcaagggcacctagaggttttgggtgagcccttctgccactggcttggaagccaataaatgggtttatctgagccctttttctgcaatactccatctcccccaccgcctacaaccctgccactggatttctgaatgtactccctggtaagcattctatttccctcctgaatttcttgaggcaatcctcccctgacctctctatctggttctttataacctccttcctagacaatcttcacaggtttgtttttacctgaggccacagaatgacatcctgatgccatggatctatctctgagctggttcccagctaatttcagttatgagcatttacctagattcttgttgtgtttactgttccacagatttgaccttctctcttggttcataccagtctaaaccaagcctaagtctgataaactctttttagttgatacacagtaaactattagttacatcaggtacaaaagaaagtttttcaatgtctcggaagagctttctgttgtgatggagaaggcatggactcggaagtctaggtttcaatcctaacactggtatatataaagaatatgattggtattctttcacttagacaggtgcatgtaagcttcaccatttccttatctgtactgtgtattttacttttgttagtttaatgtttcctcactgaaggctattaaggctgagtatttttaatatttattcctaagtaccatcatctatcgagtgataatctttgttcaaacttctcttgcctatagtgtctcaaactgtgagatcagcttctcataaggcggtaattgtacctggtgcttaaaatgtgagtcattctatacaaagcccatttcaagttcagaaactttaggatcggaatgctttctcattgaagttaaatgaacactatggaagtatttctctccctgtgaatcttgagcttatgttggagggggaagtacaacatatatggagaaagtgtttctttctcttaaatagaaaaatttgtcagcaacctgaaaagcatgacctcccacccctcactcacacaggttaaacaatttcaggactttccataacaagtttggctcatgtatcgcacaatgtcaagatccccgaggtccactgatcactttcttttacatcatcatcaatcattttatgttttaatgcattct

SEQ ID NO: 45896 - DNA, 1076 bp, Bovine  19866881526664
  misc_feature (1)..(1): n is a, c, g, or t
natgcgtgtgagaaagattttccatgacagtttactaaggtcctgtggtctgtttctagatgactggaatgatgaagggaaaaggtcatattgattgaaaagatgctatttgtctgttgctaaatttctttttgctccctctatcccaatgcatctggatggcatcatcgactcaatggatatacatctgagcaaactctgggagttagtgaaagacagggaagcctggtgtgctgcaggccatgggatcacagtgtcagacacagctcaacaacaacaatcccaatgcatctagctcttttggctgaaatagtcttcctaaaactgaggtcattgaattacttctttaacaaacagttactaggattccttattgcctttgattcaagcttgaattcttcattccaacattcacaaacttacacagatggctcctggcttaccctctgagtcttacacatatttcttcctcggagtagcacactcagccccaccacttactgcttataaaagcccaagagctatcaggcatttatcccaactacaaagatgactttaactttagcgaatgctcctcttccattgtacaaccactagcaggactcagttacagtatgccaattggatctcggttcttatgtgcaccttctggtcatttagtgatggcatgtacttacacataacacaaacagggcaaaccccaagtgattaacatcattatcagctgccttgttcaaccaggacatcacaacgtctgtgtgggaaattctagttagtaacattttcagtcctttggctaattgtgaaactctctagttcacagtaaattgaacctcaatcccatggtatgtttttgacttaacactgagccccaaaatccccaggtcttaaccatacctctacttctacaaacagttgcacacctgtgattcggatggaagcacctgagaactgaagacagagagatgatgaaaacagaggaaatgatggcaaggttaacacgtgagtgaactacagcttgctcactctgtaagacctatttccaaagcctgggcacttattttagaaactgtgaa

SEQ ID NO: 45897 - DNA, 998 bp, Bovine  19866882085091
  misc_feature (1)..(1): n is a, c, g, or t
nataagacctactttaatagttactattttttctccctgacactctggttcatcatcaccacacgtataggagatgacctatacatctgggaaagagctccagctccaagattcttcacccactgtgctggcagcattccacaagctcgtcttgggaaaccataattgattactctggagggaaaactccaactcaacaccagctggcagccagaccctgccctatagcccttgaattagtctccagcaacatcctcggcagggatagtataagagtgaatggggttgacattatcttaacatctaaaatgccactatgagcctgttctttcttaaatacaatcaagactgtgttaataaagtcccagagtggtgaattttccactggctacctttgagcctccctagtggctcagcagtaaagaatctacctgccagtgtagcagatgcagcttgttacatggactgggaagatcccctggagaaggagatggcaacccactccagtatttgcctgaaaaatcccatgggcagaggaacctggtgggctacagtccaagggggtcacaaaagagttcgacatgacttagtgactaaacaacaacccttgggaatcccagccatactttttttttttttttgtatatttgaacaggcagtgtattttttcatccatcagctcttgaacaaataagccaggtaataaagaaacaatccagggatgcagcagcattgggctagtagcagaaaggaaagcggagaccagctttgagagatggtgaagtggaggtgaacatcggtatcctgggatatatggatgctctaattgtgagagctgagttgactgttagctgttgggtccattaaggctgccattctaactttcaggaattgaaaaggaaaacaaaaatgttgattatctttccaaactcttcaaatgaaaatgagtaagaatttaaaaacatgaatgtgatttccattccaagaagtgcttcccg

SEQ ID NO: 45898 - DNA, 2788 bp, Bovine  19866880360004
  misc_feature (1)..(1): n is a, c, g, or t
nactggaaggcagccttagaagctgagaagcccaaggcctgaaatcaaggtgagttaccatgatccttgaaaaacgaaattagcctgggattagagaggacactaggcctgtctaggagttctgttctgttctctccacagaactccttccctaccctctcctccctgggactggttctttcatagctccactcccaccagcatacccccagggacctccttggccagcccacacccagctctggatctgacagcatttctgaggacatccactacccttccggttttagccacaggagggcttccagttctcttgacctgagagctgagtcagacacagcagggcaaagcaggagccgagctccgaatgtcggggagcccattacctgcccccatgatggaacagtccggtagtaccacattcctcaacctccatatccaccagaagagagaggcaaaccaaacagtttgtgcatctatttattttggagaaacagctggggacctggggcgagaggactgtcggaaaagaaatgaagcagggcaaaggggtatccttgaggtgggagcagacaggaggaacaatgtcagactgaggacttgaaggaaaactgcagagaattctgcagagggagagtgggaaaggacagagtggaaattgaggggtgttgaggggcatcaatcaagaggcagatagggctggggtctagtaactgttgctgaggctggcagggagggctgctctggagaggccggacagtgtcccaactgtccccaggtggaaatcaggagggcggctggaaattggcaggattgtactcctgaggtctctacagaagttctaaggaacatataagcttctcttctgagggttattgcagaaattctggaagcagcatcgagagaatatccagaagccaaacactggagaggcgcgggtgtatgagcagtcactcatctgttccttgctgcggcagtcactcaccatggtctcaaaaccactgtctggggacggacagcaacaatcagtgacattggaggtccgaggcaaagccccgagccctcccatcccctcatgccacagagactgaccatcactgaccccctaccccttcctagaccccagaaaggcagatccctgaaactggacagggtcagggaatgccagggagtcaccagccatgaactctgtggaagtttcccatggaaggttggtgggaaagagccattcaaaacacagtgacagggacttccctggtggtccagtggccaagactctgagatcctaatgcaggggccccaggtttgatccctggtcagggaactagatcccgcatgctgcaaccgaaagatcccactaagcaactaagatcccatgaagcaactaagacctggtgcaccttaaataaataaatgttttttaaaaagttcctctgggagagtaaagaggaagacagcaaaagaccaaactctggtgaacacgaactgttaaggctcccgaagaaaaaggcaagactcagtgaaagaggctgagaagaagcagtggaagaggtagcagaagaatggtgctggcaggaactactgctgacagacggggagaaggcagcccgaggaaaggccagcggatctgggaactccaggcctgcgaggctgggtgttataaggagggtgagccaagaaggcaagaggaatggaagtagggatgtggagtagctctaaaggaaaggagagagggagtgatagaacagtatcttagagttgtgggaaccagttggggtgccgcttagaaggctggtagagactcagttcgggaatggactggacccaagatgaaaggaagaggcagcttactgttctttatgagcagagtcatgcagctgctgccctttgggacaaggcaggtgtcacatcccagaaggcatcccaactccttggtctcaaagaggcatcgatagcagcttaggtattcgttgaaatatttctgtctaatgggttcttgatcatatatctcagactgacctggaacacagagaagcactgaccccaaacccacttaattcccagactgatcaaccccactgttccctcctacctccctactcagaaaaccataaaatcaccaattcctgaaaaatatcaggcttaatctaacatcagaagctttagttctcataaaaaatctccactctctactctcatacctcttgaaatgaggaactcattcattcaacatgcatttgaggggctaacatgcttagcactctacaagcctctaaattaaaggttaggccaaggcagttcattccaacttttagcagccctgttaagacagtgcttcctctgtgacttggtttcactgtccctcacccaacccccagattctcttttgaatatgctttcttaatctgtaatgttcagagtgtgaaaacctcagagcgtatcatcacaggacaggaagaatctctcctttctgtagccaggagacttcaaacagcccagggccacattctttgtttggttgtcctttaactgaacagactcatgaaacgttgtccaccaaagccctccccaactacaccatattcatctccctcctcctctggtcccgggcccagatcacatgttactgagcccccaaaacccactttcagacccagcagagcacttgtatgaagcagatgctgagcaaacactttggatctggtttctgtgtagacggtgctttgcacccaagtggagttatcaggctgaacttagccttgttctacgctgtgtatcctgaggctgt

SEQ ID NO: 45899 - DNA, 758 bp, Bovine  19866880370292
  misc_feature (1)..(1): n is a, c, g, or t
ntggcagcaccccccatcaccaacccctgcactccccccacggcagccccgcccgcgtccctcccaccagagcctgaggcctctttcctgggccccagccccacctgcaaagagaaccgagagaagttagtgccccaggacgccctcccgcttcgccctccaagcccgccaccgttggtgccctagaaagaagaaatgagcgggtggggcactgcgtctgaaggagagaaaggggcgtgggaggagagaacgcgagcgacagcgaggtgggcgtccctctgtcacaggaaagggaaagaaagatccaggcatctgttaagagacttggagggttagtggaaaattactgctgagacctaactcccccaaaccccaattctaaagtcaacaggcgccttgatctctaatctcccccagctccagtcccaggagacctgaccactgagatggagcacagggcagtccctgtgcccaaggtcagatcagaaccacccctatctggttgggccggatagcatcttttatttactgcatctctccatgaggctgctcttcccaaactccaacccaccgcctgcctacaggactccaggcacctgagaactccgtctcctcagagcccctggtacagaggaaggcccccagaaggtactttgggactgccacacaccctgtgcagtgcattcagaggagcctgtgtgcacggcttcccaaggaagtggctcctaggctcagaaacttccccagcccttggccag

SEQ ID NO: 45900 - DNA, 1590 bp, Bovine  19866880434422
  misc_feature (1)..(1): n is a, c, g, or t
ntaggaggaagtccagcgggtgggggacagagggccaaggtccttgctttgaggcaacactggatggagaagattcttgcccccaaaatgggacagttggcagggagacccgattcggctcctgcagctacacagaccaaggctgtgggcctcatgccaggggtggtgaccgcagggggatgggtgagagggtgcccacccccgggcagaaccaagtaggccctggaactaggggacagcatgttcttgcaatcatgtttagaaataagagaggaaacagagtgaccacctgctgggggaagagatgagagggaacaggagatggagacatgggaaagtcaagtccctttcccggtccagctgtccccacccctggtggctcaatgctgggcccttccgggaggaaatccctttagtgtttcagccattcacctcccaggagtcccctcagcccccctcctgatccctgttgtcttgcttccgagggatggggcctgaagctggacttgggaggccagagaataaacaggaaaggaagggtggggattagtaactgagagacctgggatctagggggctggggtgtgagtgccacgtggggactagaacaggggcgtaaaggcgatggtggtgtggagcaccttcttgggctgctgcaggcaggtccctcccaagcatccaaaggagggcaaatggagccccttgctccctgctcccatctcaccctcatctccatccctagggctgcagtgcgggagtttcccagaaccctgtgccaacggaggcacctgcctgagcctatcccaggggcaagggacctgccagtgagtgcacctcatgggagtgggagacggggaaggggaacaagggaggggatgcggagaatgggaagaaaggagaaaggaaggaggcgaagaagatgaagagaaacaaatgaggcaaaggagggaggcaggtgggagcagagggtcaggatgtgaactttcctctctccacccctcccaggtgtgcccctggcttcctgggtgagacatgccagtttcctgacccctgccaggatgcccagccctgccagaacggaggcagctgccacgcctttcttcccacccttcccggctcccctagcaccccctctcccatggcccccagcttcttctgcacctgcccctctggcttcactggcgataggtgccaggcccagatcagggacccctgttcctccttctgttccaaaatgggtcgctgccacctccaggactcgggccgcccacgatgctcctgcatgccaggatggacgggtgagcgctgatgggagagggaggaagggacaggagggggccgtggctgggctgtggggtaggagagatggaactggagcccaagagactgtgagcctttggaggacggaggcctcgagaatcaaccagccaattctaggtgatccgtttacccgaaactgacattcaccagcagaattgtaatgactgctaaaacattgagctatttccaagccagctggtaaagaactactgccatagcccccttagcacagcccctgaccactttccccgccccctcaatctcccctga

SEQ ID NO: 45901 - DNA, 1733 bp, Bovine  19866880447294
  misc_feature (1)..(1): n is a, c, g, or t
natggggaacaaatgtatacctgtgcggattcatttcgatatttggcaaaactaatacaatattgtaaagtttaaaaataaaatttaaaaaaaaataggaagaactaatctgtagttgtagaggtcaaaaagttggttggttatctttgggaggtttgaactgagagagggcatgagagaaccttctggggaaggttctaaaaatatgttgaactggatggtggctgcatggctctaaacagatgaaaaatttcatcaagctgtctacttaggagaagtgcacctcactgtacctgagttccagatcgacagaaatgggaaatccttaatgattttacaacagtgtactagggcttccctggtggctcagtgacagagaatccacctgacaacacaggagacacaggtttgattcctggtccaggagaatcccacatgccatggagcaactaagcccatgcactacaactactgagcctgtgctctagagcctgggagctacaactactgaagcccatgcaccctatagccggtgctttgcaacagagaagccactgcagtgagaagcccgcaccctgcaactagagaatagctcccgttcaccgcaaccagagaaaagtccatacagcaacaaagactcagtgcagccataatgaaaggaaggaaggaaggaagaaaattataaaaacaaaacaatgtattggctttacaaacgcagcttcaagacaggtcattttgctatctccaccccattccagaacaccacccttgagctccacctgtgtggaattctgaagcctgcagtgtagagaacttaggcagttaccacattccttgatgctggaatgtgtttgtttggggttatataaatctgatcttccgagtccacctaaggttgggatgaggtggagggagtccttcagtaagatgagacctcatcatacgtgagttcagagcctcatccctgagtgggattttccaaaccaagacacttctaagagcagaacggagctccatgaatgtttccaccaggacaacaggcataaaccaggatgtcccaggcaggagggtgtataatgcaacttcttgatatgaaacccaccagatgacctggaaaatacacagactgggacaagttgacaagtgttttgggacaaagacatggggtatgagaggaggaaacatgcacacagagaaggctgtaatcagtcaagggtgcagaggtgttacacaaaatcactcttcagggaaccgggcctccagcccacgccctagcagctccccttctcctcctctgaatttactgtcccttctctagaactcctaagcctgaccccgctccctggccctcccagcccacggttcccctgaccccactccctttcccagaactcagtcgtctgagcccccagcctgcggttctgtcctaggcctcagcctttcctgccttcgactgaaacagcagcatcttctaagccctgggggcttccccaggccccagccccggcctagaacccgcccgccgtctgccacgctgccactgccgcttcctctataaagggacccaggcgtccgggccaaggggcccccgcacagcaggtgagactctcccagcccatctcctcgggctgccggggcggtggactccttccccgggggcgttcagtccctcctctcacaccccagcccctcctgcaccttcagccagggccagggccttggtggggctgatt

SEQ ID NO: 45902 - DNA, 1504 bp, Bovine  19866880447877
  misc_feature (1)..(1): n is a, c, g, or t
ncggcaaagaatctgtgtgcaatgcaggcgccacaagagacacatgtttcatccctgggttgggaagataccttggaggagggcatggcaacccactccagtattcttacccggagaatcccatggactgaggagcctggcaggctatagtcagacatgactgaagtgacttaacacacatgcacacaaggtgtgaacaggcagtattcagaagagaaaactaaaaagccaataaacttatggaggtcattagtcatcagaaaaatgcaaactgaaatacaagataggactttacagtaattaaaactggtaaaatttaggaaagtaggcaatgccacgtgttgcctgagatgtaggagatgaaaggattacaggaacccttgtacaggtgtggccagtctgaagtgtacctggtgctcttgaggcaaagacaagtctgtgcctactctttgtccctaaattccgctcctgagtgcaaatcacaatgaagttctcaccctggtcggtgagggaacacgtctgctcttcctctgtgggctcttgtctggtggcagggcgttggtggcaccaggggccctttccctgggagagcaggtaggcagctatatgccacgcactccacaaggtgttctgtggcaggttggaggcaacggattagatataatcacaggaacacggatggatgttgaaaatactacatgggaagagaagaaaacagaaggagatacgtgtcgcctttacttcaaactgtattacacactcaaaaaacattttataaaacacattcacatgaaaagatacagattaaagatagaggggagacaggagtgggctgtgggggtgaaaggaaagaaataggtagctaaataaaacaatagtacctactctgtagatttgccttgagagtcacctgaggtctcgtgagttaaccgtctgggactatgtatagtggtcttagccttggctacaaagtgaggtgggctcggccagggctgggccacagctgtgtttagccccttagctgatcctctcttcccctccccatctcaggtcttgtttgccacggagaccttcgccatgggtgtaaatatgccagcccggacagtggtatttgactccatgcgcaagcacgatggctccaccttccgggacctactccctggggagtatgtgcagatggcgggccgggcgggccggaggggcctggaccccacaggcacggtcatcctgctctgcaagggcccgcgtgcccgagatggcagacctgcaccgcatgatgatggtgagccggggcacctcgaggccagctctgggcacctgctgcatcctctgtgcccaccctcctcccctctcctctctctctgctttcctttggtctgggagaagccaggggaggagcgagccaatctgaggatgaggctggatcttgtcttctctagtcttttcactgtgaatatggagctaggtgggaccttggagaagtctgtttatttagtctcgctcc

SEQ ID NO: 45903 - DNA, 1050 bp, Bovine  19866880449253
  misc_feature (1)..(1): n is a, c, g, or t
ncgtgctgcagtccatggggtagcaaaaagttggacagactgagcgactgaactgaacagatgcctgaatcactttgatatacacatgaaactgatacaacattgtaaatcaactatatttaataaaaagaaaaagaaactgtatccttttatcctattaaaataaaggagaccaaaaagacatgacaaataaatgcagtgcatgatcttagattagatcctggactaagaaaaaataaactttataaaggacattatggagcagttggcaaattttggacatggactatagattagataatagtagtatatcaatttaagtttcctgcttttgatagctgtaccatggttttgcaaaagaaggttcttgctcttaagaaattcacaccaatgtgtttattaggaaaaggatatattactcatagtgaaagtgttagttgctcagtcgtatctgactctgtgaccccatggactctagcccatcaggctcctctgtccatagaattctccaggcaagaatactggagtgggttgtcattcccttctccagggaaccttcccaagacagggatcaaattcaggtcacctgcattgcaggactctttatctatcatctgatcctccaggaaagcctatcttatgtgtgacttactctcaaaggcttcagaaaaaaaacactaacatgtaattagagaaataacaataaatgtggtcaaattatatcaattggtgaatctgagtgaagaatatcttgggataatctgtggtgtttttgcctctcttctgtgagttttaaattacttcaaaataaagagtttaaaaaaatagaaaattaaaaaaaaaaaaagaatgatgctggcaaagtatactcattggcaaggaaaggtattcagagtgcaccagtctgggccgtggggccttaacactggagctgtgctacggatgacacctccagccagcctggactctcagttccctgagctactagaggaactgggtgtgtggctgaacccaaagccatcctgggttgactcaagaaggctggttgag

SEQ ID NO: 45904 - DNA, 577 bp, Bovine  19866880458605
  misc_feature (1)..(1): n is a, c, g, or t
naaggcagtgaagttcccagggccgtatggaacaccggacctgctgaacctaccccacaggagaggactgccaagacctggggaccctgtccccttacctcagcatcattgatatagtgaacctcatcaaagataacccactccaggtcccggatgacgtccgagccactgtacagcatggagctggaggagaaaggccccaggctgactcctcagcagctcctatctccaccctcacctcagccagagtgctctccaaagcagcctcaccttcctgaccaaaaacccgccccatgctgaatgcccgcctctcaccgaaggatctccgttgtcataatgaggcacgaggcttctgggtgcagctgcacatccccggtgagcagccccacgtccccaaacgtgtttcggaagtcccggaacttctggttgctcagagccttgatgggcgaagtatagatggtgctgggaggagggcacgaagtcagccaggccctccacacaggctccttgtcagcacctcctctcccaccctgacccttgccagcggcacgccgcagagctgaggcgcccccccaaa

SEQ ID NO: 45905 - DNA, 1137 bp, Bovine  19866880497388
  misc_feature (1)..(1): n is a, c, g, or t
ntttgaattctctgacttttttgcggtcaccctgctgatgcttagttgcttcagtcatgtctgactctgtgcgacccttatggactgctgcctgccggtctcctctgtccatgggattccctaggcaaaaatactggagtgggttgccatattctcttccaggggatcttccccacccagggatggaacccaggtctcctgcatttcaggcagagtctttacccctgagccgccttcagccagttctctctattctaaaatgccctttttgtagaagtatgtgttgttaggccacatggattctgttggcatttgtgtcagattttcagacacacctaggctcagagccatatcccactacttatgaaaagagggcctttgggcaagttccttctctgaatcacagtatttttatctttaaattggaggccctgattcctcacagggctaatgtgacgttcaagtgagcttgacacagtacgtgctgaatcaatgagacctcccttctcctttgcctaattggaggacagactgaaattttcgaaaggactttaaaaattctgtttccctgtcttatctcttttcctcattaccaaatttcccaagagttgtttacaggcttctggtggctcagtggtaaagaatttgcctgccaatgcaggcgacaggggtttgttccctggtctgggaagatcacacgtgccatggagcaactaagcctgtgtgccacaactattgagcctgtgctctggagctggggggccacaactactgaaccccgagtgccctagaacccgtgctccgcaacaagagaaaccaccacaatgagaagcctgctcatcacgactagagagtagccccctgctccctgcaactagaggaaagaccacgcagcaacaaagacacagcagagtcaaaaattttttaaataaataaatatgagttgtttacactccagtgagagcagaaatttaaaaagttgtcaaggtgagaatttaagtttgtaaaattctgtaccttgtccccttcttgctacttctccttcctgggagtatgaatgggacagagggcctaatctcagtttggagtttaatacagatagtcctaggtagcaggtagagttaagagctgcggaat

SEQ ID NO: 45906 - DNA, 2002 bp, Bovine  19866880521420
  misc_feature (1)..(1): n is a, c, g, or t
ncatatattatgctaatcaggaaaaatgtaaccagaagccttttaatatagtttaaaatatttaggttttcatgatccttacgtcatttttctatagctctctgggttcaactggtagttttgttgttgttcagttgctcagtcatgtccagctctgcaactgtactgactgcagcatgccaggcttctctgtcctttacagtttcccggagcttgctcaaactcatgtccattgagctggtgatgacatccaatcatctcatcctcagtcaaccccttctcctcctgccttcaatctttcccagcatcagggtcttttcaaatgagtcagctcttcacatcaggtggccaaagtactggagtttcagcttcagcatcagttcttccaatgaatactcagggttgatttcctttaggattgactggtttgatctccctgcagtccaacagactctcaagagtcttctccaacaccacagttcaaaagcttcaatttttcagtgctcagctttctttatagtccaagtcatacatgactactggaaaaaaacatagccttaagtatacagacctttgttggtagttagctagaggatttcggagaaggcaatggcaccccactccagtactcttgcctggaaaatcccatggacggaggagcctggtaggctgcagtccatggggtcgttaagagtcagacacgactgagcgacttcactttcacttttcactttcatgcattggagaaggaaatggcaacccactccagtgttcttgcctggagaatcccaagggacgggggagcctggtgggctgccatctatggggtcgcacagagtcagacatgactgaagtgacttagcatagcatagctagaggatttagaaggctctgacaagtgcagtttctctaggatttcggctaagaagcagggaccctgccaaggcaactactaaaaaaaaaaccagacagactttagcaatcagctcagctgactccatactgaagagtatatccctctgaaccaaggattcagaagagatgaattcatagaaacctccctgtatcttctccaaaatttctagcttgcagtcaaacatttttatccccaggagaggtttctttgaaagcaagtaagtcatacaataggaaactccaactatgaaaatggaacattctctaaagaccaccaaaaaacagactagttaaaaacaattgttaattctccctttaagatacagatatgaaaatcttccctggtggctcagatggtaacgagtctgcctgctatgtgggagacccaggttcaattcctgggttggggaagatcctctggagaaggaaatgacaacctactccagtattcttgcctggaaatcccatggacagaggaggtcataagattcggacacaacttagtgactaaaccgccaccagtccattcatctaccaatgaatcgcctactgtatgagttctgtattggggagtttattggccctgaggggtcttttgtatctgaggacattcttagactctcctggtgctctaaaactcaactcctagaatcccaacagacacctaactaggagtaggaaaagatactccttctaactgagcacctttgtagaatttttcccccttacaatgaaatacattcaagaatgacgagatgtcactagactcctgttttccaacatctctccgaaaatccaaaccctggtccacatctctgtgtctatctaaacaggtaattatactttgggtattaaagtcttctatctctgacctacccagtgcacaaaaaacagtttaacctttaaaccaagtcatgtacaccattttactcctcgaaagatgaatttatgttattccgtcaaatcagtatcaacctgacctttaaacacatcagtgtttcttggaaaaatattatggctgggatgccgaccaaggtaaacaatattagctgctcctacccagcaccgagccatgctgcgcagaggc

SEQ ID NO: 45907 - DNA, 1199 bp, Bovine  19866880543334
  misc_feature (1)..(1): n is a, c, g, or t
ntaggaaactgttgatatggcagggaagtactcagttaggaacaggggttagtgcagagtcctaggggtgcaagctcgggggagggggaggcccctcaggtgccacctgaaggagtttgagctcctatagggagcgacagggaacacaaagggccgtgatatggggcagaaagtggcatttgcagctgagccctagtggtttcctacgagtggaccacctgctgggggagggccccccacgtgtgcgctcttctgtggggagcttccccctcccaccccagccccgagacccctcctactcctacttacaggatccatggtgaaacaggctcgattccagtccaaggagctgccaagcttcttcagctggtggtaaatccggtcacctttcctgggagtggacagacagaccagggtcagcaatggggtctgggctggcgggtgacatcaggtagctaaaggggcagaaggtgggggtcactcattgctctgagatggacctgggccctgggcccccatgaccctcagcctctgtgggcgggtctgaccctgcagccagggtcgtggggctgcgatgccagcagggacttggcactcactcctccttccacttccagacctcctgcaggaaagcctctcgccccagctggtgccgactcagcccctgctcgcgccagagtttcttctccaccaccacctgggtggcaatgcccgcgtggtcacagccagggttccacagggtggtctctccgcgcatgcggtgcctgcagggagcatcgagaagcagaggtgagcgagtggtggagctgccctgagggaagcagggactccagacaggaggtcgatggactcaggaaaggaaggggtggtggattagaactctctccttgctaaaatcgtcagggagagatgcgtgaggacagcccaggcaatttggcaaaagcaactaagaggaggctcctgcccaactagatagcaaaacatatcagagagctatgatcattaaaacaagcttccacaggaaccaggaacaaagttaccgattaaggaaacaaaacagtgactggaaacagatctaagcatatttagtatttgttaagggtggcatttcatgtcagtggagaaaggacaaactgttcaataaatttgttggagactgtagctaattgcatggaaaattgccctacttccccaagtca

SEQ ID NO: 45908 - DNA, 1131 bp, Bovine  19866880553409
  misc_feature (1)..(1): n is a, c, g, or t
ntgactcccctccctgttctacttaattaaacccaggagaggggggctgggggggataattagggaggtctccagccgctgcttaatgagccagtaattaaccagccagggaggggagctggcctctggccagactcgggagagcgggcagcctccggcctcaccttcctaccctccacccggccaccccagacaccagtcttgagtccagagggggatcacatttattcatataaccaaacatcagacagttcagaacagcagtggggagggagggtgggcagggctaaatgtcctttcacagcctgtaggcccctcagtcctggggctagggggtgcgggtgatggagatgtgagaatggtctttatgtctttgccgggccctctcttcctttcttcttattgggaaggagggtggaattcccaggtcaaaaccttgggagatttgctgttctttgggagatggaggacagagccctgagatcccacctggtagcttgactactggggttgtccccacagctcaagacggagactctcaggcactccctgagatcagaagagagggtgaggtgtcccactgaggctgggatcctctcatagcctcataacacacttggttatggcgggagttattatccatcctaccttggctattcctaggctttgagactttcacctgctccacttcccaggaaaggtggatgagggtgatgaatattgagatttatgctgggtcttccagtctctggtgctcctccctggcaggggtgagggcatgcagtggggctgcccagcttttgagccccaggaatgcagaggggctggtggggggctcaagtctcagcaggtgtgtgtggggggccgggacctttgctcctccattcgacccccaccctgaactctcagcagcaactccaggagctcctgcccccctgggggtaggggaggctctgaccgctgggcttccatccgctggcactggaggagtggaggagggggaggttgatggtgaggttttaaaaagagcagaccttgaaaggagccagggctggtgtgaggggcatagaggacaccagtgatgtggggatagggagagtaggacctggcgagggggaagatgcctgggga

SEQ ID NO: 45909 - DNA, 968 bp, Bovine  19866880616843
  misc_feature (1)..(1): n is a, c, g, or t
ntgaaacaaactagataaaagtataagattatcatatagtccagttgtttttaaacatggctgctcattagaaacacatctggagttttggagaagaatagcaataatttgggcatttacatttttcaaaagattccaagataattctgttatgcatctggatttttaaaagtgattacaagtttttctatgaaatcatagttttagtgatatagaattatattattttctgttgactgatcatgatacaaagatattaagtgtataatagttatataatcaaaatagtaaaaagtgttttagaggaggaaatggcaatccactccagaattcttgcctggaagtttccacgggcagaggaacctggctggctacagtctattgtggtcgaaaagagttggacacaactgagcaactgaacctacatgaccctcctacaaaggtgtgtctgtggtttcctgtctttggacacgtaagacttggaggcaaagaaatgtggatttggaggagtctgtggccagcttcctccctgcaggcccaagatcaaccatccaacatagaaaagcctttgatttctccatcaagtctgaatgagagtcttgctgtgtagagtattcttggttgtacattcttccctttcattactttagacatatcgtgccatttgcttctggcttgcagaatttcttttgtgaaatcagctgataacctgatgggagtccccttgtatgttatatgccattttccccttattgcttttagtattttattaatatctttgtctttaattttcacagttttgattactatgtgtctcagtgtctcctccttgggtttatcctgtctgggactgtctgcacttcctaggcttggttgactatttccttttccatgttggggaactttttagctattatttcttcaaacattttcttgggtcctttctctgtcccttctccttctgttgt

SEQ ID NO: 45910 - DNA, 2593 bp, Bovine  19866880686101
  misc_feature (1)..(1): n is a, c, g, or t
ngaagtgatgagactgtggcgctcaccgccttcgtggtcatcgcccttcaccacgggctggcggtcttcccagagaaaaattctgagcagttgaggagagtggtaaggcagctatgtgtctgctctttgctgatgccctttcccgtcaggagcccagtccacagacctctcccccacacacactttcttccaggaaaattccatctcaagagcaaacaccttcttgggggcgaaagcaacctctgggctcctgggtgcccacgcctccgccatcacggcctatgccctgtcgctgaccgaggcccctgaggacctgcggagagctgcccacaacaacctgatggccatggccaaggacatcggtggtgagggggtcctggcagtggtcctgaggcttgggagagcttgagatccctgagcatgtccaaagggagaaacagaatgaatggaggccctcggagggaatcagagcataagcgggggtgattgggaaatcaggagagactaaaggggggggcgtcaaagggccagacatctaagatcctcccctgttcacctgtgggtctcctttcactccagataagctgtactggggctcagtcaccacttctccaagcaacgtcctgtcacccactctggctccacacagcccagcagaccccattccccaggctccggccctctggattgaaaccacggcctatggcctgctacacctgctgctatgggagggcaaggctgagttggccgaccaggctgcatcctggctgacccgccagggcagcttccaagggggattccgcagcacccaggtaggggctgtcccgggattctagggtggctggtcctgagcccgagtacctgagtcccggcccatttgccccaggacactgttgtggctctggacgccctgtctgcgtactggattgcgtcccacaccaccgaggagaaggggctcaacgtgaccctgagctccttgggccgcagtgggctcaagtcccacgtgttgcagctgaccaaccaccaagtccacaggctggaggaggagctgcaggtgaaccgtgccctcacctgggtgaccgggacacctgggcctccttcggccaggccagaagccatccccttttcctcacccctgctgaatccctatggcccctctttctgataactgtgggaagacttactggctctgtgagctgtagcaagtcacccaacctctgagattcattgatctgatgtaaaaatgatccatgcagaatctacagagggtttaggagatggtggagagagaatgcaggtgaaggtagaaagtgttgaaaagagaggtggggagaggaggtggagttattttggtggaggaggtaagttgaagcaacagtgtgcccttctgacatctctttcccttttgtgcttgtgaaagttttccctgggaagcaagattaacgtggaggtgagaggaaacagcaaaggaaccttgaaggtgagagctggtggcactgggcaggcaggcccatcagggtgaagctggggtgttgagtgggagacctgcgggcagagctcatggtctgggaaggaggaagaggcccctgggttgcggttgcctgtgctctgtcctgggcaggtgcccctcactctgctctgccctctttctgggcacctgtggtccccttcagccctcagtgctgatgctcaaacacttggcccctcaagccaagtgtctcccctgagctctgagcccctgtgtcccacagcaccttagacgtggttgagccccaaaccccttcctcctcctgtgtctccttgtctgactgacagtgtcccttccatacaggagcccagctgccactgcagaggccatcttagtgccccctgctccatcctaagcctgtcctcatgaccccagtacctcctcgtctgctttcaccccagccatgcccacctccccagcaggacaggtccttgcatctatacacatctcctggccctgaatgtccttcaggtgcttcttgtcccccatgacacactcattctcctcctccaagcttctcctggcagccattcctgaacttttctctgtagcttcttcagtgcatgtgtacagtgcctgcccccatgccaggaccctgctccgctctctttctcacccaacacctcggctcctttgtatttttggactggtctgggaggtggatgggaatgggcagagggcctcgaagctcttagcccaggagctaaggggtccagagccttccatgtggctctggagagaggtctgtggccccaaaggtcccatgtccccttcccaccccttgttgagccaggtcctttgcaactacaatgtcatggacatgacgaacacgacccgccagggtcttcagattgaagtgacggtcatgggccacgtcgagtacacgagtgagtgttggggtcacaggctgtgggtctctgaggggggtggtgccagggctgagccacagtgctgtcccctcgcagtagaggcggaggaggactacgaggactaaagtaggaggactctccagccggggatgaccccgaggcccactcccggcccgtgacacctctaaatctgttt

SEQ ID NO: 45911 - DNA, 4462 bp, Bovine  19866880710146
  misc_feature (1)..(1): n is a, c, g, or t
nagaacctggagcggtggtagggacgttggtctcagtcctggagatacacacagacactttgttgccaaaggcttttattgagtccctggttttgcctagggctctgttcagggtacccggcacagcaggaatccaggcaccatctttcgcagctctggctcgtcctggggaagctgggagagcaccctcacacctggcagccctgtgtgccatactcctggaggaagctgttgagctgggcacagggtgtccgatggcgggtgctctggcacatgcgctcagagggcatctcctcaatccagctgttcgagtccagcaagtactgggggctgcaggcaaaggggcagtgagcaggggtcagcggagggtcagaggcagaccttgaggcacctggcttctgagggcacaggggaccgtttcccttgagaggcgtgggcagagaagaagactgaggggtcccgagaactcactctcccttgaggtcgtaagtggccccatccagacccatgatcagatattctttcccaggttccaactgaaggcggcaagaggctcggaccaggaagtttctggtctgatcagcggtggccctggcatccttggctgaggggtgaaggtccacagagtcattcgaggggaagaggaggggtgggacagcagggggccggggggctttgcgctgagcctccatttgaccctcaccactcccagcgggcaggtgggactgcattcctgtctgtggacaagcccagggcttctaagaggctgaggggctttgagctcggactggctgcagtttcactcctccaggcaccaaggccccaaagccagacctcagctccccagtatgccccccggccctgcccacttatcgtccccctcttactgaaatgcaggacttgggtgatacgggtctcaaagaggcggaaagcagccctgctgtcttctcggagaaccttaacctggaagcctgtggggggtttaggagaagggagggaaggttagttatcccgaggctaagaggatgggaggtcagtgcagagtgacaaggctgcccatgggcctgagaggagcaggccaaatctaagagaccttgagggggggtcagggccagggccagggccagggccagggcccgggcgggaagactgaccgtagtccactcggggagagtagcaggcgaatttcatccggtaaccctccaagtcctgctgcccacgctccagggcccggcgctgtcgagggcacttccctgaagtcaggggcccaggtgagaccgtgtaggccccagccacgccgccttcccacccctgatccccggcccagtgtctcaccctcagcacactggcagacatccgcagagcacaacgtggacaagagtttgctcttacgtggtgccccataaaacacagaacacttgtgctctagagaaaagcagagaggggcgttcattagggcactcgcctctccttgcctccccagtcccatggacccacaggactcccttaccaccctcactgccacctatccccaccctcccgagagtccccgacgtctcaccagggttgtagtagtcatacaggatggcactggccggctgtaccagccccacgggcacctcctgcacagctccaaagcccacacactcccgggaggtggggacctgccatggggggcgatgggtggaggggaagtcagggacccacctctgggccctgcagaccgctatgatggatttccttgcctgtttggttccggtcgatcttatcttcagtgtccttcaccatttgttaccttccagcctcgggatttctaaaaactgctccccaaggtctctgctgacttcactgctcacatggtgacctcaccccagtctcttgtcctggcaccttcacagaggctcacttcatggacacattcttcacgaagctctccctaccctcagggctagcttccagaccaccccgattctgacctgctcatttcttaccttcctgcttcgtccctcccagagacacaggccccagcgtaggcccttccccttctctgtgctctcctggggcagtctcaccgctccccaaactgcaggcgcgtggctcctgaaccaaatgttcagcctgattcttgtattgggatttttacaagatgtattaaactctcccaattcccactgcctgccctccaaacccactcaccccctccatagcttcactgatacaactaaggcctcacttgtctcctaggtaccaccaagtgctagccctctgccgtcctctctgacccgccactcgtgtaggccctgatccctctcctcatggccacgctgctccagtccagcctggtatcgcacacgagtttccttcctaagctgcacggtgagctccctgacttgacatcttcctcattttcttcaaccagactcctctgcctggcttctctagccaacagggtccgtcccctctgcacacagtgggcagggagggcctccccgacccacagacacatggcgaatggtatcacagtattaacacgcctttttcacatttctctccaaaggttacaataaatattcaaaaaaattttggagggccatcagagagttgataactgtgtgttagtcaaatttggccatgggaaagaaaaacaacaactcttctgggtccaccatcattataaaaacaaaaacaaaacacacttgaatatcaaaacgggaagttcaacaacaaaaaagccgtccctcacgacgaataaattcaaatttaagaaaggcgctctctcaagccctccccggctgactggcactgggcccaaagccaccgaaggggctcagccccgcctccctgcaggcagcggggaacctccctggccaaggctctgaccccctcctgtcctgccttcctgctcactccacaaggtctctcccagagcagtagctgctgatacacctgcctcctggaaatcctcctaacacgagctcaggaaacccagtgccagctgtgcgcccctctgtcaccctccttgctcaccgagtcgaagtacagcaggacgtggggaccctcggtctcaaagtggctcacgtaacggtcggagagggaggtcagctgtggggaacgggagccgggagtcacaaggagaaagcccccggccgcctgcacgtgacagggctcagcagctggggctgctgcggggatggggcagggctcctggggcacaggcggcccctctgggtggctggtcacaccttctccaggtcagcccgcagggcgtggaatccactcaggagggtgatgtccgcaatggccatgcctgacagccccaccttgccagtccgcctgtggagacatgtgcctgttgtctgggtcgccccccacctggtgccaggctgcagacacccagccccaacctcggctctgcctccctctcccagcccggcagcacccacacgcccagggccaccccagggctcaccagatgcacacagtgtactgcaccctggattcccgctcctcagctgccttgggggcctccctcctccggcggttcctccgaccgtcaaatagctgcaggggtgtcacgggccgggagtgggcctcggggtcatccccggctagcaagtcctcatactcgtagtcctggtagtcctcctccgcctccactgcgaggggacagcactgtggctcagccctggcaccacccctcagagacccacagcctgtgaccccaacactcactcgtgtactcgacgtggcccatgaccgtcacttcaatctgaagatcctggcaggtcgtgttcgtcatgtccatgacgttgtagctgcgaaggacctggttcatcagggggtgggaagaggacatgcggacacttagggccacagacctctctgcagagccacatggaagggctctggatcccttagctcctgggctaagagctttgaggccttctgccctttcccatcctgcccctggacctgtccagaaatacaaatggactcaggtgttgggtgagtagggggtgcagggtcctggcacgggggcaagcattgtacagaagcaccggagaggctttaatggaaagttcaggaaatgcgcctggcctaggcttgaaagaggaaaatgagtttgtcatgtgggacaagaagatcctggaggtcattcaaagctaagatatgtgtgtacatgggaggatctgtcccactagggaggtgggcggggctgaggcgaaaacagaggcggaggtactggggaggtgggcggggctggggagtaagcacacgcggagttactggggaggcgggtgcgactggagagaaagcagaggaggagttacactggatttgggcgcggctggagagaaagcagagaaggagttactggggaggtcagtggcagtcgggggaaagaacatgaggagttactggggaggtgggctgggctgaagagaacgcagaggaggagtta

SEQ ID NO: 45912 - DNA, 2095 bp, Bovine  19866880713797
  misc_feature (1)..(1): n is a, c, g, or t
nggactgtcatccccctgggtcccactgcataggaactggtctgtcaccacctctctgacatctgtcaggttggggaacgtggttttgtctttgaggacgaccttgacacagtttgtccactgcaggaggggcagaagaggacacaaggatggagtgagcgagcccagggcagggcttgctaggcccaggaggagggatgacttggggtcagaggtagaaagcagccagagctaggggatacagagagaaatcccatccccaccctcaacagcatccagaacctgagaccctcacctctgaccctgtcttgagattaatattcagcttatccccgttcaaagccacaaaatgagcgggaatgctcacttggttcagaagctccttctctgcagtcaaggacaaggatgtcagtgctggtccctttacccagcatcctgacctggggactgcagcacagcccacgatatcaccccccaagccttggtgccagtccctccagcaccgagtccagcgctcaccatgatctcggcaggtactgcctgggagtttccgcagagccaggttggcccccaccgtgcaggggaggcagatgggcctgaggagaagggccagggtcacagaggcccatccttggtgccccctcctccagggctccccaggacaccctcccctatagagggtgccctcccatcccagacccctgcacctagcatgggtggacatcttcactttctgggtcagctttagcaaagcaatgtcatcgccatagaactctgggattccctgactcttcttggaaaagacattgaagcctggggagatcactgcctcctcaatttggaattctttgctcccctgaaagttgggatcccctggaaacaaagtagcagattaggctggaccagggctcctgaaggggccagaggctgggaacaaggggtgggagctctgcccaggagatcgggaatctggttcgggcccttccttacccacactgaccctccacagcgtgcggtcctcggcattgcggaagcagtgagcggctgtcaggacccactggtcggagatcagggccccccggcaggtctcctggctcttgggctgcagggggacaggtaatctcagggactgctatgtctctggctcacggccgcacctctgggatccaagccccatccctctttctgtgtaccttaatagtgacgtgccagggtgtcctctcctgggcagaggcattggcagacatgttccctaccccacagatggggtctgtgagctgggagacatctgtgggtgtgaggagcagatggtgaaggaggccagtgaggggcaatgtgagcaggtgccatccagggaccctcagccggctccacactggccacccccctccagagagggggaagtgcactcacccagcatgtgctcgaagacctggctcagcgcctgtacatccttcagaatgaaggcgtgcctctcgccgtccttcttggaccccaggttattcagttctttccagtccacgtgtaggctgcccacaccgatggcatagatgtctgagggggagggaattagcagaatctcacagtgagtggctatcccgcagcacaggaagctgtagctgggaactcgctgtgtcccacgaagccctacgtgagcgggatgccctcccccttcctccactacctatctgacctcatttcctaccactcctccccttcagtctcttccagtcacacaacctcttgaagttcctgaaatacactcccacctcagggcctttgcacgagctttgtccctgcctggttcattcctaccccaggcttcccacatgcctcactctcttacatttctaagctttgattcaaatgtcaccatcgcaggaggcctgctgtggcctccttgtgtaaaactgcaatgacgcagacatctcgatttcttttctgcttaactttatacctcagtgcatgtcaccctctactgtgccatatggcttccttatttattttctgtaatgcctggagtgggtagaattatgtcttctcgaaaggtatgttcaggtcctaacctccaggacctgtgaatatgctcatatat

SEQ ID NO: 45913 - DNA, 1220 bp, Bovine  19866880782743
  misc_feature (1)..(1): n is a, c, g, or t
ngttctgagtgcagcgactagcaggactgggggccaggggagggcaattaatggaagctgggcagcccgggtggtcagagcagggaagagagattcggtccccagtggaaatgttgagcgtagcctggccacagcagtagggaagtgggtgtgatctcaagctgcctctcccctccaaggctacacgtggatccaggagtttcgaaaaagagatggttcctacggggcttggttacatcgggacagtagcacctggtgagtttgggggagtgtcctgggtgtatggaaggggccagggctggtgggggcagagccagctactatgggagggtaaataggccaggagccaccaggagtggggcctcccctttaccgggaccagtggctatccctagcaatgccttcgtctcctctaggctcacggcctttgtgctgaagatactgagtttggcccaggatcaggtgggcggctctgctgaaaagctgcaggagacagccacgtggctgctgtcgcagcaacgggatgatggctcattccacgacccctgtcctgttatccacagggaaatgcaggtatggggctgggaggctgggccaagggcataggagggaagagtagccctgcccctccccactcgtggttggtgcctccttttctgcccacttcaaccagggaggcttagtgggaagcgatgagactgtggcgctcacggcccttgtggtcatcgcccttcaccacaggctggcggtcctcccagacaagcattctgagcacttgagtagagtggtaaggcagctatgtgtctgcccttcgctgatccctttcctctcagaagcccagtccacagatcctcccccaactttcttccaggaaaattccttctcaagagtaaacaccttcttgggtgcgaaagcaacctctgggctcctgggctcccacgcctccgccatcacggcctatgccctgtcgctgaccgaggcccccgaggacctgcggagagttgcccacaacaacctcatggccatggccaaggacatcggtggtgagggggtcctggcagtgaacctgaggcttgggagagcaagacccctgagcatgtccaaagggagaaacggaatgaatggaggccctcggggggaatcagagcataagcgggggttactgggaaattaggagagataaagggggggcgtcaaagggtcagatactaagatcctcc

SEQ ID NO: 45914 - DNA, 2233 bp, Bovine  19866880796303
  misc_feature (1)..(1): n is a, c, g, or t
ncccaactagctcctctgttccacccttcttcagacgatcgattccgtatttgcccagccttcctctttgagcctccgcttcttcctacgtgcctcaggggcacagcaggccacagccctatcccttccccgaggcgcctcactctgcgcaccccagtcctccgggctcagcaagttgtcggtgaaaaagcgtgtcgggtccgcaatctcgctgagaagcatcagctccgccatcttttcccccccaccccccaaccattagacggtcccccaaggcccgcctcttccgcatcatcaacgaatcaatcgactcctaaaaagggaggggggcgtcccggaagtccttccgaccagtaagaggcctgggtactgagcacatgcgtcaatagaagagccggtcgtacaggctgggccaatgggagcgcggcaggacgctaacacttcaacagtactggacagtgaggtttgcgcatgcgccaaacagatctccgcctgaaagcgcctaggaagtgtggccttcggtctttggagttacgccctctgccccagagtgtcctaaatttagaagtttagctcatcgattcatcttcggagatggacaagcccccccaaaacatagcacacgtgactatatagctttttaatggtaaaaagggatgctgagaccacagctacctcccttaggaaggcagaagcttggagtgggatatggtgcaactctcccttggtccccaccaaatctcacagcatagaccacacttcacaggttcctgtctcttttaaggtttaacttttaatcagccaaacatcttgcgcagtccttgagccagccctgcatcctgtttcttcccctgaatgatcacctttcccagctcctcctgggctgcccggtttttggggtctacggccaacaccttcttaaggtcagtcattgctttttctaggtttccaagagcagcctgggcaacaccccttcggtacaatgcttttatatggccaggctcccgctccagcacccggtcacaactttgggccgccaaatggggctgccctagcagcaactgacaggcagccaggttggcgtgaagtacagttcgttccggagggccaggtgggggtaaggtcagcagcagccgaagagcccgtgcatagcatcgggcagctccttccggattccccgctcgaaataattctgtgccccttgcacgttcttctctggccaaggcctccttctcggtgtcctccagctcccaagagtctcgaccctgagtgaaggaggccagtgtgagcctgacaggaagtccagagcgcccagggagctgaagctctgcctcctcgccttgacacatggactccaagcatttctctatgagctccccccaagtttcctccctccatgggcctaaccccacagttagttctgtccagccctctggcagccctgaccccaaaggaaatccagaagcctgtaccgtgcagcgggagcccagcttgggtttgtccaagccgtgaccacggactacaatcttcttgacaaagctgccatcaggacagtaccagagatcagaagcttgaaggggctctgacatcgcactggctgatccatgagacttagcagagtctctttcaagttcagcaggcagtttttcaatttcctgaggattctctagaatttggctagctggatctgggctcactttcagctcaaggatttccgtaggagattctccccgatgctgcctaatctgagtaggtaattcaaggttcttttccccttgttgttgcggttgacagctgtccttctctcccattgaattgattggtgatgtatccatttgggtgcctggccccttccaccgtgggtaaacagttttggatagaaagggatggaccgagtccaggtcagcacctgatttgaaaaaaaaaaaaatcaaagcaatgctattggcagaaattttatttagactcctttttccgtccttttgggactccggaccgtggtcctcaaagtcctctttttttttttttttttctttcccgaatctctgtcgggtccagtctcccctccaaccccgaactacaagttccacaattccctgcggcttgggtagccattcccaactacggacacccgatcgagtcaaaaaatacctggggggggccgaagcgcctcgcctgatggcaatagccagaccattcaaatcacctcttcttccgaagccaagtgctactg

SEQ ID NO: 45915 - DNA, 1288 bp, Bovine  19866880846067
  misc_feature (1)..(1): n is a, c, g, or t
ngaaaatatcaggttaatccaagttgcaggacattctttaaaataacgcatcagtaccaaatatcagagatcaagtaaaagtatcaagatcaagaaatacaaagaaaaggaaaaaagtgtcaatatcatagaatcaaaggaagactcagcactgcccacagagaggtgagaactaagataggagagcaaaaaccagtggatcctggatcagaaaaaggacatgaaagggacaacaggctacatcgagtaaggtctgtagattagtcttactgaccagtgttatattctgattttgctaattgtactgtggttatatgggcttcccaattggctcagtggtagagaatctgtctgccaatgcaggagatgcagaagacgaagatttgatccttgggttgggaagatctcctagagatggaaatggcaacccactccagtattctggcctggaaaatcccatggacagaggagcctggtgggctgcagtccatagggtcacagagagtcagacacaactgagcgactaagatactgactacacacacacctatggtaatataagacattaacattacaggaagttgggtaaggatacagtgctaacctgtactatttttgaataaaattaacttttctgtcaatctaaaattattttgaaatttaaaaaatttgactatacatacacacatacctccctggaccttagttgatgcctcagagtagaagtttggttgaatatttcggtccctaccctcaaggtagagagctttttcaaccatttgtgagtacatgggcctatgagtctctttctggagggtaaagaggagggaggtgaggccacgcagacagcaggcttccgggggctcagtgccaggagccagaaggggctccaggccgcttcattctgacagcggcaccatctgcccagagctcgactgagcctggaaggttctggaagccagaaggactgaagtagtaggggctggaggcagggaggggctgggaggaagagggacacactgaggactcacggtttccaggcagtttggtctgtgccaggtctggttggggtttgcgctccaggaagccgcagcgctcgtcctctccgcaagtggtcaccgtctctttgcagaggccgctggggcctccaccgcagtcatagcatcgcatgcggtttcctggggggagagaaagacgtgctggatcaggcgctcgggggtggctggcacagggcgacgggcctctgtgacaggcgccccgggtgcctccttacccaaggcagccccca

SEQ ID NO: 45916 - DNA, 1635 bp, Bovine  19866880903066
  misc_feature (1)..(1): n is a, c, g, or t
naaatgcagcagagaaggaaggcacggattagaaaaggaaagcagaaggggctgtccatttcacacgtggaaactcagtctggtggcaccagcccagccccacaggaccccagcatctcctctcctctgctcctacctgggtacaggggcagcaggcaaagtacggccatcagtgggtccatggtgtctacctcaggggcagggacaggcagagaaccaggagagggaaaaggtcatctgacttcccgaaaaccagagctggctcagcagctgcttcatctgctgccagagaaagaaaactagggagtggcaagggggaatgttcccttgttgggggtggggaagaggggaacataatcagggattgggggctgagctgagggggtgaaaggttggccctgtctccctagtctccacacatccctagagtcagtcgatctgcaccacaggcgatgcccactgctcccccacctccgctgcctctcagacacacgtgcccacacactcctacatgaatagtcaaagcacacaaaccaactgagattgcaaaacattttatttaagtaaagtttcggttttcttttgggttttcccaagtggatgttacgaatacttcctcagagcctaggttaatattgtcttcttcaacataagcccccaagggattacactaattgtcttaaaaattcttgatacctaggaggattcaccatctttttcttcccttagggataaaaatgaaatcaacacttagagacaagaaaaaggttgagaacagttttaaggaaagtccagtagataaaaattccctaacttataaaaaataattctgggttgattattcaaagaagtgaaaatatttttagatttggaatgtgcctttaaattgcaatgtgcatgggacttccctggtagtccagtggttgaaaatctgccttccagtgcgggagacttgggttcgatcccttgtggaggaactaagatcacacatgccacagggcaactaagcttgccaccacaactactgagcccacatgcctcagtggagacttgatgcagccaaaaaataaataaaattaaaagcaaaagaaaaagattaaattaccagccattaagaaaaataaaatttttaattacaatgtgcattttgtaactctgagctactgcgttagcctccccatcccacagaagtctttaatattcatcaaacaatgggtacgtgctaagtagcttcagtcgtgtgcgactctttggaaccccagggatcaaactcgcatctcttaagtctcctgcattggcaggcaggttctttaccactggcaccacctgtttaataacataatgaatgtcttcagaactgagaacactacatttaatatcacttggcttacaaggagtaattcccttatagacaagaggtgtgtatcattgcaaatttcaagtcactgatatgcctcctttcctctgaaacatcttcaaactcatcccactttttgagctcctttgagtagaggagcacaacagcgtcggaactggtggagctgacagagaaacaatagttgaatgaactggaagaatgtgggggggtagtataataataagattagtcaaagatgaagatgaaacatctctgaa

SEQ ID NO: 45917 - DNA, 1856 bp, Bovine  19866880952206
  misc_feature (1)..(1): n is a, c, g, or t
naggaacctgggggtgactacctcagagacgtccttgactttttcataacctggggcgcgtagagcatctctctcacagctggctttctgtaggtgagatagggaagtgtggagagaggtgtgaggaacaaagcttgcttaggaaggactggggcctaaaggacctcaggatcccacattcctcaccttgtccccattcttgatgtagactgccttccgagtcagggtcttcttagactcagacacaaacagagcttcaatgtcctttgcagggagtagctcttgcactttacagatggatagactgggtcattgcagcactctccctcccctccccgcctcgtgcttgtcatcgagtggccctccactccttcccgtgagctggcggctgggcagggcatgacctgctctccctccccctcatcccttccttgtctcagaacttcacccttaacaagctgctctccctgaatgtctcttactctgttgctggcatgtggttgaccttggaagcctcaaggcttgaatcgatccctcagtgcaggggagacaaatgggcctgttgaggagagatggggaaattcaaggatcgtgaaccctgggcctactactgtctcagttctgcctctcccagccttttctctcagaatccagatggctcacctgatggtggtctcatacttgagcttttccttgagcctgacgagggccacgtcatagtcataaaactcaggaatgccttttgctttttttgcattgaggtcgtacttcggatgaaataggatttcttttacctcccactccttcctctgtcctcctgaagtacaagaaggggttcctctagaccactgaaatctgtgtaggcagcctcctgcctgcatgtcatccctaacccaaatcttccccatccctaacttgtccagcatgcaagggaagggctgcgatgaggacaggtggaaagtgggccctggaggcagtgtggcccagagggcaccgcagaagctcagaattgatgggttgcatccttacccaggctgaccttgattgagtgtttctcatcatccacagtgaaacagtgtgcagccgtcagcacaaagtactcagacacaatagcacccatacagctctcatgcccctttgaagggcgctggggacagcagcagagggaaagctcagctttcacaaatctcacaatctgatcaagagtgccttgcccttcctccgaccttcatttcaccctgacctcccttcctctaagttcccaccaccaggacactgcacttacagtgaccgagatcttggcctgccacggttgcttgtggtaggcagtaccatccttgtgctcccaaaccatgccacagagacccagtgtccggctttcatctgacaagaaaggagattgtgctaaaagctgggacagttcatttccaaatggcagctgtcttgcggagggaggccagtgtgtctgtggggagcagatgcccaaaagagggaagggaaggcaaggaaccactggaatcatgggactaagctcagagacctgggcattttcaggcccaactcctgctaacttgccatttcttgacctcttttggccccagcttccatatctgtaaaaggagggacttgagaaaggtctcggcatcattgcagaactcgtgattctgagatcagggagtggaaagtaccaggaagcaagaatagtgacctggaggtagaggaggaaagaaagggcttccagactttccagggctttaggaggagtggaagaatgagtgaccttgaggggtctggggagagctgagtttcctgaccatctccttatagccttccatagcttcctaccaagcatttgg

SEQ ID NO: 45918 - DNA, 1613 bp, Bovine  19866880957633
  misc_feature (1)..(1): n is a, c, g, or t
naaggagtttttttccctaatctgcatggggttttctaatttttttctaatctgtacatggattcagttcagttgtttagtcatgtccgactctctgtgagtctgtggactgcagcatgccagggttcatggattgttacatggtttggggcagccctgtggacaacccccagatggaatgccactggcaaaattccaccttccctgggtagaatgttcttcccaggatgtccctttcttccacggaatcccatctaagacagaaaaatctgacttcacaggatcttgtctttgcaaaggagtccgttatggggcagactctctacaaggcagctccttccacccatctcaggacagagacctgaatgccagagcccggtcctggggcaaacatctcggtgcctatatccagggagaggttccgcggcgagctccaggaaacaccatcatccttactccacaccagcatggtagaggccacctggcagccagccttatgagcacagagggagtagaaaaggaagaccacgcctgtcgtcgtgtcgctcaccactgcccccaagttcagcccatctggggtctccccatcatccacaatgaaagctgtcggagaccatgtgctgcctaaagaaaaaaaggaagagacccagggtaagcactttgaaggtgctctttccaccactccctgccattttcacctcctggctaggggacccaaggctttacgatggccccgaggcctacaagacctgcccttccttacctctcatgacctacctttgttcactccatccagccacacaaactcctcattcattgaatatttccctccctccttggggcatctaagctgttacactgcttagcatgctctttctcaaggctcactcacctcctctgagtctgctaaaagatcatgtacttaacattgcagtcagactctagcactctccttatctcttgccctattttggtttttttccactgtatttattacctcttaacacaaaaaatacatttagttatttattatgtatattgtctgtctccccattccctaccccatgaaggcaaggatttttgctctgttttgttcataactgtattcacagaacctagaacaatgccaagtatatagtaagtgttcaataaatgtttgaatgtatgctcaactccttggtgatactagtttccagatcactgccctgacaccttccctcctttaggttctctctacttctcagggatccagcagccctaggcccctaaaggcaggtcaagctccccacccatccaacctctcgtgacccagtcatctttataccctggtccatagacctccgcagagctatgaatttagctcctttatccgatgtcgacatttttctggcctcagcaaaggcaaggagagtgccccgaggagtggtggtgatgagcgggattcggaaagtgtccacggagccgatttgcttcccactcacccacagaagttgttccatggtcacaagtggatgaacctaggaagaggaagggtcacagaacaaaggtgactttgggttttagagtgaatgaagagaggcttggagtcagatttctctgggagaggctgagtg

SEQ ID NO: 45919 - DNA, 714 bp, Bovine  19866880967981
  misc_feature (1)..(1): n is a, c, g, or t
ngccgaatctgggcaaggagacagagacagtggctctgagacaggcagggccaaggtctaactggatcctcccgagatcagcatgcttcaggcctccactctcccgaccagaaaaatggcctttcactccatccagatagggaggacacgttcccttcaccacgcacacaactctctggaggacaggccgttcttcctgcccctccccacacacgccaacttaaagagactgtgctctgtgccctcagccaccaccaccagccctagcctctcctttcccaccctggcacccctacatctcagcaccaaccccagacccctccttgcgctgctctgctctgccagcggctgttcccagctcaccttggatgttcatgtgcatcatgaccacgggttccacgctctggtgggaaatccggatgaccctcgggtggctggtggtcggtgggggagctggccctggcggggaagccccctcattcgaagactcaacggcggtagaagagggggccacggacgaggcctgcccagcaccagcgggaggtgcctccgcacttggagtcgggggggggccgtgtcccattccccgtcatggtcacagtggtccccacattgatctagacgacagagatgacagggcaaacgtgagaaaaatacaagagcctaacccagagcaccccatgatacacttctaaagtctcctccatcctgggt

SEQ ID NO: 45920 - DNA, 826 bp, Bovine  19866880975054
  misc_feature (1)..(1): n is a, c, g, or t
nggccaggccgtgcgcacctgcgggggacagggagggaaagaagatcagagagccgctacctcggccgcacgcctcagcctccctctaagatgctccctcaaacgtccagcactccctgggaataagaacctcttgagtcctcctctccatactccgcctccgtcccctcccctcccctcaccccccacacacctgcactgccttgaagatggcaatgatgcctgtaggccagaagcagcagatggtggtcagcaccgcgatgggcatgtagtcgtggggcgggcgccttggctccagcagggccagccctgggccctggggtggcggggggagcgtggaggttactcctgttccccccggggtcgcgcctgcatagggctgtgaaaggaaagaaggttgtagggaggggacgtctatcattcttaaaccctctttgagcccaccagctttccacgtctagcagagaaagaaggttgctttcctcttttaaacctcctctggacttcaaggctgtttcccctgccagatcttgatctttgactccaacagaccacccaccccattcccagatctttctctagtctctcctctcccttggccccagatcgcctcctggtcccctggttctgttcctctttcccaccagtccccactgtgcctccaattccatgtcctgttccatccttctcccagccccctccttccagtcccctgtccgccctgtactcaccgtgcccaccgggtagaccggcacgtaggcagtgcaaggctgcagctgtaaagggtaacccggggctacgtagccacccagcggcagcgtgccta

SEQ ID NO: 45921 - DNA, 1371 bp, Bovine  19866880975512
  misc_feature (1)..(1): n is a, c, g, or t
nagagaaggctctttggttgtgatgtgagttctgaggcctaagtcttttcctacagcatctccttccctgcaggtgattctggtggccccctgattattcacaagaggagtcgcttcattcaagtgagtcttctctttcctttctctggagagatgctgagtggtcagcgtgggccccaaaacaggaaagctcactgcatgtggctgaaaagaggtggggggtggggcagagcctgcctcaccttcagactcttccttgaactggccaattcagggccatgggtctggtctgtgtgccaggggacagaactgaactgggtccctagtcctcccaggtcaggtcacttcagatgcaactggcagtagctgtgcttcctgggattaaggagttctactaaatgattcttggcaacccctcgctctctccaggttggcgtgatcagctggggcgtcgtggatgtttgcaagcggccacagcaagtacctggttatgctcgagactttcacatcaacctctaccaggtgctgccctggctcaaggaaaaactccaaaatgaggatctgggttttctataaggggtttcctgctggaaaggggcatgagaccaaattaaaacagctgcgacaacacctgtgttcaagatccttttggggtaaaggagtggggagcgtgcactagccatgtggttacaactgagatcacatctaacagccgtttttaaaggctcaaccccaatcccaagtgctgaaaaaccagaggctgagggagatgggtgagcttccacctcagtgttttactgagaccagcgttggggcagacgaggcacacggaatccagctccattccctagaagccgtccacaaggttttccttgtagacatcgtcgctgtagacaatctgagtcctcttgtcccggtggcagcccttagggctattctggacagctgtggagggaggagaagttccgttaaagtctgagggagagcaccgaccagacctgaggcccagagtttggccacctcaactctagcctctggcctttggatgcccagtttccatgctgccctctggtggccaggatggcttctctacctttagcccccttaggcctctggctaccaatccatggccccagtaaagagtgggcagttatcatggcacacgcaaacactgtaatgagtgttttgtcctcagaaataacccaaatgttattcttgacacatgtgaataatgttaaccgcctacttccagtcagtacaccaaaaattagaaaatctctatagacctttgctaacatgctggtccttcctggttccttctttagtataacgggttactctggctccgaactccctgtgcctactgcttta

SEQ ID NO: 45922 - DNA, 1395 bp, Bovine  19866881006052
  misc_feature (1)..(1): n is a, c, g, or t
ntggccatctttgaagccccggggcgcgtgaccccgggcggaaaccgtattggatggggtgaagaagggggctggcattactcagcagaaaccttttgattggtcaagggatctaggttacgtcatgggggcgggacctactttaaagagccggcgaggttaaaaaggctgcatgtaatcatggatgaaataaaagtccgagaatttttgagaaaacaaaatagcaattttttaataaaatctttttactacaaaagcgtgatctggaaggcggggaggctgtacaggcgggagacagtccaggatcagggctgcatctttcacttcttcctcttcttgtctcccggggtccccttgttcttcttgccaagaatcttcagaaggctcttggacatgtagtagggccggtctgctgagccatcattccgctccaagtcttccactaaggcgcgacagagaccgtaagagcgaacctttgggaaccaaccccactacccgggaaaatgagggactaagagacagctgcctggtttccagactgcaccaccaccggctggtttggggcgcagtttttgtaacctatgtaatcgtgtcctcatctgcaaagtagggtgaacgatactatatttcatagcgtgataagggttaacggaaaaaatatatgtcagttgcttgacagagagcctgctacacaggaaactctgaataaacgcctacagtatggtaaggaactccccactcactacagccacctgctgggaagtctcctggggctaatttcttccctagtttttctcgggaagataccagaggcctctgccctaaaatgccccttcttgggagagcccaggaacctgggagcgaatcagaggcctctgccctagaaggccccttcttgagagagcccaggaacctgggagctcattccctccattcttcccaaacacctgccctgaggatgttagaagaggctctggctcctataactcacaaagtcgctgtttctagaagcaccacatctcctaaagagcctgaacgatcttttaagctgaggagaggaggtggaggggctgtcttgtcactcacagaaacagaggaagagagtgtccacacacattccaaaaacactgaagaagccactggcgatgaggtaggcccctaggatggagacctggaagacacaaggctcccgatagtgttcctttggagagttggagaatgaagtggcctcggggtggaggggtgggaggatgagaaggtatggagtgggggtgggggtgggaacgtgtcactcaccatgatgggcagccagtaatagttgagttgaggattctcaaaggttttacccagactagggattcgacccgtaagaaaaagaaggacaggacccctagg

SEQ ID NO: 45923 - DNA, 1880 bp, Bovine  19866881027662
  misc_feature (1)..(1): n is a, c, g, or t
ncctagcagtcatacccaactcctcaactggagcaggttatctgttaatacctctgccaaaaaaatcactgaacacttgtgctgtgagctgatagatgttgaggatgcagaactgggagggtctctggctagaggagcccacctgtcacatttcccttcccctgtcaaggctcctttaggcatgagacctgcatgagttgtgacctctgagtacttagcaaatgacatcagagggtgagatggtctaaggtcggatagtcttttagacacagttgccagacagagtataaagaaaaaaaagtttttttttttattttgtggaaaacaaaagccgaaaaactaaaaccccaaactccagaaaaaatcctaaaaaatacgttttttttcttaaaaaatactgtataagtctctactactctccctccccgcaacagcctttcttgtgtactctcatctaagtgccctacccccccgcccccaccactatttgtagttcttgccgttgtaccccacttcccagtatctacccaggctgctcacccccatattctcttacctgccatcttattttgttctccctagaattttggtgagctttgtacccatcccatttccccagcatgcaagaactgtctccccttcccttctccagaattcagtcatcctttccccctaccactccctctcccaaggatctattccaagcaggagcaggtaagctgcctcctgccagattccctcccacttcccaccccccgtcccccatcaagaaatgtcagaacctcttcctgggcagccttagctaggaataaaacattttccagtctttttccccccgcctcattctataagcccttttccctccctccacatatccatgcacctctaagagaagaaactttatctgggaccccctattcccttggccttctctaagaactctccctctctccatcctttccttctgaagaggcagggtcttctctccaaggaatcttcggccccttgctgtgtgtctgttcaggctcccaccgtacctgcctgcccccgaccccccacccccctattctcctggaccagggagaccctccccacttcgcccagggccccggcgcccgcctcgctagcggatgaggacattgatctcagccacactggcctccagcacgttctcggctgtggtcttgccgtgctgctccttgaggtgccgcctaatggccggcttgtgagcgaagcgcacgtcgcagtaggagcagcgatagggcctcgctcccgagtggaggttgaggtgatcgtgcagcgtggacttctgcgtgaagcacttgccgcagatgccacacgagtgcgacttgacgccgcggtgcacgttcatgtggcggttgaggttgctgctgtggttgaactgcttgccgcagcgcgggcacatgaagatgaagtgctgcgcccgcatgtggaagaccagcttctccacgccctggaacacttccgggcacttggtgcacttgatgttctttaggggatttccgctggaaaagcctccgggcaggggtccccggccgccccctgcccccaggctgccccccgccccccgggcagccatggccaccgctgctgcctccacgaggcctgaggtggcccccacactggcccggcctccagggatcaagagcaggccctccccttccgcgtcctcagacaggctgtagcaggctttaaccacgccctgcggtggggccacagtgctgggaggcacgctgctctgggccagctccccaaggtggctgcccacagagcctccaatgcccagacctcctcccaggcccccgggaggtttgagccggtgtgccacctccagggctgattccaccttgacgatgcag

SEQ ID NO: 45924 - DNA, 923 bp, Bovine  19866881141829
  misc_feature (1)..(1): n is a, c, g, or t
ntcggatgagaaaataggaattaacattgaccaaggtgcccagcaaagaagcaagaggtgaggtaagggtcaggggagacagaggcttgtcaaagatgccacaaggaagagacagttattctcaaatgcctttgaaaggaaatctttcttattccacctcatcaggctggcccgagaccattcccagtagctcttctttccaaacccactacagctctctcctcggcataggtcagcaccctctccctcaaccccctacccctagctctcaggctccttcacaaactcctgccaccaccaccgccctaccctgctccctgtcccccaggactctccagctcacacttacccagtggcccaccaaggaacaggatgcagaggaagatgctggaggtacccatgtctggacctggcggggctcaggagtctgggagaatgtgatctgcacgctgagatcctagagctggagcacctgagtgagacagggagggaccagtaaacaaacacacctagggagtgaatctgagggtgaggcggaacagggaccagactcaacagcctgaaacagcggagttcctggccccgaagctctcacaccctccctgcctcctaccggagccttgtgcccttgggggtcttctctattcttgcagctttctctttgcttgtctgtcgcttttgaatggtgtctgtcagcgtctgtcactttccctcctcctcctctccctccctctccttgtctcaagctgctctttgctctttcatctccttgtttttgtttgtctgtcttccccttctgtgcatttaagtctctcaaagttactctcctaaacagccctggcccagatctgtttttcgagtggtgtttgagtgtggactcagcaagcccccacccacccaccaacccacaaacgcagctacag

SEQ ID NO: 45925 - DNA, 592 bp, Bovine  19866881169495
  misc_feature (1)..(1): n is a, c, g, or t
nacattcactgcttattccctgagaaagagggagtctacaactttctgctctgggtcacatctccctcccccaaaacaccgccttcacttcaaccctcaatcaggtcttaacccctaggcccagattctgatgttctttcccctcttctcagctacattctgtgacaaggctgaaacaagtgacttcttgctgaaggaaactctgcttccctgttgcctctgaaggaaccgagtgggaggagagaggcctcaccatctgggcaatgccacggttggtgaggatatagcgggcgtggatcaatccatagagcatttcagctgcttgctcaatcaggtcactctggttggggttgtcctccagctcctcatctgaaacatggcaccagccaaatgcaaccacttgtcttacagctttttaaggtgccctgcccactcccgggggctgctggctcttcagcccagcacccaacttggagcctcaccccagccacagcctgggcatctgacccagaaacatgggcctctgacccttccaccaacccaaggcagctctgccttccttccatccctcttagccttgcttctttctctt

SEQ ID NO: 45926 - DNA, 1206 bp, Bovine  19866881170999
  misc_feature (1)..(1): n is a, c, g, or t
ntgtgaaagcagccatataccatatgtaaatgaatgtgtctgtgttgcaataaaattttatttacagaacagtgaactggatttgactaatgaatcatagtttgcaaatgcctggttatagtttttaagatcatggatgctggatccagactacttgggtttgaagcctagttctgctgcatgactttgggcaagttgctcaacctttctgtgactcagttttcctcatctgtaaagtatagtatgtaccttttattgtgtttatgaggattaaataatgaatgtcatgtgctttgaacagtatctggctcacagcaggtgctggaaaaaggtgtttgttatcatgtttgcagttattactgctactatcatattactgtgcgccttgtctgttactgtagccttctgattggtcttccagcatctggtcttgcctcttctccctgcttctctgacgatctaactgctgtttgtacccagaccctcaccatgatgacttgtacctcaatgccagcagcttcctggccctgatcaatggggaaagagaccatcccaatgccactggtaatgaccccaggctcctaccttggtcccattttctgcttctctgaccttgtatattcccctttccaacctagcctgacccctgtgactaactcaggctctcttattcccaccctgtagcttggcggaagaactttctgcgtttgggccgcctggtgctgattgggggccctgatgatggtgtcattactccctggcagtccaggtaataagggactgtgtggcctgaaggttggctaaggacaccccaatcccagccaatctttatctcatttctaaaactggcctgcttcttccactgttcagttaatcccccccaccctccattcatcgtcacccaagacgaaaacctgggagtcatgtcccaacctcttatatctagccagtcactaagccttgctcactctgcttcctttccatccctaccagccccgctttgtgaaaactttgaactctgaactatttacagattcttagcatgttgcaaagatagtttagagaagtcctgtgtatcttttgcccagtttcccccaatgcctacatcctatgtaatgacagcacaatagtgaaaccaggaaattgacaaatcgctacaacgcatgtctatagttccatgccatgtaatcacatttcctaccagct

SEQ ID NO: 45927 - DNA, 1141 bp, Bovine  19866881174831
  misc_feature (1)..(1): n is a, c, g, or t
ntacaagatgaacctgtacggcttccacgaccgccaacgcgtgggccccgtctccactgtcggtttaactggtgagtgtgcagtaggacactggctccgagctgggctcagttcccctttaattgccagtactcgtgtttttctcccactgttcttgagcttgagcctcccaagcgcctgggagtggttctgtgcctgtcttcactccaagccttactgtcactttagctgtctcaccctttacactttttgagtccttgaagagggaagatgccaaggaaataataactcaggcagacctggggctggccctattctcagccccttagagctgtgtgacctcgagagagtcactcagcctctctgtgcctccctttcggcatccttgcagaaaggataccctacctgtctggcaggatgggtatggcttgcctcacccacagtgtttggtaactacggctcctcctttagaagaagaaaattagttactaaaaacccttgggtgaattctcataattattattgatttcactgggtaaaattgtatttgataccaatacccatggactgtatgtcaacacggaaccctgctatcatggatactgttacttcagtagttaacattagtcatggtggcttagtcgatcaattgtgtccgactcttgggatcccatggactggagcccatcaggctcctctgtccgtgggattctccaggtgagaatactggagtgggttgccatttccttctccagaggaagattcctgatctaggaatcgaacccagttctcctgcattgcaggcagattctttactgactgaactatgagggaagccctaatattagtcatatgtgcagctaaacaagatattttctcttcattaattaccccttatcttgtctgttggttgcttgtgttaagttcctttatagctattacctgcaacatgcttaaaacttggttcccaaacacaatggagatctgaaacacgatgattttataattcagctattaagccggaataaaactctatgcagaacaggaaagacaaaagaaatctgtgggtatgatgtgtcgtccctgccataaactggcaagagaattaatacgaggtccccaagcaacccaactgcaaaga

SEQ ID NO: 45928 - DNA, 1543 bp, Bovine  19866881210645
  misc_feature (1)..(1): n is a, c, g, or t
ntgttatggcaggtggtgcccttggggcagggtcccgggtccaggtaacactcgttgacgtcgtgttcgcaggcgtggccctcaaagccgggtgggcagcggcactggatctgggggtaggtggccagacacactcctccattgacgcaggggttggctgagcagaagtctcgaagctggcagtgctcacctgaggtagaggacggacggtgagggggctgtttccaacaatgcacacgttccagctcctccagagtgacccgctctcactctgggttatctctgtgtctgatttccgtacttccttcccttcttcccatcctctccctgtcctggtccatcatcctcagttttatcattttttgggtagggttctctctggagtgaccacattttcttccagccgaaaactgaacatgtggctattggtgggagtattgtgaatcaaccctgcttgggaaaatctgggacttggtgtctgtccctttagtggtgacctgggtggagaagatcccccggagtaggaaatggcaactcgctccagtattcttgcctgggaaatcccatggacagaggagcctggtgggctacagtccatgggatcacaaagagttggacatgaatgagagtcggacatgaatgagcatgtggtggggaagtagaaagcatggatcctctgaaggcaggtgacatagcccctggctttgcccctgccagctgtgtgcccttgggcagtcatctcgcctctctcatcctgattccctgatctttgggtggttgtaatgtatcgcggtaaagagattccacagccgtgcgcactagtgggaatggtggcagtggctgctggtactgaactaaataagcactttctgagcatcgccccctttcctatccacatcagccttatgaagtgtggacactggctgacaactgaggatccagacagcttaaatatcatatgcaaggtcatgtctagtcagtggcggaactggctatgggcccaaggagggggctgcccagagcccctcctctgaagcacaaggcctggcaagttgccactgcccatccttcttcttgtcatatatgctggtctctcacacccagttgcaggcccagtttcctcagaatctcctggttagtttaagaatctccattccctgggtctgctccagacccactagagcaggctttctgggatgggggcactagtatttttaaggccttccagggttgcaaagttggacatgattgagcacacacaatacatccatccgtccatccaccaatcaaaggtgactgctgtgcctgctcaagtctgagaagcctggcctctagtccacccctcctggaggcacccacatccaagtacttcctggtcacgtgagctttgcttcctggtccagtcctctccatcctgcttaggtgccatggagcctttctctccaggtcctcgcagctctgtcctggcacccctgacagggtagcacacctgcccagcatatgtcctgctcttgtaccccaggactgcacccctcctcctggg

SEQ ID NO: 45929 - DNA, 1324 bp, Bovine  19866881215425
  misc_feature (1)..(1): n is a, c, g, or t
ntgtcgatttcacatttactgaatgggggtgatgatacctatctctgagagtcgataaaataattaaaattaaataagacatggcccaaccctgtacttatcagtggttcaactattagtttcctttcctccttgcccgacagattcatctatgtgtcctgtggaattcaggatacctgggcattgcctactatgatactagtgactccaccatccactttatgccagatgccccagaccacgagagcctcaagctgctccaaagaggtaaggacagatctatgaattcccctgtgctggcactggaagtgtattgcattcacatggccttacctgactcaatctattttattagttgactcctagagactccctttattgttttcaggaattcatctcattattcacaaatatatcaggtgctggagatatagtcctgagcaaatcagtcatgtctctcctttaggggtttatgatccagtgataatctcatgggcacccctcttccctcctattaccccatcagtcttactgctttctttttctaatttcatatgtgactcctacttctcccagtgtgggggggccttccctgctcttggaggaaataagtttttgaggggtgaagggaggtaacaaagggagggttaacaggttcccttttagtcacgagagaaagatcctcgaactcatttgctctccattctccttccaagttctggatgaaatcgatccccggtctgttgttacaagtgccaaacaggatgagaatatgactcggtttctggggaagcttggtaaggactgaaaaagggaaagaggaaaaatggggaaggacaaaattacggaatgttccagagattaaagggtcttgtgcggagctacagccaggagatcagaattgggtgagagggaagatgggaaagaggcaaaacgactatgatgtacagactgatggccctttctttgtttcctttatagcctcccaagagcacagggagcctaagagacctgaaatcatatttttgccaagtgtggactttggtatctcctcccttttactttacccacacccccatcccagttatgtgaccctttctcctaattccagtttcatcatcagaggtctcctctcagccctgtctcattttaaacctatatgttcttcaggccccatgaccagtctccccacaatctctcctaatccctacctttaataaccctgcagtttaggcttgtttagggttgagggccctccctgaaagagagtgtggtagcatttttttggtcaattttgattggtggcattttcccctttaagcca

SEQ ID NO: 45930 - DNA, 663 bp, Bovine  19866881220379
  misc_feature (1)..(1): n is a, c, g, or t
nccccgcaccaactccatccctaccttctcactgaacaccccctggatctgcctgcccatcactgcccgttcccccttgtccacctctgcttttcatgacctctctgccttccccttctcctctcccttaactctgcccctctcacagagaccctgtcaggccggggaccccctggggactatgaggagatgatgcagatcgagtgtgaggtcatggataccagggtgattcacatcaagacctccacagtgcccccctcgctacgaaaacagccgtcctcaaccccgggcaatgccacaggtggccccttgccagcttctgcagcagccagccaggctcaccaggctgcccatcagccctctacctcaatcatctctgacctctatgactcacactgacttagaaccggggggtaagggtggaagcaaccaagtgggactgttttgaattgtcctgatccctgggcttgcggcaatttgtaaagggaagacaggatgtgggggttaagcacttatttggaggtgggtgggagttttcctctcttctcaccccttttttggaatatagagctcctcttatttctatgaacccccaatccctgcttctttccttgagggtgctgagtgaagttaagttttggggtgagtgggccccagtacact

SEQ ID NO: 45931 - DNA, 1543 bp, Bovine  19866881262020
  misc_feature (1)..(1): n is a, c, g, or t
ngaaaagcctacagacgtccgggactgcccttccctggtagggcccagcaccctcagctcctttcacatccagccttgagcgctagagccgagccagcgtgggcaatggtcccaacctaggggcttccctggaacccctgcccctcccactttcccagggccgcaccctccttgccgacgacctctttgccgcctactttggacctgggtctccttcccgacggttccgagcagccttaggagaggtgtctcgtgccaatgccgcccaagacttcctgccaacttccaagaatgaccctgacctgcactttgatgccgagcggctgggccagggccgtacacgccttggtggaggctctacgggagactgtggcggcggccaaagcccttgactataccctggctcgccagcgccttgggggctgcgcttcacgccctgcaggtgagaacagagttggggatcgtcataagaggggtctttgcttccagtcttctggactcccggatggtgctttcttagtcatgcctccgcccaactctagaaggggctggggcccagcttgccaaggccctggggctattccctagtccccaccagtccaaattggcagcttcctgtgggaacagccaggacacctttgtggctggagtgaagcaagtgagaggagggtgctgaggtccagaggtgggccgtgcaggccactgaagggccttaggttgggctctgagtgagatgggaagaaacagtgggaggctcccacttcaccagagctctattccgggcaagggagagagcactggagggcaggtagggtgcctggaggagcagccatgcgggaggaggtgttcaggctggagaactggaaggaggggcagttagggctggagaccgcaagagcagtcagctagtgcttcttccccgtctttctcctgggaccaggatttctacagtcacagcaactgggtggaactggggaggcagcagccacaccctcacctcctctggccgaggcaggagctccggagcctggcacaaggtacagctgtgcccctgctggtaagggggaagcccacagagccacctcctctcagcccatccagccactgggtcacatcctgaggtcaactaggaggtgacatggcttcaaatctgagacagcctgtgaggtccctcagttcaaccaaaggccagtcaattagctggcttccccaagatcacgcaggggaggacagagccaggaccactctgcagactgcagggagttctcgttcatgaggtttcctccctgcactggatcgcaggggactctttctctcagtccccccttccaactgaactgtgacccagaagctgccttctgtttattacaagtacacttcctgtccacagctcatggagggtacactccccgtaggactggtctgcatgattttctagacattctcagtctcaaatatcgagtctcattgccagccatgaactccagggtttagttcagaaagccttgaaaggtacccataaagggtacctgtgggccttcac

SEQ ID NO: 45932 - DNA, 1256 bp, Bovine  19866881265709
  misc_feature (1)..(1): n is a, c, g, or t
ntgcacacatgcaaatttataatcatgacagataaaaggacggcaaaatgaatacccagtaaaaccccctctccacccaggcaggctccctgctcccagatcaacccatggacatacctatgtccattaatcctgcctccacagacaggcaaacagatcccaccagccctcccctcgcttccagcgacactggaggcagagtggtccggcaggcagtatgcaagtcctcaccaagcgggaggaggagggcgaaagagtaaaagggtcatcgtaccacctgcctgggagaggaaggagctctggaggaggaagcgtggcatgcagaatcgcttctccaggctcttcctcccttcctccactccgacccactgttgggggcagggtcacaattcacaaaaacggcattcaggtaaacatctatcactcatatcaaggccaaaggcactcccttccacgacagaaggactgtgctccaaggtcagtccactgccaagggtgaaggtgacaggtgataggggaaacaggactgtgccagcactaggagagcaggctctgtgtggcttcattttactttccccgcaagctggaaccagcgtgtctcccctgcactacgtgcaacaggctcctaactcatccccttcgatccatcttccacacggcaaccacaggatgtttccgcgacaccaatctgagcatatctcttgcccagaggcccttctggacaggctgacttctgcttacatctttggccacatccctacaagagtctttttcactccagcacaccgattaactgcagttcctcagacacaccatgatctttcatgcttctaggtcacaacaggatgttcccttcgggggggatgttcctccacctcttcacttgcctcatccagtttggtgtcactttttggagttcttcctgaactcctccaggcttgtgttttcattacactttatcttgatcactggtcctcaaagtgtagaaacacaaatccttggccctcaccccagatcttctgaaacaagacttttgggcactgggcccatcaaccagtgttttaacaagccatctaggtgaatccaatgtgcatgtaagtctgaggaccactgacctcaacactaaacagcatgtagttgcttgaggtcaccctgtgtttaccttcctagcctgcaggcaagcctgatggcaggaactgtcttattcccaatgcccaggacagaatgaagcagagaagatgctcaataaatattta

SEQ ID NO: 45933 - DNA, 966 bp, Bovine  19866881302318
  misc_feature (1)..(1): n is a, c, g, or t
ncatccctggggcaggggtgggggcggggtgaggatcgcatcacaggaagcggcccacctcatcccaccgccagggaccagagataagggaagaggtagactgggacggcaggggcagcccgagaaagtaagggtgactgcaggtgtatcaccctgctcctgagggcagcagagggagcaagggggcgacgtcccagaggagggagggtggaggacccctaggggaggtgatcccagggaaggttcccagggcggctgggaggggctgctcaccaagcaggtcgagggagctctggtggttggagacaacgacgtagggctgtgaaggagggaagtggtgggcccctcgtacctccactcggatcccgtacaggtatttgatgtggagtagcatcagacgcaagatcctgtgggggtcccatacagcaaggggttccagcaggacccgctggcatacatctgccagcagggctcagctcccagccaccctgccaccttcctgggcatcttggcagtcttctccccttcctcgtccctgggctcggctcgctcagtgtctcctgcacactcactgccctccccatccactgctcgcttccgaccctgaggttccctccatcaccccaagcccctgggacctcacttcatgttctcgacgttgcgtcctcgcacggcacacacagggatggcgagcacagccaggaagaggatccagccgttgtagaaggccatcttgaagaagtacttggcactggggctgcagaaccacagagtgggcagcaggaggagcagcagcaggaagagcagcagcagcagagtccccgcccctggccacagctccattctggtcacctgcagggggcggggcgaagggcggtgggcctggttcctaggtgggggggcggggcggcaaggtgcgcgcggggaaggtttggggggctgtggggagcattaacacctgtccag

SEQ ID NO: 45934 - DNA, 1243 bp, Bovine  19866881314018
  misc_feature (1)..(1): n is a, c, g, or t
nctgcaggtgggtaatgttgcggtcaatgttcatggtggacgtctcgcagttctctgagatgtacttgtaatcctcggggcagggctccccgtccacaccattgacacaggggatggggacgttctcatagccccgagccacgtccctggcaggaggggagatggagctgggtggctagagtatggggtgagggcttccctagaagcaaggagagggccaggggaggggagagggtgttctgggggttcatccaggggtggggaggtaagggttgcagatcaaaggcaggacacttagttaaaaatctgaatttcagatcagataatcaggaaataatttttttagtacagggcttccctggtgactcagacagtaaagaattcacctacaatgtgggagacctgggttcgaaccctgggttagcaagatcccctggaggaggccatggcaacccagtccagtattcttgcctggagaatcccatggacagaggagcctggcaggctacagtccacgaggtcacagagtcggacaagactgagtgattaacactctcactttcatgtcccaaatatactctcagaacactcttaaacattaaaaaagtatgcgttgttcacttgaaattctaatttagccaggtgtctatttttatttgctgtatctgccaactctatctgtatgtgtttcagggggaacggaggtggttctggggactccgaggctccaagggggcctggggagggggctctgggtgcggagagagcccaggctcaccggcagatgatcttctccgtgcggatggcccgattccccaccccgagccggagcttgcggttgagctggagggcaaaccacacgtcggaccgctcgggggtcaggtcccacgccgtgtccccctccttgttccgcagctcagggttcgccccgcgtgacaggaacaacctgggaggggacaggagcccgtggggcacctggccgtgagaggtggcagaggggcgcgtgtggggctgggtgccgggtgggggctcacagcacgcagtcgtggtagctctcccgggccgcgatgtgcaggggtgtgtccccgtggtaattgacagcgtggaggtcgcagcgggcgttcaggaggacctcggcgatggcggcgctgccggtgaaggaggcccagtgcaggcagatgttctcctcctgtggaagtggaagggggcgaggcttgaacccagctggtgcacctagctcagg

SEQ ID NO: 45935 - DNA, 779 bp, Bovine  19866881342254
  misc_feature (1)..(1): n is a, c, g, or t
ntttaaatacttaaatagcccacttcactaacctgtactacttcagccttccaacacaacttaattttcttggcagccagtgccatggcttaggaagtaaaaagctgaaaagaactgctcaagttaacgtgtatgaaaaatagcccttttgggggcacagatcatttctttccaatgctctgttttgtttgctcttgcaaatatcctgtattatgttctttaaagaatctttttattctttttaaacaaaaggtcgcatggataggaggcaaggcaagaggggaagagggaatgtgagaccccagccccacaccccttccccacctaccccttttctgtttatatatttatactctatctacaagcccctgggggaagatgacatgttctttgataatagtaagggatggaatagtgagatctttaagtgaaatgatcggtgctcttgaccctccaagctacaatatgtgtgatgagaatatctcacccccatccaaacaccctatttccaagaccttgcttcacctgtgtaagaaacaggcataacttacagagtgaaggtgggaatagcattttttttttggtgcctgggaggtttctcccctggctagggctcataccaaggtgccagctggtggggagggggtgactttcggctgtcacgaggaaggtgggacagcagaacgtgcatgatgtctccatcacagatgcattcccaagtagatacattttagggtagcctgaccagagcgaaggagctgcacatgtttcctttaaag

SEQ ID NO: 45936 - DNA, 2025 bp, Bovine  19866881396316
  misc_feature (1)..(1): n is a, c, g, or t
ntcatttagggaattctgactgagtatgctgacttgtgctagattccctggaaaccaacatgaagactcagcttcttccctcatggctagtctcttgaattggaggcgagaacacggaatgtactttcagactgatgggaggtggacagccatgaccccttctgcacaggctgctgctttctctctctcttttttttttaattttttagtatttctttgtttttataattaaaattctttttatttatttatttttgcccgtgctgggtctttgttgctgcatgagggctttctctaattgcggtgagagggggctactctctaattgcagtacacaggcttctcttgtttcggggcatgggctccagaacacaggctctgtagttgtgtccatgggctgttagcccactgcatgcgggaccttcccagaaagtataagtgttactcactcagtcctgtccaactctttgtgatctcatggactgtagccttgtccacaggattttcctgacaaggatactggagtgcgttgccatttcctgctccaggggatcttcctgacccagggattgaacctgggtctccgacattgcaggcaggctaccaactaagccaccaaaccaggggtcaaacccatgtcccctgaattggcaggcagattcttaaccactagaccaccagggaagtcctttttaaatttattttaattaattaatttatttggctgcactgagtcttagttgcaggatattttttttatgaatagttgtggcatgcaggatctttcgttgcggcaggtgggatctagttccctgaccagggatagaaccctgggccccctgcattgggagtgtggagtctcagccactggaccaccaggcaagtccctgcacaggcttcttagcacggagagtctttgatctgagttcttcagccgatgtggagtctgaagcatgaggagattatccttggagcggcctgaactggtcctttcttggcatggaaaggtggttgctacttttttcccagtggacattcagctgggctttatctccccggcattcccatccccctcagaggcccatgtcactccagactagggaatataggcttttatctgggctttgtttcctccctgggaatagcaggtcccagacaagagaacttggtaagctctccccatggctgtcttatttctcctccttctgttcctatgtgggcttccccaggctgaaacaggtaaggagaaggggtagggggattcttcacttctccacagggttgggagggactgctgctgtttctccttaggggtctgggaaggtgtttggctcacgaagatagatctacccgttgacctccccctgcctctaatattaggaaagattcagagtcaatgagggtccagatcaggcacctttagaaaataagagcggacacgtaaatgctcattcagaaaaggaaaagtgaaaggaagggatacgggcatttgttggctattccagccttcgccctcctgccctcagatccccacattcgctggaggagaggtggggaaagccttatcctcttctctccgtctcgctttttgtagctgtcacttgagaaaggagctcacagtcaggcctagtgctgggggaccccagaagggaggaagccaggggtgggaggtggaggggtgggatcgctgacctgatggaggtctctggtctcacactgccccctccccacagacagcatccaggccatctatgtggtcttgggggaggcactagagctgccatgtccttcaccacctgccctgaatggggacgaattcctgtcctggttccacagcccggcagcaggctcctccactgctttagtggcccacatccaagtggccaggccctcccgagaccctgggaagcccagaagagaatccaggctcacactgctgggaaactactctttgtggctggaagggtccaaggcaggagacgccgggcggtactggtgtgccgtgctgggtcagcgctacaggta

SEQ ID NO: 45937 - DNA, 981 bp, Bovine  19866881409497
  misc_feature (1)..(1): n is a, c, g, or t
nttctacttcttccccgccgcgaaaagatcccgggatatgagccggaagaggcatcgcctggtcccggagacgtttgggttgaagaggcggcgggaactgggggatgtagaggcagatcctttgcggggcgagtcaggtaaccatggcaaccccggggcgaggctaaagaccccagctggcagcagcctcacctctggtaaccctgtatgttgagacaacagcgccccagtgtggtatccccgcttcccccgcctcagttcacgtcgcagtgactcggtctctccgcccaggatctgcgcgagaggcagtcgcagagatagtgcggctgttcccgcgagtcctgtttgaggatgcgctaccccccatcgcgctgaggagccaggtgtacagcctcgtaccggaccgaaccgtggctgaccggcagctggtgaggagcgtcagagcgaccaacgggaatgcgctttcgtgcctcgcgggcacttccgagggtctccccataactcactcagtccaccagctgttcagccattcagcaagcgctgggtctttctgggccgggctttcagtgccaggcactgcggtgccgaggagaatgctacagaccctcagggaatagcatgccaaatgatgaaggtggaagagcgaagcttttggggaaactgagtcaccgggcgtggttcgtgatgggaatgtaggcagacgtcagattagggtaggccttgtacaccagcgtcgtttccattttacaaagaaggcaatgagctggtagagaatgttaaaacaagagagggagtggtgtgttgcacggattggaggcagtgtcatgaggtgggggagatcaattaggaagatactgcagctgagaactggtgaaggcctaaattagggcagtgtagtaaggaggaagaggatggatgagggatgtggagcgagaaataaggacttcaggatagctctcggattttctggacgactgagtg

SEQ ID NO: 45938 - DNA, 541 bp, Bovine  19866881410351
  misc_feature (1)..(1): n is a, c, g, or t
ncctcatgtggcagctcccctctcctgtccaggacgaggccccctatatgggcagggccgaggaagggatctgggtgggcatttcgaggcaggcttgaagtcctcagctgagcatctggggtggtccaggaaggtctggtcccctggtgtgcctagaattccttctttggaagctccaggtgctgagaaccgggcggggggaagactcaagactgttggaatagtcaaaggagaggtgtggtgacccctgaattggtcagaatggaggcaaaatggggagaaggccttgaagcctatttgtttctttctggatgtttctacagagcgaaggctccaaagaagacactactggggctgaggagcaggtgggagatgccatctgtgtgagtggatagctggtctccccgggtgagcaggaatacagccccctggtacactgagcgcacccacggcccctgtggccctgggcacacggacttctgagcgctgaggagaggcacgtggaaggggtactggggggaaaacagctggacctcatgag

SEQ ID NO: 45939 - DNA, 831 bp, Bovine  19866881439243
  misc_feature (1)..(1): n is a, c, g, or t
natgattcttataatgctttatgacttttctaaatctcaaatgcattatgttgttggattcaatggtggtgggtaaagcagatattatacccattcctcttctgctagagtaatcttgacaatgatctgcgcagatgtctaaagagatcccataagaacgtgcctaaacacatgggcactatactcaaggaagcccaaagccatggctttctaataggtatttagagttctcccagttcagatgcagttcactgttcaaggatcatccttgtgtaaaaccaatattgccaggtaacatggcagatttacaatctttatcaggtcatgaaaggatcagagctagaaaatcaactgaaagctaaattctcattaaaaactgaagactttgttgaccctttgtctacagacactaaaactaatcaagacagtctttgaccctttatcagtccccagtaagcgggaagctgtgagaagacaggacccttatcttcctaccctaatacctactcctagaacatattagctggtcagaaatactttagtacagggtggtcccttgaaaaagcagttctgttactgataggaaagaaaagaaaaaagtttcgcatttcttaactgtctccttgtttgacaaggatcctaggaaacccttacctcaggctgaaatattgcagtacatttgaatatcccttttgttctatagttaaccaagctccctgatgttctcattactgatacaacttcctctcccatactctacctctccaagtctcatccctaaataaaattcattaaaagatgtattcttcatctgaacacccatactcattt

SEQ ID NO: 45940 - DNA, 779 bp, Bovine  19866881454127
  misc_feature (1)..(1): n is a, c, g, or t
ngtctggtagtcatatctctggtagctattaggagaattaaaacacttcatgttaaaatgttttatagcatgcctgtgtgttaacataagggagtgtaactgacttcagaatccaagctgttcagcccccaccttcctcagagagccagctgcccctcaggagaggccaaaactgattcctagagctaggaacaggaatcaggacagggatcttgaaaggactgcctctgtaaggaggggattgcttatacttaggagagaaaagccagacctcttctgggtgggcagtatacacgaactggggagagacgttcaagtgcttgcgctgagttgggagtgcggaacaaagggaatgaagcagttagttgtattgaagataaggcacgagttagagcaacctgcccaggtcaaagctgaggattttgctatgggtttccttttgacttcacgtcctgacaggtggatgaagactatatccaggacaaattcaatctcactggactcaatgagcaggtgcctcactatcgacaagctttagacatgatcttggacctggagcctggtgagacaccctcagggttgttttgtgtgtgtgctgtttttttactattcacaccctgtttatctgcttcttgaatttctaaatttccttttggttctctaacccttttaaccccaaatcctttacttcattttgatttcctacctcactcttgcctacttttgtgacttctaccacttgttctcatactctgatcgtataagttgctcctgtgctg

SEQ ID NO: 45941 - DNA, 887 bp, Bovine  19866881532058
  misc_feature (1)..(1): n is a, c, g, or t
nagaaagaggaagaaaagaagaccgatgagggagactgcagcaggagcatcaggaggacatggacaaaggagatcccttgaggcaaaggacaagatgacccagcagatactgagggcagcccaggagggggacctagcaaaactaaaaaggctgttggatcccccatgaggcagggggagctggagggaatatcaatgctcgggatgctttctggtggacccctctgatgtgtgctgcccgagcaggccagagggcagctgtgcgctatctcctgggccgtggggctgcctgggtaggggtctgcgagctggggggcagagatgctgctcagttggctgaagaagcaggtttccctgaggtggcccgcatggtcagagagagccctggagagacaagaagtccagagaaccggtgaggggaagccttatcttttattattatttaaacttttaaatctatttttgttttattgaagcatagttcatatataattatataaattacatgtgtacaatatagcgattgagaattttttaaagtgatattccatttatagtcattataaaatatctgttaaatttctgtgttgtacacacactctgggtttaaatcctgattgtacttcttgggcaagcaacctagtgtccatgttggcacggttggctcagttttcctatctaagaaattagactatacttcttatagggttgttagggttaactaaatgggttaatatacataaaatgctataacagtgcttgtatttaatagcatagtaagcactgtacaaatgttaactatagtaattattatttctcacccaagaatcttttgaggccttaaccattccttcaggtccacgttgctaactggggaggaaaggcaa

SEQ ID NO: 45942 - DNA, 736 bp, Bovine  19866881561054
  misc_feature (1)..(1): n is a, c, g, or t
ncagccttgtgctcaccatctccatgtgctccatgggtgacgctggcttgtgcccaggactttaccccgcttggaaccgaaggagtgttctggggaagcagaaagataatggtgacatgatgaggagctacaagccattcttgcccctgctccctaaaaaacatccagtttttcagatacctcgggggctgctggcggtcgtttcgattggttggaggcaggcgtctgtgaagccggcagtggctgcgattccggctgctgagcggttgaggcatcggaactgaagggatggtaaggtgggaaggttattcagagtctgagatggtaccggctcctctgcttctccaactggtggaggacaggaaccaaacccaggccttctcactactttttacaagttttaggacaaaacaccataagctcatcaagcttgcatagactgtcatctgttcttcaaactttcctcacacctgacaaaaaattaaaggtaccactccttagtcatttaacaggagtcctacaatatgcaggaaagggtctttcctctttgcctctgactctcatctggccacattagtacaagccccaattcatcctgaagttcaaagttaaaatattcctaactctagatcccccaggtttccacccacctcttggggtcggactgctcctgtttgcttgcccatcctgttccgtctttcgggcactaatgagacattggggtcattgcctttgt

SEQ ID NO: 45943 - DNA, 1150 bp, Bovine  19866881641494
  misc_feature (1)..(1): n is a, c, g, or t
nctcgagggcccagtaatgatgccaggtacaaattcggaaacatatttgtggaactctgagcaggtgggccttgtttttgaggggcctacaaccctgctgaaaagacaaggaaaatacctcaaaggaaatgtcacgatgtgggtcacacccaagttacacaggcaggaacaggtgtctctaggggaaggctcaggctggggcagctgcctcaaggaggaagtgagacttgaagtggtatccctcatctgcttcacctgttatgacaggaacggatttatgagaagcctcctcatgcccagagggtcaggattgccggaggaaagccagaaagagagtcctggcatgtgtcaggtagaattctgacagacagctgatgaacaggctcaaaaggcagtgcccagggacttccctggtcgtccagtgattaggaatctgctttccaatgcaggggacttgggttcaatccctggtcagggaactaagatcccacatgcctcaaggccaggtcctcattccacaactaagagccaaagcagtcaaataagtaaataaatattttttttaaaaaaggtagtccccataagaggggactctgaggtcgcactgcctgggtttaaatccctgcctccttgggcaaaccaccaaatacttttgtacatcagtttcctcatctgtccaatgggaataatctgacctacctcattagattctcaagagaattgagtgagttcacatgtaaattgccttgaacgggagctggcacggagtaggtgttctagatgtgtttgctgataccatccatgctccccagctgtaaagggccaagttctacacaatctcatgctgactctgcctagaccttggggaaagaagggatcaggggcactgagcagcaggggtgagtggcagctctgatccacccagaattttctctcttgcagacagagggggcgagccccccattcacagcacgggtgcccagctctgcctcagcctatgaccagagaggattagcccctggtcaggagtaccaggtcactgtccgtgcccttcgagggactaactggggccctcctgcctccaagaccatcaccaccagtgagagctggggctgttgcagggtggggtgtcatgggtgcagaatggatt

SEQ ID NO: 45944 - DNA, 1585 bp, Bovine  19866881667595
  misc_feature (1)..(1): n is a, c, g, or t
nacataagcagaggctgcagcatgaaaagtttattaactgctgcttttctctcccttgatgggcctctgcatacagtggatcaggttgtgcatgctacggtggccatgaaatgaacacagagttgagcagtgtgcaagctcactaccatctgtggaagctcttttcctggggtgggggtggggggtcactggtttcttaaagttttcatctggggggtgaggagacggaaggagaagccttctttgctatctgaccccaactggcttcaggctaaccatgctctggaggggtcacgtcccagtgacttcagcactagttccctggctcctccacccaaggcccccttcagctggtacctggtgggcagaggcactggaaggtggcgagcaggtccaggcaggtgccgcccctgtggcagggctgcgacaggcactcgttgtgatcggcctcgcagcgggaacccgtgtagccaggcggacagaggcactcgaaggagccgggcgtgttgaggcaggagccgccgtgttcacagggactggggccttgctgagctgggaggagagaagacctgggagtccactgggctcagggtggaagggcaagaaggcctgagtggcagggaaggtgttggggggcctgtctgtggcaaatgagatcagagtggggaaaggggttgtgaccttaaagtggagaaggagtgggacttccctggtggccagtgcttaggacttcacctccaatgcaggggtgtgggttcactccctggtcagagagctaagattccacatgcctgatgccaaaaaaccaaaacataaagcagaagcaatattgtaacaaattcaataaagaatttaaaaaaatggtccacgtaaaaaaaatctgaaaaaaaacttgagagatgactaaatgcagtctggagggctgagtattggtgagaagactggctaagaaagagatgccaaataaggacaaattcaggaaaaaagagatgttcatttctttatttggccgctgtgcagcctgtggaattttagttccctgactagggattatatccgggccctcggcagtgaaatagcggcatcctaaccatcggaccaccagagaattcctgagatgatttttaatttgaaaaacagtttgcctgtttccctctttggcagaggctgtgtgggggcttagagagggtctgatgaggggggtgcctcacccatctgacactcgtccaggtcctggtggcaggtgggccctgtgtagcctggctgacatacgcagagtgtggagccactcagggggttggtgctgcactgggcttcctcatggcatggctgactcagacacatgtcctccatgtggcacaggaggcctggagggtggggtgggcaaggtgctcagaggctgcttgaagctcccaggtgctctcctggtgcttcggtcacctagcatctccgcctcccgcctccctgaacctctgcgtcacacctgtgcgcccaggcgggcagaggcaggagaaggagcccacgcggtcaatgcaggtggatccgggggcacaggtggcggccacacagtcgtccaggttctctt

SEQ ID NO: 45945 - DNA, 1393 bp, Bovine  19866881754304
  misc_feature (1)..(1): n is a, c, g, or t
ngattttttttttcccattaaaaatttgtttttcagttataaaaataatttaatcacaagacaagaatttggcgactagggaaaaaaacaaataattcttggctgtttcacactgaaacaagtactgttaacattttaaagtgtttctcccactctcttctgcgtgtatattatttacatagttccaatcttgagagggttggacttttaagagaaatttccctaagaaactttagggaaagaattgaaataaacatttgagctagaaggagcttaaagggcaacagcatctcctgctcttagtaaatatgacctcatccttggtgttctccagaggcacagtctcccaggaggagccctgggctttctccctctttgtggggcccggggggatccagctagcctgtgtccagcttggccatgctctcagctcatctgctttgcactgggtatgggcctccatcacattttaggttctccctgatcctgggtgtggaaaatgctcccgtaaaattggtccccagacacctcccttggcctccacatcagcctgtgccgctggccctctgactatgttttctacgcttttttgtggctggcctctgggattgtgtctcttgcctttggccagcactctgtatccatttctgttggcacagagtgcgttcagtagctggctatccctctggccactgccatcttcctagaagcctctctctctaccttatccttttcccttttccagaaacacttttctctcaaaactcaaactctgctattcctggccaagggacacacctagttattggaatgattttcaaaacacagaagaggaacattcctcttttccctgcatacgtggcacggctacgctcagcggttctgaaagtgtgctccctggacctgcagtattagcatcacctggagcattagccatgcaaactgtcagactctgccccccaatctgctgaatgagaagctgtagggggaagagcccggtaacctgcatcataacatacccccaggtgattctcatgtaccccaagtccaaggaccactgctcttttgttcaaggaatgctgctgttttgcaaaaggcaaggtcttctatgaatgtgagacaaagcttgaagaaactgagggaggtgaacccccgaacagaaagacatccaggtgtttccagtttgaatgtattccacagactggaaactggggctatgtcacattttcattgggacacaggaacttgcagcctcagaaaagtttgtgttcgggtctggtctgaaaaagaggatgagggtgaggtgagctccaggggccagccaaggtggagccctccacgtggggccatgaggttaatatcgagaatagagttagaaacttgccaaggacat

SEQ ID NO: 45946 - DNA, 799 bp, Bovine  19866881855630
  misc_feature (1)..(1): n is a, c, g, or t
nctggacaatcctgatctccccctgctcttgcagtgccttctgcctcctagacatgagaatgaaaaggatatcaggggaagatgctctgctataccctggacacactgagcagggacattctgtgtccaagtattggggagttcttctttaagtaaaggaaaaactatggggagagaattaggtggatcgccaaacagtctttttcaattagtctttcacccagccacctcaggagttatctgttaaacagtcaacacaggggcttccctggtggtccagtggctaagagtccatgctcccagtgcaagagaccccggttcaatccctgattggggacctagatcccacatgccacaactaagagtttgcatacagcaagttaaggaccccgcatgctgcaactaagactcaaaatagccaaataaatactaaatatttttaaatgtctgctgaataaaaaaaaaaaaaaaaaacattaaaaaaatcatgacatattttctaagaccaatcataggcagacacttagataaagcagtgattaatgggctctcccctcaaggaattaacagttgagattttggatggggaaggtggagaggaatatgggataaaatgtttcaaacaaataaaaataaaccagaacttctgtttccgggaatatagcaagaccaactcactcactgaaaattaggtaaaatgctgcataaaatgttattttaaaagctgtttaagcattaaagcgctcataagataataaggaattaccaaactaatataggaaaacaaaattcaaaagaa

SEQ ID NO: 45947 - DNA, 957 bp, Bovine  19866882051539
  misc_feature (1)..(1): n is a, c, g, or t
ngtgaaattactgtgtagggcatgaggaaaaaaatcagagttatggttgatggttcaacccaaagttagccgtctgtgtgtagcctgtgggggcatcaccattcaatatcaatgttggttcatgaggtcagggtgagaggctaagtggggtagtggatactgggggcaaggaagtcttgttttggaaaaacccaccaaattatggggggaaagcctctgtttgggacacaagggacagacttcccctcccagcctccctcctaatccctcttgtcctgcccttaactgcagcctccacggatgcctcccctgccctctgtgccccttccgcagactgggatgtggcctggatcctgacactgttgctcacagtgggtcaggggttcaccattgtggtccttggcgtcatgctctggaggcagagggcccagggggctcaacacagaagtgagtccttccttcccagaagggtggattcatatctcacctctctatccttcttctctaggggagaaggtgggataaggaagatagctctgagtcacctggtgacttctctgctgcacttcatatggctttttctctccagatgcttcatttcctcagttcaaacccgagatccaggtctatgagaacatccatttggcccatctcaggtgaggagctactagggggcagaggcttaaatctcggaggagactgaagttggggtggggatgggatgctggttcccgaggatgtggaggatggaagtatccttaatctgtctttctgctttgcaaaaccgacagcccacctgcccctaaaaccaggtgatctcgaggacatctgctaggaagtgtgacctgctgactccctggccatctggcacctgaaggattcacgaaaagcttgacaaggggggaggggcttggagtgctatttcacagtccggtggtctccagccaagctgtgtat

SEQ ID NO: 45948 - DNA, 1222 bp, Bovine  19866882237689
  misc_feature (1)..(1): n is a, c, g, or t
ntctttatatttaatcatatttaaggcttactgttctttctcagttcacacttagaaggagggtgggtttgtgggtgggggaaggaggcaaaattgaaagggacaattattttcttttgattcacagaacaagaaacatacattcagactagtcctgaggtatctgtagctctcaaatgccctccccacatggggaaggtgataatactgtgtatattttcctaacaaaaagaaaagtggactatgggaagggattgcaggggggttcatttttaatgaatatttcttaattgccagcttaatcttttaaattatttcctggtgaaagatatgttcttattgacagtatttcaaacatattgttcccagttgatattttcagtgcaaagaagttaagatttaattcatagttcaaaaaaaagatttaagacagatcagcccatcaaacttcatcatcctctcaagctgagtttattttctcacctccactttcaactaataagtatatgatctctcaaaacttaacccaaagcctgagaactatgattcatctctccaatacttaaagatcttttagagtctacatctgattgtgctctaacgatcactaaattaaaaacctaataagattaacatcccaacaaagcccatgatctattttctaccttatttaactatcacagaattagaattattaatgtgacagttgtttcatgatatcacttagctttcgcaaaaattaacccaatttaaagtttttaatcagcttgaatacaatgatcactaaaattttaattaagtcttttgattatactataattttgtcatataggctattgcctgcaataaatggactttcaaccagggcttacaaatttttacaatacggagattatgtggttcaaaggaaagaaaagatttatgtatcatctagaaatctaggagaagggagagacgaacttagaatttgatcaaagaattatctgtggcttacttctgcaattcaaagttgaaataggggtaaatttcactttgtgggataactagttttctaaaaaataaatcctagaaaatctatttctgttaattaactttaaagtagaaaatatatagcaaagatattaaaataaccaagggtatgaagatactgttagaagtaactaagaggtattttagatgagaaggttcagtagaaaatcagctctttaccacaccacacccc

SEQ ID NO: 45949 - DNA, 778 bp, Bovine  19866880354659
  misc_feature (1)..(1): n is a, c, g, or t
nagattacctgctgctgctaagtccttcagtcgtgtccgactctgtgcgaccccatagacggcagcccaccaggctcccccgtccctgggattctccaggcaaggacactggagtgggttgccatttccttctccaatgcatgaaagtgaaaagtgaaagtgaagttgctctgtcgtgtccgactcttcgtgaccccatggtctgcagcctaccaggctcctccgtccatgggattttccaggcaagagtgggatctttttaattccctttcagaatctaatattgcatgaagctaagaagagaccaggatgtaaaggtgggatctagctgtacctgcctctcatcatttggaggaaaactatcccatcagtgatgtgatctttattcatgtatttttaactttgtcggggatctcctgtttaatcattgagaatagtttcacttttgagtatgtttaaaaaaaaagaaaggtagaaaggtccctatacagtgggtaaataagttaatgattagaaaaaccacaatgaaagcttacttgcacaatttaactaggtcaagatcagcagatttttaaaaaaatatataatgctatcacccttggcttcatcatttacattcatttgtttaataattaaactgggtcagtgtaacagtgttgacacttcacctgtgaatttgtcttcttcagtgagttaaaaaaaggaacctgccttcggtttgctggaagtggaaatgaagagaatcgaaataacgcgtacccgcacaaggcaggctttg

SEQ ID NO: 45950 - DNA, 901 bp, Bovine  19866880369648
  misc_feature (1)..(1): n is a, c, g, or t
ntgaacctccctccacctccctccccataccatccctctgggtcatcccagtgcaccagccccaagcatcctgtatcctgcattgaacctggactggtgactcatttcacatatgataatatacatgtttcaatgccattctcccaaatcatcccaccctcgccctctcccacagagtccaaaagactgttctatacatctgtgtctcttttgctgtctcgcatacagggttatcgttactatctttaaaataagtttaggaaaggccagttcagtggtgttcaacaagattttttactctaggcctttttacttcctggtcttgaagtgcatcatgtatctttatgaatctccaggaggctcaactactaagcccatgtgcctcagctactgaaggctgagtgtcctagaacctgtgctctgcaataagagaagccagcacgatgagaagccctcgaagtgcaaccagagatagcccctgctcgctgcaactagagaacgcctgcatgcagcagtgaagacccagcacagccaaaagttaaatacataggtaaaattatatatatatgtatgtatgtatgtatataaaagatctgctcactgggaataaggcaagaattgggtacaggaagtaaagcatcaaggccagataacaaacctgatttacagagcatttagtccaagttccctgaaaatacttttttctgggactggtttcttagtatagaactgagatcaggactgaaaggccgctcagaggaggactatgggaccctaggagaaagacagtcagcctgccagatcttgtggttctctcaaagccctccagtgcccacccactcacacagtaggtgctcattcatatctgttgcataatcactgtatttgctagagggatgtg

SEQ ID NO: 45951 - DNA, 1637 bp, Bovine  19866880393419
  misc_feature (1)..(1): n is a, c, g, or t
nctgctgctgctgctaagtcgcttcagtcgtgtccaactctgtgagacccaatagacggcagcccaccaggctcccctgtccctgggattctccaagcaagaacactggagtgggttgccatttccttctccaatgcatgcaagtgaaaatgaaagtgaagtctctcagttgagtctgactcttagcgaccccatggactgcagcctaccaggctcctctgcccatgggattttccaggcaagagtactggagtgggttgccattgccttctccaccattcacctagctcagctcttttcataagaaaggaagctttctgctttctcagtgttccccatctgcccatctttcccatcggcctggcctgttggttccccagcggcagggaccacagctgcccgattgactgcagggtcctcaggcctgagtgtctggtggcattccacatctctcggccacccgcgggcatctttgctcacagtctccacgtctaatggaatgatcaccgagacctatggccgctgcctgtcacgtgtctcaaatgcagcccttccatcctgtcccctgctaccttgtgaaatatggaggaatgggaagcagaagccgtgatccagggaatctctctgacttcccctggggacagtctgcagacagccagtacttggccccagggccactgctgactgtggatgtgacgaattaggttgtaatccagcctcaggagcgcactctccactccacatttgcagggtgctcgggagaattggatttggtggggagtgtagcgccctgcactgtcccaaccgctgtgattaggatacaccgttgtctgtgtcatctgtgctaatgcagccatctcactggtctccctgcctcccctccctgaccccagttcccttctatcgtcctccccacagtcggcagagttactttacttctagcctgcttggagaatagtattatatggcctcctccactgcattgcccagagaccctgacggaaaaggcacaaactccttagcaaagtagataaaacccttatgatctgcccacctgatctaagtctgcaggtctggccacagagcccacctgctcccctttgaagcccacccactgtgcccctctgctctgggtgccctgacacacagagctgctcatggtttctcagatgcccctgtgccttcagtacctgaattgcctgagtgtctcattcccttttccttaaatgcctttgcgtctttctggcaagctcctattcgtcctcaatgcccagcttatacattcctccccctgagaacccctgagtttgtttctttccttggtgcatccctgatccttggagatgtccctggatcccttctgttttacccggtgtattcactgacgcccccatttccaagaatctgggtcacctttgtccccccagagccaggcacaatgcttttcatcctttggcttggtatgtatttgctcacataagaaataaacaaaggctgttttccaggaatcaggcagcttttgggaatagctgaggatgtggaagcaagagacactttcagttcttgggcttttcttctttttttgttagcaggggtagcaggagtaacaggcctggggaggtcagaaggtcaggaaa

SEQ ID NO: 45952 - DNA, 1585 bp, Bovine  19866880471255
  misc_feature (1)..(1): n is a, c, g, or t
ntttgttattcttggctgtgctgggccttcgttgctgcaggcaggctttctctagctgtggcgagtggggactactttctagctgtggagcagaaacttctcgttgcggtggcttctcattgcagaacatgggctctacaatgcaggctcggtcgttgtggtgcacaggcttagttgctctgtggcatgtggaatcttcctggcccagggatcgaacctgtgttccctgcattggcaggcagattcttagccactggaccaccagagaagtcttgcctgtctttttctcccctgctattgcttatattaccttcatagtccggtgcccatcttacagatggaataatggaaggacagagaacagtttcaccctctgtgctccacagtcgcatatgtttttgtttcttttttatcctactccaattatgctcattcaccctcatgtcatgtaagaagttcagggttgtcttatcctctgagcatccttccttggtcctaaatgttcctcataccctccaggctcccgtggagatttgaccttgtctatcaggagccgtgggctcccctgatagctcagttggtaaagaatccgcctgcagtgcaggagaccccaggttgattcctgggtcaggaagatcccctggagaagggaaaggctacccactccagtattcttaggcttcccctgtggctcagctggtaaggaatccacctgcaatgcaggagacctgggttcaatccctgagttgggataatcctctggagaaaggaaagactacccattctgatattctggcctggagattctgtggactatatatataatctatgggtcgcagagtcggacgtgactgagtgactttcagtcattatcaggagctgtgagcattcattgcctagttaagtgtttctcaggactgagtcccaaccgtctggttgcatctctcagctagtctgcaggaaccatccaatatctgctgagccaatgttttaacttattattggagacatttgggggttagaagcctggtgctcttcccctgcgtgcccctgatgagctctggtctttgtagaaagtatattctatgtagaagccatcatagctaccatgacagcctgatgccacctggacctgtaagtgcattacaccacttgtacaactatactgtgtgtgcggtggccgtcagagcctcattttgcaggggagaactctgaggtttggtgaggttacacgacacacccacagcccttcagctgatgcaaaccaaacactgtggacagggcagctgacgggggtcgctgtaatctgttttccctcccgacttgcttgacgtccaagctgggcatttttttctcctggttccctctcctttccacccaaaggtttaattctgagttgttcccagtgtgtcgtatctgaaaatgtttgttttatttattcataccacagattccagaacgtaaacagctctctgtcccgaagatcgagtctccagagggttactatgaagaggctgagccgtatgacacatccctcaatggtacatcctggggacagggctgggagggggctgaccacttcctg

SEQ ID NO: 45953 - DNA, 1199 bp, Bovine  19866880535082
  misc_feature (1)..(1): n is a, c, g, or t
nttagcatgcacgcgtgcttttaatgatctactgagctaaggtagcactcgtttcctttctaaaaactgagcctaataaagatataagcctcagcacatcactccagttggaagctgagggagtacttgtcaacagagccaatattttccttggaaagcaatttaggtacactctcaatatgagataaacaaccagaaattccatgccataaagtaggaccgaaaaatttttagcctagaaaaatatgcaagtactctactaaatgaatccaacatagtaaaacatctggtaaagtacaccctgtttttaaccaatataaattctgattataggcgaaattagacagtgtgtgtctttctctgatacattcatgtagtataacaccttctaggtccgtctatgttgtcacaaatggcgagatttcactcttttctatgactgaggaatattccattatatataagtattattatttttttaaactactcaaaataagctataatttttaaattaaaattttaataatctaaaaaaaatccccagtcatttcttgatttgtttttcacatggcagtaaataaaaaggacactgttaaacagtatactgcatgaataaccttttgaaattttgaaactataatccttccaatttaagaatattcagaactatcttaatcgaaaactgcaactaagatgaaattctttaacattagagaaatatataatctatcgtgtatataaaacatgcatgtaatgtcacatgttatatataattatatagttatcctaccttctatatgttattggtagctttgcttttatgcaattaacaaatcccaagtcatggatataaaagcataaaataactagtaatgattaatccaaatgaatgttcctgtaatattttaaaaatcttactttaactcagcaaaatttacttatttaatatcaagtttacatacctgaccttccaaaaactacatcccaaggggaactaatgggctgttcatctcctttagctccaccttctttatctgtaccttgaattccaatgccagccacagtgctcaccatctcagcttctaggtcaatctatagaaattaatacaagttttatacaatgcatctatttacaatagaacatatagaaaacatgtgctttatttattctatgtgtgaacttattatatatttaaaaa

SEQ ID NO: 45954 - DNA, 2095 bp, Bovine  19866880552857
  misc_feature (1)..(1): n is a, c, g, or t
naacttgttataacttgttataaataaatgtattcaaaactttagcatacctgatatgtttttatcatatcttgacaatttttcctaatctgatctgctttcttcctttgcttgagttaattttgttgttgtttctttgagtttatctttggtttcctgcattgacaaaaagatagtgtgagatgacagaaaatagatattggtctctgcccccaattcctgacagagctcctgaaaccccttcatagcctgggcccaggcctggcatctgaagtggcaggctggggaggttttgtgggactgacactctctctgaatagacaatatcaaagtgagttcaactgtaggtcactcggctggtgtcacacacaactgctaagggaaaagcctccacacactggtaaccaaaggaatcagcagtgaagtgttctgtgttaaagtaaaggggacacgcaagaagaaacccacaggagggaactggattttccctatgctagaggaacggttttttgtttttttttttaatttacagacagcaacaaggctggcacggtgatgtgatgactggtgagaaccatggccagagagtagagaaagttcttgtctcagcactgccactggagtcagaaactattccagtaacaatactttgcacttctgacaaaaaactaatgtggcctacacagctgattgatcaagtcattgaataaagtcaaatttgatagttttcagcaaatcagtagaagttactaacttgaaaagacaaaaatgcaaaatgtttaagcagttctttgtagacccacataaaagacgattctttgttttatggccaaggtacctattcagaacttttttttttacagattcatgctgcaatttggtttctcttcctcaccactctattaaaatagccattcggatggtttgcgtgtaagactttctcatcagatccagctgctttttctaatttcttattcctgacttacctattccagttctgatccactcctgactctttcaatagccttcctctgtctataaggcagtatatttctttcccccacccgcttcttcccttctctcttttcttaccttgctggacttcctgtagtgattgtccaagtacagccctacccttcaacttcaacgttctccaccagagtacccgtacagtgccataattggggtaccacgtggatttctaatgaaaatttaggtatcatcttctcctggcaggttccctttaggaagggacagaagctgctattctgccttcccacagatagaatccagggaacgccaacactggaacaaacggtactttctactgtagctcattacatgcttccctactgagaagacagttctggcttacagctagctcagtattcacatatgaactgttcatgtaataaataccgaattaatgaaggaatacttaacatgaatcttctgttctagtcaggctggttttcccaaacaccaaatctcccttttctccttatcttgttcctccacttggaatgcctttcccttcatctcttgatataaattccatctacacttcagataccacttcttatatgtcactttgttttttgataaatttactacacaattaagtgtctagtgacatactttcagttgcaggtcttttaataataatttggcttatattaaaacagtgacttttaaaatataaacatttgaaggctttttcaaatactgttttttaaaatatgagaatattagctcaacaagaggagggagagataaaggaactttatctgtagccccccaacttctatatcatcaataactaaagcagagcttgacacacagaggcactcactccattcattcagaacgtagcagctgagacattccagtacgtcaaatacaattttaaacggtgtgtagccatcccagtgtgaaccctaaggattcttgctcctattccttctggcagttcttccactgcccatatatcagcagttgcctaacactcatttgcggatcagcaattagctcagaatcccaccattctctaacctttgaccattgtcaacacagacacccaagacggacaggtcat

SEQ ID NO: 45955 - DNA, 1999 bp, Bovine  19866880580954
  misc_feature (1)..(1): n is a, c, g, or t
nacctgcaatgcggagacctgggttcgatccctgagttgggaagatcccctggagaagggataggctacccactccagtactctggcctggagaatttcaagggactgtatagtccgtggagtcgcgaaaagtaggaaacgactaagcaactttctcttcactagtgcttgacacataatagggattgaggaatatttgtcaagtttgatttatttgaatgcagcagcagttgtacattatagcatacgtaactaaagctagctaaaatcagtgagccttttgtttattatccttagacaattaagttaaatattatattttagaaacttgttgattaatactcaatttttttccaggactaatggaattgaatggaagatgttctcacctaatgatagagctactgaagaatttcatgttgaatcagaatgtaatgatttctgtaaaaggagttatcaagaatgtccacacggtgtcagttgagaagtgttccgagaatggtattatcaatatagctgataagctggtgatgtatggtctggcaaaaaacatcacatctaaaaagccagctgctgtaaatacaggtattgttttttcaagtttaattaataacagatgtaagcgtgaccaggaacagacgtacccagtttagtaggtctgatctgtattctcacggctatgtttgttccctttgtcgtcctcttctgtgaatcctgcagtggggtactgactcatgttgccgcctcagaggagcctggaaggaatccggcctcccagtccagattttccttatatcaggctcagcaaccttgtccatagcattaatgctccaagctttaaaaaggtcaagcattcagagttacttcccacttccttttgatcctgatcaaagtgagaagaactcgtatacttgagactgggtcttactagttatttcataagatgattaggcaggcctgatctccaccagaaagagatacactgtgcaggataggcaagacctgaaaccttggaaggatgagggcactcattgggtagaacccaggacagagtagtaggtaacattaaagcgccgatgaaaagtttaatccatctactcctttgtggttggaaaggatctgccctgtggggcaggcttgtgtatgttcaaactccaggtttgttttttttttttcctgttatttatagctaagaggtctaacagctctttgcatttgcttttagaaacggcagacaggatgaactgctgctgcacgaagctacagaaacaagtgggtgaatttccctaaagtgaaattatactcccaacattttaaggaatgaaataacactattttctttctcaccctcaggttgaaaagcatgagcaaattcttctcttccttttaaacaatccaaccaatcaaaataaatttattgaaatgaaaaaattgttaaaaagtaagttaaatttgatgttttttctcttaggcaacccccaacaggacatcacccatctttttctcagggcagagtatgtgtttagaggctgtgaggtactctgtggtctgaggatcagagggctggctataatgattctgccgtcttcctaggttttgtttggtagcctccctttgacactgcttatggaactgagtccagggccatcctgtccttactgttgcttgacatagagaaagctcatgacggtatgtgcagggatatgtaaaaattgtcgtgaggtcaagcttagcctgaaattctttgtgtctagagtgaaattaacacttccttgtacacactcctatggagatggttaacactttttatgaagttctgagtcaagaaaatgggctgcagtgatagatttcatttcagaacaaagaatattcttcatctttagctacggtgactctagtggttaaagatgccaccagtgggttttatttattttttctttttaattgaaggataattgctttgcagtgttgtgtggctgcgccatacatcagcacgaat

SEQ ID NO: 45956 - DNA, 1367 bp, Bovine  19866880588782
  misc_feature (1)..(1): n is a, c, g, or t
ncccccttaaacatcaccattactgggtgtaaaaatggtttagcttcaggaggaaacagctggctggcagagatcctggtggggtcctgggtgagagtctgttgtgtcactaatgactttcttgggtacatttccggcacaagcgcagttggcagttggggaattctgtggctgagaacttttgtcaaggcaagagctgcagctggagcagcttctggctgaggccaggaagggaagtcttcactgcattagggataatctagacctgtccaatgggtgtctcattggagaggtagaccttggtagcttaacttgaatgctaatgaaccttttccttctagaatattatgtctctgggtttctcttagacttcaaacaccttggtctgtagctaaggtgagcccagatttcttagggtccctgacccacgccctctttcttgaaggcaggcagtgtctaaagcaactctatgagtagagtgggaagatgtgtgctgctggaaaaagtccgagctccttctgcaataggcttgcctatttgtgcagttcctatggctatttctcaccttgttctatgtctcagccattctggattccttgtgctttcccaattggaccttggcaaatgctgttcctttaacccggaatgttctcccctcaagactgccagccaggcttatctgcaagggtcattcagccttgaccttgaccccaacgccctgaagcctttaaccccttactgcaccttacttgacctgccatggtcatcaggtccatattacagttgatggaaagtctgtgtgcccgggagactgaaagatcaaaggtcaaaagccattattcctctatgtgtccacagcacctaactgcatgggtgatgtattgtcagtgctcatgtatggtattgtatgattgagaaatggttgtcgtcctcaagttttctaagtttgattgcatcaaaatgaaggccttctggtcattagtgggcatcctgataaaggtagtaggcagatgaaataaaagagaaagatatttacaatctaaaagcttcagggggttaacaattagaatatacaaggaactgatgcacatcagccagaaaaaggcagaaatctcaacagaaaagaaggtgaataaagggtgtgaatgggagtttacaggtgatggagcctccaaaatgttaatgaacacctgaaggaatgctcactcggcctcctttacttatcagagtgaaaccagccagaacagccacccaggaggctggcggaagtgaagaactgaggaggccgagtgttctcagaacactcagaactttctgcatgggcccactctaggcagggttgaaaatacctttgcagcgttatgtgc

SEQ ID NO: 45957 - DNA, 2229 bp, Bovine  19866880677805
  misc_feature (1)..(1): n is a, c, g, or t
ntattatatgtggcagacaccaataaccatcaaattaaagtgttggatttagaaaccaaaacagtttccgtggtaagtaatccttaagttaaggggcatcattttaagaaaggttctgaaatccctagcaacagctgaggcacttttggtcggccagcactggtggtgaaagtgaagcatatagacagagcagtgagtgggtgcctttcccaaggatgtcctgttatttttaaaataaaaattccatctgtgccaagagtgtttgagaaaaacaatagaggttggagagaatttgatcaactttcagaaaaggaaaaaaaaagactcatctgtttttaaatgtatggacatactgatacacacaaactatgtgggttggattgtttgagtgttttttgtttttttaatttttaaacaatcctcagactgatgtgtaatctttgtttcctatggtgaatccattaccaaataatctttaaagaaaggtctagaagccacatttctcaggacttaaaaataagatgagaggaaacttaaatacattctacttttaaagatatggatatggtctctaataaaatttcaagttacccctttctatgtcacatttgtccagaaaatgcaggagttctttatctaaaattctaggaatttccaagatgtgttttaaaataaaaacacagattgccatcataacaataagttcgtttctcatgacatagatctctgatatgagatgaatgatgtcttatagttggcagtgaagattataagagagtgtatattatatccactgcatttaaattgataaagttttaatttcctgctatctataaacatattaaacaattaatttcattccatttcattcataaatgttgacggtcttttggccaggatgaagttttttttgaagctacaaaataatcatgaggaagtctaagtaaacgcattctgattcagaagaaaatggcaatcaagtttccttgacattgaacctcacttttgtactgaagtctgaaaataagctctctcagtctacaatactgtaaagtacttgtgctttagaaaacagattttcttgtttttagttcccagtcttcagatctgaaaatgctgtggtggatggtccttgtctagcaggaaaaccaaagaccttacccaaactacctaaatctgctccaggcgttagacttgcccctgtggctgcgtctcccggacagactctgcagttcaagctgagattagacctcccatcaggaacaaagctaactgagggagcttccagttgctggtttctgtcagctgaaggtatgacagtaacctttgcaaatgcaaatattttatgaattcttgatgtttgatctagaaaattttctcatttgttatgtgatactttaactgtacatttaggctggatttgaagggggtcttataacacagaaagatccagatctaaccccactttagcagttttctttagtctttgagaattctttctctctctttattaataactgtgtaactcaccccaaaaggtaatcataattgttgccatttgctcccaggcaagttcatcacgaggtggactgtttgtggtcctgaataataaataggtccttgcatattagaactgaaaggcatcaaaagacaccctgtgttctaagcctcttataaatgaggagactagaggctgaaagagataaaattatttgcttaagggcatatatttaattaggtcaaaagacggaatttgaacccagctctgctagttcttaatttagttacttttcctttgtgctgtgtgtgcatgcttggtcgctcaatcatgttcgactctttgcagccccatgggctgtagccagccaggctcctctgtccgtgggattttccaagcaagacttttggaatggagtgccattttctcctccagggactcttcccaacccagggatcaaacctgcatctcttgcatctcctgcattgacaagcaaattctttactgctagcactacttgggaagcccttccattgtgccactccatctcaaactagctccagggttactagtgcttgaaatgaacttaattttctaaagacatataacactcaaggccaccagttacacatttgcatgttacagaagcttccaaaccttactcttcatttctgcacttaacttatcattgtgttgagttaacacattgtgttgaggaccaacagccatcc

SEQ ID NO: 45958 - DNA, 2110 bp, Bovine  19866880747843
  misc_feature (1)..(1): n is a, c, g, or t
naatcagggggctttctccactgccttgggtccttgagccctagaggggacgccagccctgctgcatagctcctgtcccttccctgtgcccaagttcaccagacctccttcccaaggagcctcctgaagagctggagttagaaggcccgggctcatctcctgggtaggccattcaagaggtgggagacccaggccacagtgcttcatctccctgacttgacttcctcatctggagagaagaggctaggagtccctccctctcaggtggctgggatgaagtgagatcgcccacagatgcccttagcacagaggtccatgccccgtgaccagagccagctgtcagggtgatgaatccacctccgccaccaatctgaaccttaatagtgtctggacagctaatgtctaagtaacaagattttagtatttcctcataccacagttgagaaataatctcaaaacgaattaaagacctcagtgtaagacctaaaacataaaactcctagaagagaacattgaacactctgacagaaatcatgcaatattttggggggtatgtctaataaggcaaagaaataaaagtaaaaataagcaggacctagttaaaaattgttgctcagcaaaggaaaccatcaacaagataaaaaagacaatatatggcatgtgagaaaatattttcaaatgatatgacccacaaggggttaatatccaaaatatataaatagctcatatatctctatataaaaaaaaagccaccccattaaaaaatgggtggaagaccagaatagacattttttccaaagcagacagacagatggccaacagacaacatgaaaacatgctcggcatcactaattattagagaaatgcaacagaaacaaaacgagacactacctcacacctatcagaatggctgtcttcaaaaagcctaccaataacaagtgttgacaaggatgtggataaaaaggaaagcctgttcactgatggtgggaatgtaaagtggtgcggccactatggataacagtcaagaggtgcctcaaaacattcaaaatggaactaccgtatgacccagcaattccgtaccatggaaaaagcaaaaccacaaactcggaaagatacatgcgcctcagagctcatagcagcactgtttacaccggcggaggtggaagcaaccctagtgtccatccacagacgcacggatgaagacgtacgcatgcgtacacacacacaccatggaccattactcaaccgtgaaagacgatggaagtctgcggtttacagcgatgtggatggacctagagaatatcatgcccagtgaaataaactcagagaaaggcaaatactgtgtggtgtcacttacgtgtggaatctgaaaaacaggacaaatgaatcacatatagcaaaacagacgcactgatacagaaagcagcccagcggttacccgtaggaagagggggagggggaaggggcgagagaggggtatgtggttaacagatacaaatcactatgtataaaatagatgagcaacaaggatatattgtatagtatggggaattatagccattattttataataacttctactggcatataatctataaaaatactaactgtgctgtatatctgaaacgaatataatattgcaaatcaactatacttcagtttcttagaaaaggccaatggatgttgctcttctctatcccaacacctcactgtccaccccagcactggatcagagtggttaaccagcttttatctggatgagtccccaggccaggcagatggtagcaccccagcagataaaagagaacctcactgcaccaagtcaccctcactgcagatgacatggagtccattcctcttggggaccatctaacgacctctggcattgaggcttcgggtcttggcagaaggggatggacagccccaggctgccacctagccagcatcctcaccgcggttgtcagctctgacacctccacatcgtcgtacagcagctcctggcgatcctggctgggcaggccgtcaatgtaagtgttcggctccgagaactttctctgcatcagcctggaagacatggtgagagaggattcaggataggggtaggggtaaa

SEQ ID NO: 45959 - DNA, 995 bp, Bovine  19866880779731
  misc_feature (1)..(1): n is a, c, g, or t
ntctgcactggcaggtggattctttaccgctgtgcccctgggaagcccattagatgtcaataccacctaccttatgcaggtgaaagtagcctaatatatgctcaattaacatttatgaaaaatcacagatgttttggaactcttatgaaataataaaatgcattaaaactttcttttttggccatgcggcttataggatcttagttctcaaaccagggattgaacccattccacctgcagcaggagaaaagagcccaaaccacttaccaccagggaattccccattcaaactgtttttcaggtttgcaacactctctacagttataccaatgactagtatctttttaccctcacaagaagggtaacaatgcattatcttgtttccttcaaaggtgagtcattcttaagagtatctcatctcacttccggtttactacttatctggtttccttccttccttccagattgttaagtctggcctcattcaggtcttgttgactatttcgagcccactgtcttttttggaatcttacctgttccagagactggtgtggaatccaaacactcaaaaacgtgccatcgaggtgtttgacctagcaaggaggaaaaaggcatctggcagttgggacagtacccatcataaacctgccgtgtctttggagacatgtgtttggtttcgtgagtcctaccgcgcttttctggagtggtctccgtgtcttggcactgttgaacaccatctccacatatggagctctgactggaagctacagatgtctgactgtctgtttctctaaggcacgtttccggggtcttgaccttctttttagtttctacagtcctttttttatttctgtttcgttttgactggtgttgtccatctgttgctttttcaacagaatctggaatattctcagagcaattatttggacgtactcgttttggttttcttttggatttgtattcccagatgtcttcttccaaaaaagcatcttcta

SEQ ID NO: 45960 - DNA, 781 bp, Bovine  19866880804971
  misc_feature (1)..(1): n is a, c, g, or t
ntggggtcacaaagagttggaacaactgagcaactgaacaacagcaatgctgcctctacccacccccctccccaagaccacttcttcccgagacccagtttgctcatccaggaggcagaagtaccccctgttggcttacaccagtgtgtgctgggactcagtaagggagccatgcagaagtgccgcctcttcagcaaggaaagcgaaggccaggagaggtgcccactctgccttcaggagctgctgctgctgctaagttgcttcagtcgtgtctgactgtgtgaccccatagatggcagcccaccaggctccccccgtccctgggattctccaggcaagaacactggagtggattgaacagcatctaattagagccagggatgtggtggctgtcccccgggccagtggcctggcttggctccttgctgggcctccctgagggccgctccctggccctggtcttcctgcttctgggggaacagggcccacccagagttcccagctgctcgaggaaccacgagaggctagtctaggccttgatctagaagcatgactaggagtgagaggtcctcgaatactcacagcagagaggttttggcagcgctcacgatacaggaaactctatcggcatccacatagtcataggtgaattcttccgggtctgtcttggagcccgactcagagagcaggaggcctagccagtggcccatttcctcggaagacttggcctgggaggaagccgagagggacgtgagcagggctggagcgtgctgcctggcgc

SEQ ID NO: 45961 - DNA, 2603 bp, Bovine  19866880851767
  misc_feature (1)..(1): n is a, c, g, or t
ncaggtgacattagtcttgttggccggggagcccattttcccaaagctgttttgaatcgccatgaacaaaacactggctagatgtttctcaaaaggcttatgtggtaacttacttgagccaacactcactccattgagcagaatgcagagagggtcaccatgttgacttccagctttttccacctcaagagccttgaaactacatttggaatggtactgaagaatacaaacacatgtaacatttagcacataccatgcacatgtagtatgttaaacaccagatccatcttgtgtcatttaatcttcccaaccctaggagataggcactgatattattcccaattaacagacagggaaataatgctcagagaggttaagtaacttgccccaagacacacagctagctcatgagtagttcaagtccagttctgcccctacttcctaactccctcaccccaattttgtcctgtttttagtctgaacatctcagaagccaggcctggatctccataggtgtcagaaggaagattccagagccaaagtggacgtttccgcagagccgtgggcatgtgattaatttgcaggtacaaggcagttccatgccctcccctcccagtgctgagctcgctaatgagctaagtctgagagtgcagacgcaaggatgctgaagagccggctgggcccaagttcggcctggggagcccccctcccccggctgcccccgccggcgtgccatgtaagtgatttcccactccggcagcccaatcaattggctgtttctctgcttaaaaatcactgggttaaaatgtttccctgtctatagtcagggcatgttcttggcccatcagggggcctttgaaaggggctggttttgtatttaagaataaagcctcactatcaaaaatttttaatgtattcttcagcagttgagagatgacagtagctttgggatctcctgaaagagatgcctctgaggggatttagaggcgtcccagggaggaggcttcctaggtggcgctagtggtaaaggaccctcctgtcagggcaggaggtgtaagagatgtggattcgatccctgggttggaaagatcccctggaaaagggcatggcaacccactctagtattcttgcccggagaatcccatgaacagaggagcctagtgggctacagtcatggagtcacaaagagtcggacacgactgaagcgacttagcacgcacacacagggaggaggcaggttgtgtctcaggctctcggctgcagagaggcaggcctgggctggacttgatgtcagagccctggagccgtgcctggtactcagaaacgtgggtggtgggcagagagcagggccctagggcttccgaggtccccatggaacaggaagccgagctgggcaaggctgtgtggcccgccgtccagagggcctgtaggtgcgcttagtgggtgcagggagcagagatgctgcttctcttttgctctggaacctaaatgccccccagagcttcctgcctgccttagaaaatgatttgtcaggtcctgacaagggtgcagcatgaactccaaggcaacgccagaatttcagcagcttggaacttagggctggttggacatgtttgaggcaggggcattgtttttatccggggcatatattagggtaaaagtagataggctggatatagcctagagttcaccaggaccaccaggagtcagtttctccccgaagcatcttctccatggccctggatggggtcggggcacaatgaggttgttcctaccagaatgtcacctcttggtgagggcagcaggaagacgagacagaggaagagagaggtatctagagaaatccatggtatttctggatgtactatcctcctgggaaggcagaggctaacctacctgtgcatagctggaaaaagcaattcaggcaaatagccagtcagttaatggggaagacccagaccgagtcaaaatatttgtttttctgataatctaatcaatgcagtcaaggtgattgatgcaccttccctaaaggtctaaggaaagcaacaccctatatgatatctatgtttctggaagcttccctcagccattgtctgcaggggaagcgcagcagacacattgaaagtaaaggcagctacttttttttttttaagactacactacaacttagaaaagagagtggtagaagctgtcagagtccctgcccacctcggctcctcagactctccctagtccaggagagaaactcctggaaccgctccagccctctgcatgctcagcacagttaattctctgattacaggtctcatgcagtgatctgaacctaaaataagagtttctgatcttaaggtcaatcattgaattgactgtaatctttattaagaggaaaattagtagtaatttcatatttcaacagagattttttgaagaagaaaatatgactcataatgggttgagaagatggcaaaatctaataaaaagggaaaacttcgactactcacagtgaattttccaaatgaacagctcatacatttgcatgaaaaataaaaatgtaacaactcacaggtgaataatcataagcaggtaaatgagagggaaagtag

SEQ ID NO: 45962 - DNA, 1719 bp, Bovine  19866880879381
  misc_feature (1)..(1): n is a, c, g, or t
ntctgtgctgcctggagattgcatttcccaagagacaggaagaaagcaaaggccaaacaagggctacttttgaaaaagaagggccagaccgaacagcaatagctaaaggcggttttgcaggacaatgcccaccttctcctctatgatcggaaatgaaacgagggcagggtgaaaaaggagagcgcttccacctccttacaaaatgcaattccaaccccaaatattagattagcccttggcagcctcctctccatcagtagaatggaaatctgaatccttttacaaaaacagtccacaccagaagagaaagactttcacattggaggtaagtcagccaggaagcctgtggtctttcgctgtaacaaacatctttccttgttcacttggcaaaatacttggctcagacccaggcaatcaggggaagtggttgacacgtttctagtccgataaggcatgaagggcattttacaagttgttctggggcacgctatgctttctctaacaaaatcacaaattttcagaacccaacagtctggcaaccagaaatcagccataagggacaaactgtgccctttgggcccctggatggctagggagaagaggcagattgggtgtaaaccacaggctgcccacaccctgtacctgacaagagattctgatgcttgttatgatcgtatttgaaaatcctttattgaaactgtcagtatgtgtattagtcactcagttatgcccaactctttgagatcccacagactgtagcctgccaggctctctgtccatggaattctccagacaagaatactggagtgggcagccattcctttcttcagggaatcgtcctgacccagggatcgaatgggtctcctgaattgcaggcagattctttaccacctgagccaccaaatccactgtcataggattgtggaaagcgcacccacaggactggaactccaaagatggaattccaaactagctctgcttctaaccaggtgggtaactctgcaaacaccaagttcccacctcattcatctgtttcataactgacagtgttttaaagatccagtgaaacagtatgaatgtccccaataatggtaaaagactttttgaacctatgacgttaaaagattatcactgcatttcacatattaacgtcatataactacattcatatgccctatagggtagacatgatcaattccactttcacacttgtgaaaatgctcttggagaagttggggtccaaggtcaaagagctggtaaatcacaagtttggcgtcaggcccagtttttcggatgcaggcagcccagacgtgacaagcagcgtgcagcacacagttggtgtgcaaagggcaccaatctgacctcaggagacctgagcaccaatctcccaagtccattctttcagtcactcgattttctcctttcaaaaattggggtgacattacacaccctatttacctggaaaggttattgccaggatcccaggagccaacagtgccgaagtcctctgggtaagggcagaggtgcccaagtggagatcaggaaaactagttaagagaagggacccaggatcaggaagggaagtgaggaattgcaggctcacaatcagggaaacccagcaggtggttctgcggtggaagaataagctgccgaagctgtttagaagatgaaagggtgaactaaaagaagggcctttgagtgtgttcagctattttgggt

SEQ ID NO: 45963 - DNA, 1603 bp, Bovine  19866880888463
  misc_feature (1)..(1): n is a, c, g, or t
ncttctgaccttgggcacacgcaggactctgaggctcaggcctattaattttttttttttttttttaacaaaactaggattcaagcagcctcccgtgaggacaaggcaaaaggcagcacagaagttttctgctgcacagcaggtgtttgtgaacacggggcccctccctgtaccaggggacaaacccaggcagatccatctggctccaccatgtgcctctgcttgcccaggtgaatgtttttccagagcctcttaaggttctgctcattaaaacagaattgagggtggcaatctggaaatcaagtgcctccttgtgagcgccaggctcaggcggtgctgaccctgagacctcacagcaccctccccccaccgacccccatgcccccacctccaccgcaatccccactgtcacacagcccacactgaacctgcctgccgcgtggcaaatggctcagggactaggggctgtgtctcagtctctgaatatgcctggcatgtagtaggtgagacacgtgcttgctggaaatcagcatcataacgcttcaggcaggtgggctggagggatacttcctgatgaagtattcttcctgtgctcactgcactcacggtatccttttttataccaagataaatgaacctaacgttgtttcaatgatgatacagaattaatagtactctacactatctattcccacccaatcatctcaaatattcagctcaatcccccttcctcacacagcaaaactttctttcaacactaattcaacattctaaatacaaccctacatctaagacttgaaaagatgaattccacagtaaaaaacaaacaaacaaacaaacaaaaccagctgctcccatctagtgagcataatttactcactaaagcacccagtaccaggctccgtgggcttccctggtgactcagacagtaaagaatctgcctgcaatgcaggaaacccgtgttcaatccctggtttgggacaatcccctggagaagggaatggctaactattccagtattcttgcctagagaattccatggacagaggaacttagtgggctacaatccatggggtcacaaagagttggacatgacagagattaacacacaccagactctatacttacgtatcttctctctcctaatgctcacagcaagcccccatttgacagatgggaaagctgagacagagagaagccaaggtgagacagttctgccccaggtgagacagttaataagtggatcctactccttctggcctccctgtgttctgttccatctgtcaccttcctgtttgtgggggatcaggacagaggaacagagcctaattaaaaatctgccaccctgaatctcacctgttggcagtcttccatccgctgccagcaactcccacacccgagcacataacttgagaagatttagagaactttctgcagtcttgtgctaggcagatgggagtggtctgcaacccaggggcagaaacagaacttccatctccaggtataccttgtcaagcctcttccattacgaaacacctggctcatcacatttgctcctttctattccattactcatgctaatcccacacatcgtcattcccgg

SEQ ID NO: 45964 - DNA, 1592 bp, Bovine  19866880952004
  misc_feature (1)..(1): n is a, c, g, or t
nttcagtcggagccgctgtgaaaacggcgcccctgccctagccctcccttattaaaataacagctccctgaaagtgggtggagaatgttgtgtttggtcctctagcacctagcagtgggtggcgcgccctgtcgtgcacctcgagtgtctgaggagcaaagacgtaaaggtgacccccaccgatgctgagccgtctgaaggctctcacttgccagtgtcccaagtgaaggcaggctgtgaacactgattttctagaagctacggttgttggaagggaagcaaacgtcatgcacttcagcttgattctctcatttctgggtttcccaggagggagcctgaggaagcgggggccatgccggtccctggtaccctgggctgggcagcagtggtctctgctgagagcctgtgtactcagaggctccgggggcgtccattgctgcccacagggcctcgccttgtctgggtgttcacaggacgggctgtgagcctcacaagacacctcagaagctagcctccttctccatggtggctttgatccacgttaggaatttggtcacttgggtgtagacgcctggcctcttcccacactccaggccccagctcacgatcccatagatgtaggaggtgccgtccttctcacaggtcagagggcctccggagtcgccctatgggaaaagatgcaagagtccactctgtggttcagtatacactcagacacccctgccttccgtgaggggatgctggggggtgaggggtgggattgttggccagccctggggaaagtggcaacaaggttcttcctatgcctcatatgatgcagtgctccgaagggagagaagcagataccaacctgtgtcttaagtcagagagggcttggcagagaagccatggggccaggcccaggtcataccctgacttcctaacccaccatgactcagtgatgcaggtattactaaggggctctcgacttctcattccatcctgggatctagcaggggctggagggatgccctgtttggatagagcaccttccagggcctgcagggcacacactggccaggaaggatggggttcagaggcagcatggccatgatgttcagcatggtctatgggctgagatttaccagtctccaagccaggctgtccatctgctggcctgtggggcctccatttctcacactgtaaaccataggtggccacagaacccacccgagggttcttgtgaggactaaggtttgtaaggcttatgggacagtgcatggttcacattaaacccccaattagagtggagaggaggaagatggtgaggagggcaggaatgagaaggacagctcacacacacacatacacacacacgtatgtgctcccacttacacacctggtaggatatttaatgaattatttctttcaatcttagccacaatctcccaattttatggataccctagttccattttatagattagacacttaatgttggctaattatttgagggcagcagattgaatgtttgtgtcctccctgccctgctcaaattcctgtgttaaagcctaatgttttatcagaagatagggctttggggaggtaattag

SEQ ID NO: 45965 - DNA, 1693 bp, Bovine  19866880978843
  misc_feature (1)..(1): n is a, c, g, or t
ncttttaatctacttttgtttgacaaaatttttcttcatagtatgtagttaaagttgtaaatcatggtctagtaattataaattctgatttatgaaatcaccagattaattagattttattttctttcctttggagagaagggaacatggtcttcatcgatattaatattgctttcatgaaatctttaactgtgttttgcttaacttttcatttaaaatattttcatttaaatgaaatgaaataaaatatttaaaatattttgtatttaaggtctcatttaaatccagagcattttagctctttctcttatgaaattggcttaggtattttgtatgtttatcctttgccaacaaaggtctatatagtcaaagctatggttttccagtagtcatgtacagatatgatagctgaaccaaaagaaagcttagtgctgaaggattgatgcttttgaactgtggtgttggagaagactctttagagtccctggggaacaaggagatcaaaccagtcaatcctaaaggaaatcaaccctgaatattaattggaaggactgatgctaaagctaaagctccaatactttgatcacctgatgcgaagagccgactcattggaaaagacaccgatgttaggagagatagaaggcaggaggagaagggtacaacaaaggatgagacgtttggatggcatcaatgcctcaatggacaggagtttgagcaaactctgggaggtgctgaaggacagggaagcctggtatactgcagtccgtcgggtcacaaggagtcggacatgactgagggactgcacaacagcgtgtttatccttaaagtttaacactaacactgttcctttttgttatttattctattcttaagggtgactttaattttcaatagctcatttgtacctaatcatgtacctaaacccttttaatattgattcttcctccctatattttacctaaatatgttgatcttcctttcacacacagactaatatgctatttctaagagaatttggtagctttttcttactatatttgcagactgcctcataatagtagctttctatgtattaactcccctcttccttcctgtcccccatcttttcttacaaataataatggttcacattttaatggaaagttttagataaattatcttcattgtttcctttaatcattatttattttgtgtaaatttcaggattagaatggctgaatacggaagaacctatttctgtctataaggatctatgtggaaaagtggtcatccttgatttcttcacctactgctgcataaactgtattcacctgttgcccgatcttcatgcgttagaacacacatactctgataaaggtatctgctctttttagttggtttctaacagactgtcctggcatagtcactggagagtggctgactcattttgctcataggagaatgaacatttggcaagactgcagtgattctgaaagtaatttctaatcttgaattaaggactctgtgtacctttttgtgaagagttaagcttagtgataatggtttgccttcctaaagaaccagcgtttagtatatgatttttctttaaaaataaggatatagtttacttttttcatgatcaagtattttaaaaatgtcattttgtacatctggacttaactaaatttgttccatgaaaaaaagagaaaataaa

SEQ ID NO: 45966 - DNA, 1046 bp, Bovine  19866880983201
  misc_feature (1)..(1): n is a, c, g, or t
ntacagctattcaaagctaacgatcgaagcagacagcattttgaggaatcaattgccattttcctcctctcttgttcacagaatgaaggaaggtgttttttactcatctttcgtgtcttcctgctcttcttgcaaatggtatcctggaactgcgctacgtgtataacaagtcccagataaatacttgttggtttgattgattctttgtcttccttggtgacaatggctagattagaattgatgggatgattttccccagggtggactggaacaccatgtacactgtggtctcagtaatttgattgatgatcatatgttctacaatgattactttcaaatctcaaacctccagaatctttcaaatccaaaccagaagttgttttttctttttttttttcttaaaagcttagcattattttagctctcaccagtgcttgccaaaactgcaaaccaaacccaagtaggtgaaagttattataactcacaattctatgaaaatcaatttcagctttgctaatgtttaaaacagacaagcgtggcactcaagttttgtttgtttgtctaaaaccagagtttccatgtggtgggaaattctaactcagaaaagccaaaatatacacggctaggtctttggcaaaacacacaaaacacaaactaaaatgaacactaaatcacaatttgatattgaactaaggatggcattttgtgccattttttaacttttctgagtatttcttataaaaatatattcctagctgccgaatacacacagataaagggagatggctccaatccagcccactcagcggctgaaagtgactctgattctgaatcttctccactgggatcgtcattgacgaagcatgcagtgaatagccctgcctcgcctgaagtgccgacagcccgtgggggagagctggctctattaaaggcttcaagccacagcagtcactcgctggagaggaagaacatggactcaaagagaagcaagagccacctaccggttcagttactccacccaaatgccaaaattcaggctcaaaatc

SEQ ID NO: 45967 - DNA, 1386 bp, Bovine  19866881006762
  misc_feature (1)..(1): n is a, c, g, or t
naaatatggctataaagaagcacaagtaccaaaacccacctaagaaaagctaactgatctgatttgattctgtataaatgtcaaggcttctgagaggaaggaaggataaaattgtgattactgagcaaggggaaaatgaagagtagatatttggcaggagggtggaaagagctccagagtagtagacctgaatcagatgtgccatttttgtgaataagattccttagaaccacaaattaaaaatcaggttcagaattctgtcattttttttctagtttcagtcaaatgccccaaccctatttatatgaaatcagacttttccccctttaacttcagtagcatgtacagccatctgaattttcactttataccctaacaaagttctgtgaaaaaattttaatacatgctgtttcttttcttttcaaaaaaaaagaatttatttgcttttggtgatgttgatggagtaggaatcaatgcaaggcttcagcatccacttggagtaacttgggaccagaaaaggaatttactgtatgtggcagactcttacaatcacaaggtgagtcttgacagaattatataataccctgcttttcacttgtggtatttaaaatgctgaaagatctgtgagcctcctacaactgccactctaaactgtagggaggagtaacagtctttgacaactgtacataagcctctctattccttttttggtcctttctttgcagaaatgatgtgttagtactctgagctggggaaaggactaaacaaattcccaatgacaatagccagaaattgggaattgcaagccactaaagctgttgagtaacatcttcagtaaataaggagaaggcaggtaacagggaaattaatatgtcagttaacaaatgaacatttttgagcctttgcatagttagcaaataattcgttttcatcaacatttctgttttctttgtctattttatttttactatgcatttttaaaataaaatcattggaacataaatattagtattttgtgatgagaagcttatgaatttaacgtaattgaaacacaggaatcacagcgtctaacataagtagcaaatcctcagccagtattagatgttcctaagaaggaggtcagttcaactgtgtcccattgtgagggaaaagaagaacatgaaataattttttcaaagatttcttctagaagacagactgtaactggggatttcatagtgtttagctctcaggatgaaatatctccccttagactaatttgaatgtttggctgttcaagaaaatatggaagtgtctgttctttctctgatgtttattaagaaaactaatagcaatcaggaattctctgccttcccaattaatatgttactcttccataccacaaat

SEQ ID NO: 45968 - DNA, 1627 bp, Bovine  19866881027669
  misc_feature (1)..(1): n is a, c, g, or t
ntgtctctgaaagccttatgctcagcagatgttctccaagcattgacttttgagtaaagcattgtttaaccatagtgtgtcggttgctcaatcatgtctgactctttgcgactccatggacggtagcccgccaggcttctctgtccgtgggatttcccaggcaagaatactggagtgggttgtcactcatagtgggggaaaccaaaccagaaaatgtggtccctacctactcagagctgtcaacctcactggggactaaggacttgcattcatgggacaaatagaaaattagagatgggagaatcgccaagtaatagcccctttgctttagattgggtggccaggtggtgcttctgggcaggttgaagcagagggaaagtggcccttggcctctctgccttgctgtgcttagtctcatgtctttagcggttactgtgtgaatttccaaggggccatatctaagcggctccggttccagctggctccgtctctggggttggaattctgctcttggggagatttgttccatctgagaggtcaccagtgagcagctcgagttgtttttccaggagtgcaagccgtggcagagcatctgtccactctcttcaagcccacacagctaatatggaagtgcagaaagcagccttttcttgaagaaagtgtttaagtgatgagactctgagataggtgagaaaaggcagatcttgcaaaaaaaaagatgacagactgaccttgaaggtcaggctcagcagggagcaatgcagtcactgccctggtaaatggagcacagccgtctccccctcgctggttcttggagatggagataaaacccctggagtatttatcctggagaaagttatttacatttctggctactctcctgaggtccaagcagacaggatcagtgatagcccaccgaggagggtagcctgcaaatcttctgggtgccgattgtcagtgataagaactcccacttgttcaagcgggacaaagaactgagttctgtgatgtgtaaacacaaagacttcttggttcttgtcttccacacttcccttcctcactgtctagaagggaaaagatgttagaaggaaaaaaggatattttcaagtgtatctaactttatatacactttgccgacagaggtctgcatagtcaaagctgtggtttttccagtagtcatgtatggatgtgagagttgggccataaataagggtgaatgccaaagaaatgatgctttctaattgtggtgctagagaagactcttgagagtcccatggactgcaaggagatcaaaccagtcaatcctgaaggaaatcaaccctgaatactcactggaagggctgatgctgaagctgaagctccagtactttggccacctgatgtgaagagccgactcattggaaaagaccctgatgctgggaaagattgagggcaagaagagaaggaagcaacagaggatgaaatggctggatggcatcactgactcaatggacatgagtttgaacaaactctgggagatcgtgagggacaagggtccctagtgtgctgcaatccatggggtcacagagttgaatacgactcagtgactgaacaacaattttatgtaacaagcatgaacctagaaagt

SEQ ID NO: 45969 - DNA, 715 bp, Bovine  19866881044224
  misc_feature (1)..(1): n is a, c, g, or t
nctagaatattctgaaaccggctgtgaaaatgtagggcaagtctgcagctctcagtaggtgcacgccttatttggtttagaggcattttgctatgctcttgagtcatgaaaagctattaaaagagctctatgggaaatccagtctatatttcgaacaaaacaaactgtcttttccattatcactgaccccccttacagacacacagtacataatctttttttgtgcttcactggtatttattgcacatggacaaattcctcacatagtagttagttgcaccagagtataaatacttggtaaagcacacagaggaaatagtatttacacacaagtgctaaatttcaccagcagattcacgtgtgcctttggacataaaaatataataaaaaaaaatccttaagataattttttataatatggatacagtaccatgataaaagagtataaaaaggtatttttccaataaatcgctagctcaataacataacagacaacagagatagagtctgaattttattttagtttttaagatctgccccaccccacccccattaaaaaatatttaatttctttttgtgcaaataacgtcttctgtggactttacagttcctaatactgtgcaaaaaaatgccactttgaatcacggcttttttggtttgattttttggttataccacatgtgcagtaatctgaattggttccttttttcttttt

SEQ ID NO: 45970 - DNA, 2937 bp, Bovine  19866881078539
  misc_feature (1)..(1): n is a, c, g, or t
ncctcctgttgacacctccctgggtgacagctcacccctgtgagtcacagaccactagctggatggcacttgtcttggctcagtgtttggcctcattgtgggggagtaatgaggagtggtgggggctgtggcaaagggcagagctaccgctcagctctgagagatggtgatcttgatcaaatgggactcagagtagccagacagtccagttatcccaaagaaaccagaaacccatattattatataaattcttacaattttaaatgctgagaaacagttcagtattttaaaacccactgacccaagggaaacagacccagtgaaaagcttgagatggcatctcttgcttggactcactccattcttgcctgttccaacaggagctaaacaacaattacgactgaaaaatagcacttactatgtgcctgccactactgcaagtgctttacgtttatttacacattgaatcttcccaaccaccctgtggggagcactgttatccccacctcacaacatgtgaactgaggcacagagccctgaagtgacttgctcaaggtcaccagccggtgtcagaaagtaagtgttagtcactcagtcatgtttgactctttgagatgccatgaaccgtagcccatcaggctcctctgttcatggaattctccaggcaaaaatactacagcggatagctattcccttctcctcgggtatcttccccaccaggggttgaatcccggtctcccgcattgcaggaagattctttactgtctgagccaccaggaaagtccctggtatcagagctagagttcaaatcccagcagtcggcctcccaaagtggctcccagactgcatactataactgtggttttgccaatgctggtgtgcttggaactgttacctgttatcttatagatgagtcaggggttccctataaccagagctatctctgcttacagaaggagatgtattatgacaaattagaaaacaaacaaaacaaaaatcaaaaagacttataaattagcttctagaacaagatctaagaacagagtgttccaagtactagactacagaatcttttgttgggatttggagaaaagggacagcattgcttcattctatttagttaacaattcaaggagaaaagtttttttacattctgagttttggacctggggtatgtagaaaaactaggaaatatgaagtcatttcaatgtcaagtattaatgagattacactatagtagcttcctaacgcactaagtcagagggaaaattatcatctcataatagagtctaatagaattcagaattatgcatgataaaatgtcacaaaactctgttttttaaatggcacatttcttcctgataattctgcattaagtatgtagcagagcacaattactttcctctgcaggacataattaacactttccatgattaattatatctttgcaacatcacagatgcttggtcaatgattcagtctactttctgaaaggtccctttgctgagggtagagtctcattttaatgctattagtgtttttaaaatccatctgaaaggaatgctctctaattaagggcccatgcttgtttatttgatttcagggatacctgaccaactttaagactaccagacagaaagagagacctcaaatataaatggattcccaaacttcctgaaaactaaagtcctacattaagggcggtaaaaattttcacacaggagccaggaaaataaaaaaagtaaagcaggtgaaggtgatagaaagaagtgggcactgagtccccatcaactgctgcgacgcaggaactagggccacagttcctgtgtgaactcacaatttctacatatcgtttcaaaaacaagttttcttaacactgtgtggccacacccaaatacctctgcaaccctggatctggctcacgggctgccagtgcagaatctacctctgcttccaattaatgtttctaatccagtctagtttaattcatctctcagacttctccaggttgagctgactctattgcagatgcctggtttgatccactgtcttatataggcaaatgtaatagcaagtcatgttgtaacatataacatgttataacatataacatgaccctatataatagttgtaggaccctctctcatttcatttgtgttactaagcattgtttctagaattctactgtcaaagtgaaagtgttagttcctcagtcatgtccgactctatgcaaccccatggactgcagcccgccaggctcctctgtccatgggatttcccaagcaagaatactggagtgggttgccacttccttctccaggggatcttcctgacccagggattgaacccccggcctcctgcattgcaggcggattctttattgactgagctactatggaagcccactcaaagaaagaactcactcagaagcccactgtgaaagaactcactcagattttatgagatgctcttgatttctcaagttactcaggtaatgtatgcagccaaaaaaagaaacctggctttggtagccaagtttaaacttgaatttcattaaggtgaaatgagtaagtcaatgcaaccaaactttctgggaaagggagaagcaaaatgggggctctttatattctacttcccatcccctgctttttcacacatctgaaaagtccctttcatccatcaagctgtcatttgccactgactggcctttgttgtcctgtatctatgttagatgctggagatgcccagctgaacttgccactgctcctactcggagcaaaagggaaacagctgcaaagacctatctaccaacagcacagaccaagtcaactgctggagctgtgctgactccagaagaatgtgaaggaaagtagccctgagcactcaatgggcacaagttgaataacatactaaattatttttttaagattttttttt

SEQ ID NO: 45971 - DNA, 765 bp, Bovine  19866881079169
  misc_feature (1)..(1): n is a, c, g, or t
ncttcagtcacaaatggaccgtcttgccctctcaactgagagggaccgctggttacatcagctatgtggcttttaggcactggttgattaattactgaaaatcttgcttggtattcttacctaatccccgcttccagcacacatccaaatcttctggttttaaaattagctatacgcatttgctcttggtacttatattattttttaacagtttagcagatagaatatatctatctttataattccttcctgtcttctttttttgtttttcctcctcaccttcttacactcagtctcactgaagagcgtagctatgccttagaaccctctctgggctccgaaatttctaaactgttcaactgttacctcttcctagggtgcattctaccactggtttaaagtttggctgcaaactgaaatcagtgtttaacagcactgattcctggttccaccctcagagatcctgaccgagctggtctgggatgctgcccaggctctgggactggaaaagatctccaggtgattctagggtgtagccacgactgaggaccatcacatctagtccctctcattagggtctttagaactctcccccacccacttgcttctacataaactccctggaattttacatttatctctttaaattcccaaagacctagcttttgcttgatgattcataacaacacccaccaaaggaaatgtcttcttacttgattttatagttctttggagcttgcaaaaccctgtccacacatttttact

SEQ ID NO: 45972 - DNA, 1591 bp, Bovine  19866881099331
  misc_feature (1)..(1): n is a, c, g, or t
ncaggtatgtttctaatgagcagccatgtttagaaaccaattgggactatataatgatcttttacttttatctactttgtttcacattttctattttatattcagtgctcccatttcacttagtttatgttctccaatttctccctctcttttttttctttgatgttctttcttaagtctttatcaaacgtagtagaaaagcctttgtatacacatatatacaaaaataatatgtataatatatatattttagaaaacttgtgaatttttgtttagctaaaaaaattatgaaatgtgatttcatttgtttgacttagtataaatagaatgctagatttctaattttaaaaaatagatacacaataagcaatgaagatttagtgtatagcacagggaactctagtcaatatcttataataacttataatggaaaataatatgaaagataatatatgtgtgtatgtataactgaatcactttgctgtgtacctgaaatgttgtaagccaattatacttcaataaaatatatatattaaggaaaaaaggatgttttctgcattatgatggatcaatagcaaaaaggtcacattgaaatgtcccatctcaaaacagctctgtccaaactgccaccttactcttgggcaacctaaatgtgtgagggcaggtgctagttgtcttgggataaagaatctcttgccaattgctcaggagaaacaccttaagagctgtcaacagcagggaggtaactcatgtttttttggtgccacactttctccttttcaccatccttagcgaggcttcattcaaagccaataaaaataacagctaatatttattcagcacttactgtgtgccaggcattatcttaagcactttacctacataagcttctttaattttcatgacaaccctaagagaggaagctgaagtacaaagagatcatgttattgccacaatgactttatttccccaagcaatcttggaagggaaataatgttagtcccacttttgagatgaagaacagaagcctaaggggtaaaaatgacttttcacagtgagaggcagacacctaccagagcatcgttttgagtgcacctagatgccttgcttttgtagagcagcatgtgggagccatgttttgcccccagacaccattcaccattatcatgggccagtcacagcccaacatgcttccagaagcattgtattggatttaagaaaagataaggtaagatagccccaacattgggctatcatgaagaacaatgccatcaaatgctgtaaagatgtcctaggctattgctccgatgagaggagtttcccctaaaacagattccaaggctgcctttttcttagctggtcccagcaaaggtaccctctgctggctcaagtgacaggggatctgaattgtgcaaaagcacctaagatttctgggagctacagagggaaaggggagggagggtgagcgcatgtgagtaagaaggatcatgttcctggttttaggttagctccaggactggaatgcttaactcatgtggtttttcaagattaatcataagttacaacaagctacttcccctggggtatttca

SEQ ID NO: 45973 - DNA, 1181 bp, Bovine  19866881101384
  misc_feature (1)..(1): n is a, c, g, or t
ntgatatggaaacctaggaccctgagtgtctcagtcccttgctcaaggtcggctgcaaaggggcagagctgcacatggagccagctgtccatcgcatgctctctccacagcttcacatgttctctggctcagtttccctgtttctaacatttctttccactttccataccgtggtgggattggacctgaattgtccgtgactttattctaggggttgggggaggatgagcagaagtgcaggtgggtggttagggaggagtgggcagagcttggagggcagtgggaaggctggaggaagaagagatggcgattatgcatctgactccccagaaagcccagaatgagcttcgaggatcttcaaacagctcctctgaggactggggtggagcttgaggtctacaaacaggcctcccccttcccgttgcaggatgcatgttgggctcttgggaactcatccctcaaaactggcttttcaagcgtccgcccactgctctcggttcccagatttactaggatgtcattgtttaatgcttgaagacgctctccatcggctagcatatgaggagaaaccctggtgtctcagtctgaacttgagaggatgataagaattgctggggagcaggaggcagctcagctatgcctcctcttgcttttcgaaagagagacaatctcgacttgaactagggaaccactgacattttatctgtcccttgaacttctgtattttccccaagtcggggaaccctgagcctgggtcatcccaatcaatgacccccaagagctgagagtggcgagtggcaggacctagagatgagtcctgcttattaagccagtgcccataagaatggaggaccggcccttctaagaacacccctcggggctcacctgggacagtcccagcacattgctctccctcatggccctgatgcaaacggcagctttgaaataactgtcgatctgtctgcccatctaggtgaattacaagaaagactttgaacactcaaaggcgcagttccatctgccgttggacatggtaaccctggtgcatgccaagaaggctcagaccctggccagcgaccaggactacagacacccgctcccccagtacacgtccttggctgaggacctgaggctcagctgcgccaagagagctcacaagttgcagagtgaggtaaggggac

SEQ ID NO: 45974 - DNA, 1136 bp, Bovine  19866881112970
  misc_feature (1)..(1): n is a, c, g, or t
nctttcacaagccctgttagttatctatctagcattatcttaacacattttcaagccattggaaggaggatcacagacacatacagggtatgtgggactggatcaaaaaggctctgctgctgctgctgcgtcacttcagtcgtgtccgactctgtgtgaacccatggactgcagcctaccaggcttctccgtccatgggattctccaggcaagaacactggagtgggttgccatttccttctccaatgcatgaaagtggaaagtgaaagtgaagccgctcagtcgtgtccgactcttagcgaccccatggactgcagcctaccaggctcctccatccatgggattttcaggcaacagtactggagtcgggtgccattgccttcttggaatccaaaaaacacagtgttagaggaaacaaaaatatctccctctctgtggctgcagtgcaatctttttcagatgtgacagcaacattttggccacaagagggcagtaaagacaaggctaccaggaccaaatcgcaccagattccatccaggcctcagaagcaagtggagaccgtggtcgcaattgtttcttctactgatattacggccactgtcataaatcttcagctgagatgtactgcacagctgatgagaagagctaacttacgggttctctgcagtttccaacagaaactaagctaaatgggtttgtattcatgaatgtattcgtgccacctgcatttattgagcacctactgtattccaagtactgtggtgctgctgaggatgacagagaagtaaactgagaattctcctgcaggctcctaaaaggcacctgcaacctcagaggagacacttcacgtcttcctggaagggcctggggtgaatggcatctcaggaggtgacatgggcgttgggccttaaaggaagtctaggattcccccatatagagaagcctggggagagggcatctcaggcaaagggaacaggagaatgggacctgctcaagtccctggcctggaagtgaattttttttactactttccaggggttggaatttgatggttatctttatatgaagattcctgagattttcccgtctcttttggtcagggtttgtaaacacaggagtggagctacaagccccag

SEQ ID NO: 45975 - DNA, 839 bp, Bovine  19866881148033
  misc_feature (1)..(1): n is a, c, g, or t
ngggacacaggttcgacccctggtccagaaggatcgctggtccagaaggttcgatccctggtccagaaggatcccacatgccacgggacaacaaagcccgtgtgcctagaacctgtgctcctcaacaagagaagcccccacaatgagaagcccgtgcaccaaacgaagagaagtccccactcgctgcaactggagaaagcccgcatgcaacaacaaagacccagcacagccataaataaattaaaaaattttaaagtagcagcaatagtgtccagctagtgtggaactctacccttccaaggcaaaggacttgctgtgcctctatttattgaatggatctggataagcatttctacagtatgtaaataatgtcagttacctacaaaaacatatggaaaaagatacctgtttggtctactcaaagtagtgagtgaaaagaaagcaaggtaaatgatttcgtctgctacccaaaggcacagcaacctgtttttctcaatggttcccgttggcagttccatgcaattggatggcccagatccatctttcttgggtgaacggaaaacacaatgtcttcttttattttagagagtgtgctgtgtgctgtacttagttgctcagtcgtgtccaactctttgtgaccccatggactgcaatttgctaggctcctctgtccatggggattctccaggcaagaatactggagtgggttgccatgccctcctccaggggatcttcccaacccaggtctctcgcattgcaggtggattctttaccgtctgagccgtcagggaagcctggtgtatgtagagagtgtacataagcttttgggcttccctaaa

SEQ ID NO: 45976 - DNA, 1207 bp, Bovine  19866881193902
  misc_feature (1)..(1): n is a, c, g, or t
nagcctggtgggttatagtccatggggtcgcaaagaattgaacatgactgagggcaagcacaaacagattctttagtaaaggctattttttaccaaaccccatggacgaaatagaattttagcctggatgtaaaagcaaagtcaaagtcttcttttcaaaataaattctattttagcaacattaatttttttctaaataatgaaagtagttcatatttcttgcagacattctcaaaaaacataggaaaaatcgaaactgcctctacatttcaatccttaccgagaagtagttaacaatttggaaacctcttatttaacgactttgccaccttattttcaataacaggtcattttgcttttgtttggtaagtcaaagggcaaggcagaattatctggctgtggctggtgcttcaacagaaatggagacaaatctttgttcacatctagagagccaatcggagaaggcaatggcaacccactctagtactcttgcctggtaaattccatggacggaggagcctggtaggctgcagtccatggggtcgctaagagtcgaacacgactgagagacttcactttcacttttcactttcctgcattggagaaggaaatggcaacccactccagtgctcttgcctggagaatcccagggacgggggagcctcgtggtctgctttctatggggtcgcacagagtcggacacgactgaagcgatttagcagcagcagcagcagagagccaatagcctcctccagagacggggagccagacaggtgtgagctgaattaaagagcttctaaatgtcatctgaatgaaggtcctaacagtggatgaataagaatcacacacgtggtcctgaggtttttgttctcttggcctatggtagatgttcttttccataactgaataatttgaagacctttccagaggtaaacagtgtttttcaattgaatcagttcttctcagaaatttttagagaacagactgagtcctgttcactttcttttactaggcaaacaatttacattctattatgaaaaagaagtctgcaaacaagattactttattaaatcaccacctcctcagcttttcttctctgcggtaagtattcacaaagatttaacaggcctcccaccagcctcatgagcattttttaaatcctttctcttcctctgagatttaactgagatgcaaagtgttttcattt

SEQ ID NO: 45977 - DNA, 1331 bp, Bovine  19866881201755
  misc_feature (1)..(1): n is a, c, g, or t
ncttgtattttgtgggtctggaacaggtgtctgacaaatgttttacaatgatgatggtggtgatggtttcaaagcactggatggtctggtccttttctggtttaaagatacatttttgcctacatgggttttttttgtttgttttgtttttaggccagatttgcctgggagaagcagtggaaagtggatctagagggacagaaggagactatccagcattcctcttaatcacctcagtgtgagaaagttatgcagatgagaaatcaagaattttaattggtaaacttactcatcttgagataagagagtatgtttccagccccactaagccaactttagggctgggattacagttccccagagggaatagtttagcctgtatcctccactgaactgccaagaataatgattttaggtgtaagactaaggagttctcccagaaagctgtcttcaaggtcaaggggaccatctggagctgaaatgagagctgcgctgacagggaagggctgagtgaggcggagctcactcggagataaccagcatttggtccctgggtttgagattctttcccttattcttactgccttccgtcttattttcttaaagatgaaaatgcaaagaaagtatcaggaaagcaaactgcaataacagaagctatgaaaaaagataatgtaccccaaagtaatttcattatagtaaaaaatgaagtccaccaagggtcaagaattctgtggtgttggaaagtctggaagataccaacgaccgatcttggttggtgaaaccaaaaatccaaaaggattcttgggagcaacatatagaggggctggtaaaaggtccggtcaaggcctagcagagggcttggtccagaggacctccagctatctttgctctttggtttcaggtacaggtaggcagatgaggctggaaacacccatgggattgtgttcagacaatggttcggccactctggctctctgtccatccccctgaccaagcaggccctgcttcatttacatgactatacaactcttaattataggacttaagtagtccctggtaactgacgagctcatctgtagtcaattcccctataaatgggagcctccttctcccccagcatggcagactgaggcctcatccttcctgttgtctgctgtacacagtggggtgctgctccaggatgttttgagtaagaccccctgtccaaaaataaatgatgtctctgttgctttctacaggctctttctttgttctcacggctaggcaactacaaggcttgtcggcctgtgcggtgcagtccaacacggtttttccccagtagccaaaaatca

SEQ ID NO: 45978 - DNA, 1289 bp, Bovine  19866881220942
  misc_feature (1)..(1): n is a, c, g, or t
nccagagcctaggcagaaacgggagggagagcagtcagggtgcaaggaagaggcagctctttgggaaccgggagccccatgggttctgcttggtcgggtgagtcactccccaggcctcagtatccccttctaggaaacagtctccagcatctgtccatccggttttccgagcactcttcagcgctacttgctctgtggtcactgaggaatctctggagggtgaatgtgtcctggggaggggagggaagtgagagagggaatgtgagcagcccagtaaacgtcagtttaggattgtgattcttataaataaaaccaatttcctgttgagagtggagcacggcagccttggtgggaaagaggatgccatcagctgtgcaaggaatttgtggctcaaggacttttgtgtgaacaagcctccgaagcccggagcctctctaagacgcgggattattcgctcccatttgagagacaggtccactgagatgaaagagatgaactcggaaagtcagaacccagataagagatccccgagaaatgagtttctgatgggtagagtcctgttctaataacagcaagggcttattgagaaagaagtgctcagaacagtttcaggcacttgccttatcagtgtccttttagccaggaaacgattaagccgctcagtgaaactcttctcagtcttccggcccacatgctgccccttccaggaagccttccctgagttgctgtgtgttccctcactattttaggtacagcacatcccaagtgctcagaaactgtttgttgaattaaagtcacattgtcttatcattatatgtctctatgtctgtctgccctgaaacccgttcaaaacacggatgtttctctcctccaaggatggctccctctcagccctagagcacctccaggtgacatagtaagtgtctgggacatgatgggggaatgagcgaaggaatgaattccaggcaataggagccctgggcaccaaggaaaatgaggcatgatctcaaacccagattccagacgtggagactgcaggcccacggtggcctcccttggctttctcgacttgagcctctttctgtctgttccagcacagggctgttgctgtctgctgctgcagagaaggatgctgcaggtttctgcttgtgagtatgagcctgcctgtgccccctgcagcagctcacccggcctccagggctcccgagggcacagacctggctctgcccatgctctggaccgatttctgaagggatgtttggagctgggcacgggcctgggcactctgg

SEQ ID NO: 45979 - DNA, 1352 bp, Bovine  19866881229584
  misc_feature (1)..(1): n is a, c, g, or t
ncatatttggttgtcacaactgggaaagagtgccgtgagcatctaatgcttagaggccagcgatgccaccaaaagccctgccaggcccaggagagccccacaacaacgaatcaaaatgtccacagggccaacgtcaagaaacgctgacctagtctttaaaagatctgctcagggatactgtcctaaaaagggaggaaagggttcctttcagaagcctgtgagtccagccagggtggctgcaagtagacagcagtgaaattcaaacagaaatgagaccctccaacaaaaaaagaaccgtgtcacatgttcgacaccacgtgaatattcaaaaactgtttacactgcctgcctcggaaagaaagaggaagaaaatgtgcgtgaagtcaccaaagggctttctgggtgcgataaatgtgtctttttatcatctctcccgtgttgcttcattaaaaaggtaagttggtgggtagcaatcgagctctgtttgattgtcattattattcataatatcatttgtcacccactttgtttttgccagggctctctgggcccctactggggtgtgtttggtatgtggttttcctctaattaccggccctagtctgggtttggaggcctttcatgtagctttgcctttttctttgccttttgagtggaaattattttaattttatacagaaatgccgcacgcctaatgcagccaggcccgctgcacgctgtcagggaatctcacctcgctaatgagttctcctgccttcttcgcctgctccacatttaatgacccggtggcgacccagcccgtccctttcatccacttcacatctgccctgtattggttctgacaaaggagaaagggggaaaaaaaaaggcaggccattgttgctgtgcagacatttaaagggctattaatggctccccaatgccaccttggtgccagctgagtcaaattagatgccacttttgtcttatccatttctgcacagtcacaggtagggctccaaaatgtaaattaatttctcccttaattggagccgacccgcggatggtggctttagccccacccgacactgctgggggtgaactggacggaggggggcccccatcagtcgcatccctcattacaggtccacggcaacctcaggaagaagcgcggccttattgtctgctttccccggtttcttgtttaaaatgacacgcaggggagaagaaaatgagaatccacaacggaacccgggtggggagctatctgagggaatttcacaagacatgcgagacttcccacggtgccaattccttcttaagaacctcagcgcagggcagcaaggggaagggatttctcatttctttctttg

SEQ ID NO: 45980 - DNA, 1270 bp, Bovine  19866881248296
  misc_feature (1)..(1): n is a, c, g, or t
ntttgggtaaattccgggagctggtgatggacagggaggcctggcatgctgcaattcatggggtcacaaagagtcagatacgactgagtgactgaactgaactgaacttgaatcccccatctgggatgacagtatatcttcccggtagaaaatgctggggagaaggatatgccccattattatttcattaggacaccactgggtcttccaggagtccctgagtaaatatcatgcttctcaggtgaattagacaagacagccagggaccctgagaactcaggacaataaccagagatttccatgcatgcatctcttcttatgactaaattcctcctttccacctcttgccaattttgtccttccacagcgagggaatagaaaaagattttaaaggaagcatcaaacatgaactgttctctcaacaatgtgagtagaagattcaaacgctagtgtcagcagcaaaggtttctacctcaaaactggcgattgcggtttgcctctaaaatcagcattgacggagcagctaaggcagacaatctctttgctccttcagctcagccggtctgctcacgcagggtgaggagaaaggcatggaattagcaagacagttcagcctctgctccccccaggaacagtcagcacgctctcaatcacttgactttgcccttaattttctgctcccccttcccatgggtgggtcagctctaacatgctctagatggtagattgtaaggtcgagtgctgtgtgtattcagtcactcagtcatttctgactatctgcaacttcatggactgtaactcgccaggctactgcccatggaattctccaagcaagaatactggagcgggttgccatttcgttctccaggggatcttcctgacccagggattgaaactgcatctcttgtgtttcccacattggcaggtggattcttaccactgcactaggtgggaagcccaggttttaggatcgttttaaggtcactggattctaattccccaacttgataaggtaaattctgtgttcattttgagtgtttgtttcagctcagagataccttcttctgggacgtttctttcctgtcatattgcatgaagtctccaactgacttgatttaggaatgacccatggaccttttggagaaggcaatggcaacccactccagtactcttacctggaaaattccatggatggaggagtctggtaggctgcagtccatggggttgtgaagagtcggacacaactgagcaacttcaccttcagttttca

SEQ ID NO: 45981 - DNA, 787 bp, Bovine  19866881335432
  misc_feature (1)..(1): n is a, c, g, or t
nggacactgagaaactgagattttctcagttgaatactgctgctccaaagaaacttgagattctgtttgtaaggaagaaagggaggatagatatagagaaactagcaatatttgtctcacccgtttattgaatgcccaccgaagttaagtgaaagtcactgaatcatgtccaactctttgactcctggactgtagcccaccaggctcctctgtccatggaattctccaatcaagaatactggagtgtgtagccttttacttccctaggggatcgtcccaatccagggattgaacctaggtctcctgcagtgcaggcagattttctctaccatctgagccaccaggcaagcccaaatgcccactaggggaatgtgcttttttttatgggagccctgcaggaaggtgatgatatacccccgtttgacagaggagacagaggatgctcagagaggttaagcagtttgcctaagttcacacagctggtaaacagtagagcaatgactgagattcagatgtgctggatccaaagtctgtgagggtttttctttttcccaccagcaccaccatgcagtagccatgagccaaagattcagtctgcagccgcacagcaggaatccctagtgattcagattttgcccaaattgaaaaattggggctgggaaactcagaggatgttcttgcccttccagcctgcctctgttgtttgcctggtttcaagtcacatgctaataaccacacatatgggtttcatttctcccggagctgcccaagtagcccccaaagccac

SEQ ID NO: 45982 - DNA, 1297 bp, Bovine  19866881340717
  misc_feature (1)..(1): n is a, c, g, or t
ntcaggggctggaagactcttattctgccacaaaggttctttgagttcctcccctttccctccccagctccctgtgccttcagccctgtttctcctcctccccccaccagccaaaggatgctggactagcttatcagatatttggggtctgccagctcccatgagtagtgtgaactggagtcaggaagccggaactttcaacttcctttaatgttctcccctaattggatgcaaaaaaacaaagacaatgccaggaatttgtgggcgagagtagagagctacttctctcgccttcagcgctaaatttctcaggtcctccatgagttacaaggcactttatttacctttaaagatattcctgaatgggacaggatagattgctctgcatctggagcctgttctagaaaattctgggaaagttttcttaaacatcgacaagtctgctgggtctggtagacccttgcagtctctttccccaaacaggagacaacatgtcccttctgcagacaccatcttcacaaggtaatgcgttaggctagaaatctggactctttctcccctttgcctgtcttttttttttttttcttgctaattggcagaaaattaatgaacgaaatactgattgagcagatgctcctcatggaaagaggcagaattggagttttccttgctctcttttaaaattgttttgagcacatcaagaaagtagtaacatgtggcaggtcaaaaattaagggaaggtaacagtacagattgtaaagaatacaaaggaatcgtgtgtgtgtgtgtgtgtgtgtgtgtgtatgtgtgttttctcttttgttttaacttccttgcatcttttttttcttaagttcatattcggctgtagctcataattagcagctaggcctctgggacctaattaaccaattcaattaacaaaaaaagcacacaagtcaccctgacatttgtcagccattaggagggatgtcagactgacagtttcagctgaaacattaatggtgattagctcatttgcgactcattttactccactcttttcctagagaagttgcctctaaactacactgcccagagcagtaggccagtggcttgaccttcaaaggtcaccagaaggctccctcttagctctccctctgagtcaaggggccccatcccaatcagactaagacatgtctatactgcccccaactttttgtttagtctctttggatgagcccagtattcttggctctttgttcaggcggtgagaattcagcaaagtcttctttattagggatgaagcttttaaaat

SEQ ID NO: 45983 - DNA, 1060 bp, Bovine  19866881366387
  misc_feature (1)..(1): n is a, c, g, or t
naaaaaaaaagtgctagaaggggatgccacaaaaagtccaacaaggcaaagggcagtagggtggtgatcatcccaggctcctaagaaatccgggattatacatgggaatacctaccctcaaggagacccaagagcacgaagatgaagacaggatgtccctggcaaaccctccacccaataggtcccagctctgctatgagggacacccagcaccctccgagttccttcctaaaggcccatatttgaattttagtaaatcagctcaatatgttcaaggactttgggtattaaataaaagaagtcagtgaagtctacaaacaataagctcattcaacacaatcttttttctcccccatctggggacttgaatacagttaacatgaataaatcctgttgtgtaaaaactgggagagaggaaaggggggcatggaggatggaaggaagtggcaggactcccatttgttggtctaagagaaaggctaagacagaaccccaaaaaatgccagcatgccaaggtagcccagggagacggtggtaacacttttgcagttgaggtaaggaagtatctggaatttccccacctatgcattcccagtttctctgcagaactcagactaatactcatgtttgcactcaacctagaagtgggcccttgggcagccccaaagctcgccacaagccaggcctgacaacgtatcagggaagattctctgcagatatgcacaagtatttcctgcctctttcccaccctcgttagtcctccaacatagttgagaccattaggactagactgcaattattcgattattattctgtttattattcaggaattcttcctaaataccccaagaacaggtggaacagcctctgtgggtaattagcgtcctggacacacttatgattaagaagagttgcgtgtgtgaaattctacagcgtaattcaccgttaaaagtcatctgggcccatgcggtcctcacggatgaaggttctacagccttccaacccgctgtacttaacaaaaaggagaagacacagagtcagctaccggggtcatagagcc

SEQ ID NO: 45984 - DNA, 1192 bp, Bovine  19866881406104
  misc_feature (1)..(1): n is a, c, g, or t
ntcattaaactaatactcattgagcaggacttatgtttcaggcagggaactagaacagacagcaagaaagatatattctctgtataaatatatatcagatatattctctgtataaaatttagggtaaaactagaaaggaaggtatataattagtacataattaccatcttgaatgatatgaagaatttattctttcctttctatgagtctttcttcatgggaatgggaatattggtgagatgtggggttttggataacctcagcctctccttcaaggactaatccctgcctaatgcctatagaagttgagctttctctgggaggtggcccacccctccaggaatccttcaaggctaatgatgggcaggagaattcaagggtttccattcacattcctgccgctcctcttgagaaagctccatccagcttctccagccctgggctaaagaaaactggaatgtatcccagcctcattacactctctgtgtcaagggagccctccttatctgagaacacagggttggctattgggttgccatcttgggaaaaccaagaacatctctttggtttgagtttgggggataagcaaagaaagctgaacaaacacgtaagtggaaatttggcgcttgtcttatacagtagctataattttcatagccttaaaaaagtgagaaactcaagtgttctgtcattaaacatgctgtaagaggctgttgtaagtcagtgagaggcggtcagcttgctgttgggtaacagtgtttacagaagcctttacctgcctatctgtccatctacctgcctggtgaacacatctggctctgccagccactgcagagcatttctgtccacatacctgtcagattccatttttcaccagaagcttcattaagaaatagaagctgagcattcttagaggcactttaaaccactgaaaataatggagaagtcaatgcaattagccaagcccttggcagtgggatttgaatagcaaaggaactaattatgtgccccgggcacccacacgttgtactcgccacatcatcaggccacaacaaagaatgtctcaaagctgtgcatctcacagcgccagagtgagacaaaagttaccttggtgaattcctttccttccccataaagaaggctgaatcttgcaagacagagtctgctcttgtttacccactatcattcaccc

SEQ ID NO: 45985 - DNA, 1247 bp, Bovine  19866881426743
  misc_feature (1)..(1): n is a, c, g, or t
nctgttatgttgaagggtagagaaaccttcccaacatacaaaaatgtatgcagaattttattcaaaaatgtctaataaatcaaagatgcacttagagtaagaagcattacacagcccagctctttgtgaggctggagagtcaaggggcatactgtttctgtagaactggttgatggaatgggagagattgggggaaaaaacacactctctgccatagataaccactgagcagaggagatttaaaatgaaagaggatacatcgaagcctcactgaaagactaaagaaaggaaagaagcacaaatagatcagttgttgtgtgaagaccttgaggtgtttagtacataatgggttgcattgtgtttggaggttatacagttgtactgcatctcagtggttttgcatttttccaaaccttatagatcacaggagccagaactaccaacagccaaagaccagggatccctctggcaagagggaaggagctctggatttggagtccatggtgagcccttgctgaaagagaggcttctggcacctgatctagcatggctgcccactgtctcttcattcatccattcagccaacgaataaatattaacactccataccagactgtgggccagaggataaattagggcagtaaacacaacagatgcatggtcttctggagaatactgtgtgtctgagatgaatggagaatactgtgtgtctgagaagaacccacaatgaggccagatcaaacagtatctatctcaataagaatgttggctttcattctaagtgcaaaaagaaaatatccaagagttttaagcaggggcatgatgtaatctggattaggcttttctacaacggtggtgcatatgtgctcagtcgggtccaacttttatgaccccatggactgtatcccaccaggctcttctgtccgctgaattttccaggcaagaatgcttgagtgggttgccatttcctactccaggcgatcttcccaacccaggaatcaaaccctagtctagcatctcctgcagtggtggcagattctttaccactgtgccgcctgggaatccgttttctacaagacatactattatatggtggaaaatgaatttaagaggaagcaggagtgaaaacagagaaagcagtaaaggggcttttgcaagagattaggcaggagattacacatgcttagactagggtgggtggtgctagaaggctttgagatgcattctggaggtagaaacatgctgac

SEQ ID NO: 45986 - DNA, 1328 bp, Bovine  19866881439015
  misc_feature (1)..(1): n is a, c, g, or t
natgtcaacatttatttaatacaattttctggaggaaaaaaaaaaaaaatcacatgggtttttcctccactaagtccctaaaccactcactcccttttagattaaaatattactgccccctttcacattttttacactttacattccagttctacataaagaaaggtctcacaatgatcatacctagaagtatcatccaaaaacccattctgcctttgcttttaacgaccatttctcatccagtctcgagtgctgaatgtgtcctttatttcccctttcaggccaaagtgcacttttctagggaaatgggtgataactgagtaggaacaaagtaaaggagaagggcaaagggggtatgagatgaatgctgggcctctgatgattgatcaagttcaagttggtgaaagatctgcagtgtgcctgttgctttaccaagtgtaatgactttaccaagggtaacaatagcttatctttcaaggatggccaactggctaacattctgcaaataaaaattattttatcaactgggttacagccaatttgataatcatactatttattttaatcagctattcctcttgagtgctcaatttctaaagtgggttattttgcaaagactctcctaactccacctgatctggctacactggtatcagcgcttgcttcagctgacctcaagcaagttatgtggtttgtccatgtcaatctcctttaaagcagacaaatgtgacctaacagtatgaacccaaaaagcagacgtcagaaatttggagaagaattgaaggttaacattgtgctttgactcagctctgaaaaattaaactgggtgtaggtttcaggaagcacagtctccagagtctaatttttcctctgcttttgtggctctgtgggttgtcccaatgaggtacttacatcactagcgagttcgttggctttcttggcgttctgataagctggggtgatcatggccgggaagctgccctttcctctgtgctcgccatactcttctgagtaaccctgctggggcaatcgaaaattttaatcaggggacttccctggtggtctagcaattaagaatctggagacacgggttctcttcctggcctgggacgtaggctcccacatgttgcgggggcaactaagcctgtgtgtcacaactcctgaggctgagtgcagcaactcccgaagcccaagtgcaccagagactgtgctctgcaacgagagaagccaccacgatgaggagctcacgcacaacagctagagagcagcccctgccgctcactgccaacacagaaagcccttgagcagcaacaaagactcagtgcagc

SEQ ID NO: 45987 - DNA, 778 bp, Bovine  19866881443227
  misc_feature (1)..(1): n is a, c, g, or t
ntgtttgccttgcatgaattaaaatgaaataaaaatattttgcagtttcctgtttgttacccttcaaccctgataaataattttctgcacaaatgctttcattggtagtcccaccgctaggggtctgttggcatggtgagaataggtaaacgaggccacaggagctgaactggcaatggtaccaacctcttgatctgtagcaaggctggtgaaaacttagatttccttaggtctctctcttttctttgacctggtgacgctaccatcttccttttgacttacatggcaaaacctgcatccctcctgaggagtttttatacaagaggagaactgccaaatcagacaaactagcgtgattatgatctccttcctcaaaataatacttcctttctaaagccaggctcagaaaatctaaaccaacacaggcctccaaactctaaccacaaccgtcttcaaaaggcatatgagatgttccagttcttagcagtctggctacagctgacagagtcaccacctgcttaagtgactgagacaggaggctcccttccagggggtgatgtggctggaacaagtttcatatacgaggcctcccagcttattggtcctgaacctcagatatttgattaaccaagacgcccctatggttactaatcgctcttaatacgaagagatgtcaacaagcctgtgagtatccagttggtctcctcctgagtttactcaccttagcctagacagggagcggggagtggggacgtgcaagtttctatcgacgggtgag

SEQ ID NO: 45988 - DNA, 818 bp, Bovine  19866881484716
  misc_feature (1)..(1): n is a, c, g, or t
nttgccttccatcccctgcttgtgtgaccaggtgttcgtgcacctcttcagaaataaagacagcacaggcattccaagccagtggaagaggtagcctactttgacacacccatcctctcacccatacccaggaaaccacttggtccctgtttatccagaatttgttcagttttacagctgaaagttccatacctagaaaacctttcagtctcagacaagtgaagtccattggtcacccaatgcccattccccctggtggccagtggctagaagtcaggggaccaaggcaatgaagacagaaaagaacctatattgattcagataataagtgaagtggccccacccctagacagccacaaagctccagtgttcattccactctggtaagactacaaaacaacctctttgcttgtatatttgaagaggttattcgccacataaatggatttgataaaacaagtaaataagtaggacatgtgctttaaagtgcaaggattaagtagctaagccttatgctaaagtcagaagagaaacaagaatcttaggtcatgtatcggagtttacgcaaacatcatctaattcttatttatttggttaacactttggggcaggagaagaaagtcaaatgttatagtttcagcatcaaaaacatatgtaaaacagttcttactcttgatggaaactgcccctttagaaggagcgtggaagaatgtctttgtgtttctgagttttcacgttcttgacttaccagatcaaggacagatgtgaatgtatttttcaacttcataacaaacagggagtattgcaacttaaagcag

SEQ ID NO: 45989 - DNA, 1138 bp, Bovine  19866881549970
  misc_feature (1)..(1): n is a, c, g, or t
nggaggagggagagggtttctgaatcgtaagacttgggtatttgatggagcagttaataagctttcaaatgcaattgctccaacgatagactggagaacagctgctccaaggagaagctgacactgttctggcaatattagagcatgatctcagcagtcatcttagcagtacccaaggaaacctggaaagtctccgtctacaccccttacacctttgtctcactttcacgttgccttcattctgaacgcacctctgtcttctgtacctgagagagttctagtcttggaccaaccacatactcaccagcccgtctcttgagcatgtcttcatttcctcttgaatgagctagaaccatctagaacatttagttctagataaatttgtcttcctagaagcattaaaatctcatgaacggtttcctaaaactcttgattttcaacatctctcaatacttagaattgttgttttcttctcgctcaacattccctggctcatagcttttattagtatcagcaagagtacactgttttcttcctgtttatgacatagaacttacctgtgatgcattttaaatgtctgaagtttggatttcttcttgagaatttcagagttgcacataattatgagtagaaaaaaatttaaactcttgtctgtacctttcctataaaaagtcttcatgttgagtttaatatttgggatgtggggctttcttaacagactttattttcctgtttatctctatttttcggttaacttatgaccttgtcagttttttggcatcctgattgcaaaagataacatgagctgttccactttcaattattttgtagattagttttcctaatcattattaggctagctgatttgagggaattgtgggtaaatttctaccagaggagctcagaaaacttgttcaagcagacagtctaaagactggctgttctggctcctctgtatttactgctgtgcccagtgaccttgggggaagttagttggtttccctgctgctcaagttcacttcccacaaagcctgactattaacctttgtttgtaaatccctttgagatgctctgatagaaaggagttcatagatttgcaaagtctatcattactaatacttcctcctgaccttctttt

SEQ ID NO: 45990 - DNA, 1997 bp, Bovine  19866881596151
  misc_feature (1)..(1): n is a, c, g, or t
ncttgagcttatttccatatgtggtcatgtaggcaatactcctggccagtgggtggagtcttctatgttctctggtacacacttggggattctgttctcgtacctcatggtagcctcgctttctcaccttttgtcttctcctgtctgtctggtatagtaatgttgagctctctgaactccatctgatcgtccatgatacagcatgtcccgtggaatcctaactgactccagacatagaccaaacagactagtcccgctactgtgtgctctcctgctttgcaactttgctgggttccctaagcgctggtcccacatcctgttggagtgaagttctgtctcctaactccggacatacgggcccacggtcacaaggttgggctgcctcatgctgtcaataccatatagtgaccttagtgagactgcgtgttccttcctgctggtgtcctctgtctttcagaggcttcatcctgtgggactcatgcaaaccagaggaagaggaaagaacaagagggcagcacacacctcagctgtgcccacgtcatcgcccatggtccacactcgcgtgaatcacgtttttctctcctcagatctcacacagggctcttcgtttcccccaggcagacactgtctttgaggccttacccatggtgctcagacagatgtggatacatacaaggcacatggctcatttccctaagttgacgatgtttccttctagaacaacagaagaatgcatgtaatgtaaacaagcttcttatttctaccagagttcaagacacagagaggttttttgtcctgtagttaatttctttcggttcacagttatccacaaaacttttagtcagtactaagtcgttcacaaacacagttaccacatatgagccatggaagagtgtagtcactggtatgctggtaaagtatcagcaaccagctcttgagagggcaaaaactctgatttgtagcatttgttcatttccatggtataaatactcccatgagtgccagtttgaagccaccaatgggacatcactgaaggtggaattgggaagagacatgcaggatcacaccgttattatagtatttttaccatgcagaatcaatagttataacctcaagggcataggtatttaataaaatatagtcaaataattaggaagtggtgcattttgagtatttgttacctttgcattgaatataatttatttaattgtaagcctctataacatgacttttaaataatggctatactgaataagtgctcacaaaattcttgagaatttaacagtcagttctcacaagccagcacagcctgcttccagcactccactgggtgtaatataacgaggcaagtctactactaatctcccagcgctgtgtaagctggtgctgcagtttgtcgtgagagaaaaacggatgcatgtgaaataaaggcgtctagcataacgcctggcacacaggtgctcaataaattccgggtgaatccagaatagtctcggatggtaggagaagcaggcattagtttggtgcactgaagcaggtcagagcgttcaccttaataattctgagactgtgtgcgtattgtgtcccgctcggggtggatcaaaccctgcagttagagacccagaaggaaaaagagagagaccaaatgacatcattttacttatgcgcctcgaatggtcctcattaagttgactgcacagactataaagagggattttaagagcctggaaaagttgaaggcagacaatcccttgttcagaggatgaaatgggggtaaaccataacatatgtaccaaataatatagtctttgttttatgtaataatttattttcttctctctccttcctggatgtggaagagacctaacctcgaggtcagttctcagtacccttgaaagctgaagaaagggcaggtctgctccaacggcttctctggcaggcacacggctggagcccgctgcacagtggcagcctcgccagttaaattacgagggctg

SEQ ID NO: 45991 - DNA, 1091 bp, Bovine  19866881622807
  misc_feature (1)..(1): n is a, c, g, or t
ngaggtttgcccaggagagcagatgttgtaactcgacttcatcagcttcacacctttcattgactgtgaccttgaaccaggaaattgagaacagcactgctgagctgtttgcttaataatctgggtttttatgtgtttgcctcttcctcattgcatttggaggagtgaaaggggaaaattatagtcatttcctgaaccatttgcttttttcaggacccttgaaaaatgattatatgccttacttgaaaattaaggggcttggtatacatctgtggtcttttgttttattacttacagtactatcttgagtatcctgataaggaaaaaaaataaccttaatgaatttgaactctgattgaacacacactcacttcctactttcattcacttacataaaattttacaccttttcgcagttcctgtgtgtgctgttttgccacctttttgtgcatttgacacttcggtgggttgcctgcatctgcatgctcatcactttaaatagctgtgtagtattttattctccctatcctctgtcccctgctcggccattatcccatcgtttctagtttttcactcttaaaaatggtgctgctggctgcatctttgtggaagtgtgtgggttttcccttgggaccccaagttcctagaaagtcactttttctctagggagccgtccgggaatggggaggaggcagccacgtggagcctgggcatttctgccggtcagcagagaagggggaggccagtgtgatgttcccagccccagtgtgaatggtcctatggaaaagtccagcgtgcagttcactgctgattcagtcacaggccttcagggccgggcgggactgtgccagtctcctgcccctgctgagctccgagcatgttgagtttttattatttcagggaagaaggaaactcgctgccggtcatcgcagggcgaagtgtagttctgatgcagaggggggtgctttcggatggagacatgaggtaccaccttcactcttttccttcctgttggtcttgttctgtgccttggtgtgtcccaacctggggatgccctctccttaaatcttgaaaccatgaatgaatcatcg

SEQ ID NO: 45992 - DNA, 1009 bp, Bovine  19866881653674
  misc_feature (1)..(1): n is a, c, g, or t
nagcccactgtgacacctgctctggtggcctcacctttcgtcctgggtgagggtagggtccgcagggctgacccaggctgggtctgctgacacgtcctcccgtcttcccttgcagaagccaagcggccagttaacctctgcaaacccagcccatgcatgaacgagggcatctgtgtcctgcgcaacgggagctaccgctgcgagtgccagggtggctgggagggcccccactgcgagaaccgtgagtgtggcatcagctccaatgtaggggctggggtggtgttctcagtcctcctcttccccaggagtgtaccaaaggaggctctagggcatcgaaggaaggagtcagtcattggttcattcatacatgaaacattcagtgggtgcccctacatcccaggtgccatgctgggtgagaggaacagagcaggaaacaagacacggagactctctgccctcctgagggttctagtctaagacacaaccagtaagagcagcatgtagtgtattagatggtgctgagcaccgaagaattgatgcttttgaactgtggcatcagagaaggctcttcagagtcccttggactgcatggagatccacccaggccgtcctaaaggaaatcaatcctgaatattcattggaaggactgatgcttaagctgaagcttcaatcctttggccacctaacttgaagaactgactccttggaaaagaccctgatgctgggagagattgaagacaggaggagaagggaacgacagaggatgagatggttggatggcatcactgactcgatggacatgactttgagtaagctcactgtgttggtgatggacagggaagcctggtgtgctgcagtccatggggtcgcaaagagtcagacacaactgagcgactgaacggaacacactctgatgaaattctggggagactcttgggggaggagcacagtggacacagagtaaccggaacacaggcagaggatgtgggcacaggttcgagtgggtggg

SEQ ID NO: 45993 - DNA, 667 bp, Bovine  19866881935157
  misc_feature (1)..(1): n is a, c, g, or t
nacgcccctaaatgggaaatgacttccttaaggttacagagcaggtctagataggagctcggccttgaaccctcactgcagcccccttgagtagagcagtgcagaggacagcgctatgctggcctgacccccagcacagcgcatccgcagtgccaaggagctcctgcgtaaggcggcttggctcccacgtcctgctttcactaacaacatagtccccagggcagcctttctaagcctctccactctaggccctgctgacctattcctcttgcctccctcgttcccccaaggtcaagtacaaatcagacttgaacctgaccagaggtattggctggacacctcctggctcctacaaagtggaaatggctcggcgggctgcagaattggccaacgcgaggggcctgggtctccaaggggcttacgtaagtagcgggctggcaggcaaggccacgggggaaaggcgaactcaattgtttcttttcaaactttatttttggccaaaggttagctggctctaaagatgcgtgcaatgcagctcaggcaaggtgcctaatttcatgggtctgagatgaccaggcggatgacacctgggttaacttcctgcggggttttctctgaagtcacagccattagttcttcggaggcgagcgtgccggggctacatcaa

SEQ ID NO: 45994 - DNA, 1340 bp, Bovine  19866880450839
  misc_feature (1)..(1): n is a, c, g, or t
ntgcaaactctatttcagatttctaaaattataaattctgaagttttttgagatatgcagccacttgattggtgggtgctaatctgaaaacaaaaaatactgaagcatagctccttaggtaatcacattccatgagatcacatttcattctgaaccctactcctctggagtagctcactttcagacatggatttttcctgttatttcccaaagtagtttcactaaaacccagaggaaaaaatctacctgataaggtctaaaccctggcgaagggcaaggcaacccactccagtattcttgcctggagaatcctcatgaatagggaaggctagtggctacagtccatggggtcacaaagagtcagacattactgaagcaacttaagagggactcttaaagattattttctcagaaacaaactagaagaggacatttgcaacaagaaaaaaacacatggtctgtgcattctagtcttgggctatagggattcatacagtaccttgagatgtgtacacatgtatgtgaaggcacaatttggatcaagctaaaatctgtgaggatttcctgaaagcagggcaaaatagtaaattctttgctctctctgtctcctggatctcgagttatgccaaaagttttccagaacatcaactaatgtttaagtctgttctttcttaaaggttgagatttgtgccatcttggcatggttcaggattatagacaggatacaaaagcacatttttatgtgaaactaacaatgatcaaaaatgcaccaaatcctaaacaataggaataaaaagaaatgtaacatctgcccttggaggttcacagcccagggaaagggcagcaccggaacctgataaatgtagataaaacaaccaaacatggcaagtcctcttggttgatgaactgggctttaaaaataataatatttataaaaaggccaactgaaactagtttttctttaataaattggatatcccacccgaagccaatgtatgccatttaaattcaaataattactattctccagatcttttttttttcactcctctatagaaattgttcagcactctggttttcctgaggtcattttttcatcttaatgtaatgcttggcaattccatttctctctcccctaagattaaccataaagatacagtggctggtgtgtgaaatatatctttggagattaaattagtacttcttgtgaaaacaaactttggaactggtcttgctgctgctgctgctgctgctgcgtcgcttcagtcgtgtccgactctgtgcgaccccatagacagcccaccaggcttcccatcccggggattctccaggcaagaaca

SEQ ID NO: 45995 - DNA, 2006 bp, Bovine  19866880514397
  misc_feature (1)..(1): n is a, c, g, or t
nccagtggtggtgcaggacgccctggacccgcacggctgagaatcctgagtagggtccaggggaggagccttggagtaagtaggtccccctggtgggtttgagagactcgcctactaagatttacaaagagctttacgtcttttaagtctggatgtattgggagttgagagttgattctgagtgatgccttagttaactaagtttactattaggttttaaagacggaattgcttccgtttgctgacccttttgattaccagcaggcctatagcctctggttttctaagtcagatttgtcttgttcccgacatgtatcaggaatatgatcaggctgccagtatattagacgtaggggttatatttgagtaaagttgatgtgttttcagggatatgcattaggtactaggtctcgcctaggttaggttgtgtatgtgtaaattaaaattcgtgaactcttctttgtcagtgttgctttaagtcttttcttttttttaagtcttgtccgatagggtgagatactggaagaagagaagagggtgagaataagcagttttaaaatctgtgatctttactcatattatcacctaagttacaactactgtggttaccaaaaataacccagtcctaaaatcacagtattaaatcatattccataatcagtaatctgaagtgtcccccttcctttgagttccgttgaggtgtgaaattttttttgagataattacatttaggaacattagaaagctgaactgttagtgtgaacttaaagatttgaaactgagggctaacagaaaacccaacttctgtggcctgtcgtaactgcttgtccaagcagaagtaaattgcttaaaaaaaaaaaaaaaaaaactcaagcactaggaggtttgaaactgcagtgcatacttttacattcctgagaggatcagtgaagatagcaaactttcaaaatgcctcccttgttttgatttcaaagaaaatataagctcctatgtgtcttactgatttgataaaaggatttattattttgtttgctgcagtgaagcctcggactctgtttattagcttgactgtattcaggagtagttaaaggagttattttggacagtaaccgtggttttgcttaaattgatcaaggaagtcttgatttgaaaacagtagctctgtactttgcactggaaaaaaattgctttgtttcctttaccttatctttgacagatgagatatttcactttagaatctgctctcttttataaagttgacagcctgtgagttgttaggtacagagaatgaaatatagtacattttctttttttatagtgtctgattattgacaattttaaaaagctagatttacacacacacacacacacacacacacacacacagtaggaacgggcaaattgttcaaaaatataaaatgaaaagtgttccccatccagtcttcccaacctcaagagttaactattattgatagttcatttcttgttcttctggagattgcctttatttcttattttaaagttttatacttccgttgtgtgatttatcagctttagatggtatgtagcgattccttcctctgaaagatgataaactgggtacaccctaccctctgcttccttgctcccctgtgcctctcatactttacttgttaaactacttgtttttagttcaccggtttacttttctgactcttgatgttaaatttaggtagttttcaatgattccaactatgaaacatgaaaatagtgcttcttccttttttctcctgtttttattagtttgacaactgcaaataggcctcgtgcttaattgctcagttgtattggactctttggatagtccaaagagcccatggatagtagcctaccagactcctctgtccatggaattttccaggcaagactactgtttgccatttccctctccaggggatctttcctacccagggatcgaaccagagacttctgccttgacaggctgatgttttaccactgataccata

SEQ ID NO: 45996 - DNA, 1881 bp, Bovine  19866880518681
  misc_feature (1)..(1): n is a, c, g, or t
ncaaagcttatttcaaatgtaaaaggaatagaaggaactatataaatgtaagattgagattctccatcactgtgcttgaggagataaatgtgtacagcagcagataaaagtctaggttttttaaataaaaagtttataatctaaggtgtatctttattgaaaatatgaacattgattttgaggggtgcagctactatgaaagcctctaagttcaaaaaaaggttcattttaaaaaatcaaagttgtacaccacactcttggagagttggtttacctcttgaagggaagtaaggaaaatttttaaactttcattttttccactttagggcaaaaaggaaataacatatttccaggaaaaaacatagaaacatacaaaaaaagttaattcaaatattcaacctatttgaattcattccctggattagcaaaaaaaaaaacctagaaaagcatctgctgtatagatgttgaatgaaggaacaaatgtgctaatacccactcacctgggatgtaaaaatgaatgtgtctgagagacatgatcaccttcctgttttataactggataccatgactgcaattccattcctggtggtgtatctatctgtagaaaatgtagaagtggaaaagtttattgaaggaagatatgatggttaatcttaggtgtgtattcaacagagccgtaggctgcctctggagaacactgactagtaaagaattatgtaattcaagaatcatctttgaatagggcagtctttctttaaaataccaggtctagtcacttaaaactcaaagagacattaactacctcatcacaagaacagcttcagcatgtatattaacatggactaccagaaatgatttcatcaaatatcatacttatggaatctgtgttaaaaatccattttaaataacagtactctgcaaatgtacagtatttcttagcatactacattagataacatcctacagcaatactttgccgaatttcgaaaccactttgtctgctaacacttatcagtaaaccacattttatcataaataggaaaagctctttttagccttgtacttgtaaataaaggaaaaggagagggtaactggctttcctcaaagttcatgataagaactttatatcctgctgaattctaacaaatagcttattaagttaggtacaattatctccgctttacagatcagaaaactgaggctcagaaactgagaaaaaacaaataacctgtggttactaacttcctcatttggtttgttttacacgtctcccctccccctacatacacatattgggagatcaacattttgttaagaattattgggcaaagaatttaaaagactaacaaggccataagattatagggaaaagaataatattttgaaaggatttaagaggtgagtattcagtgagggcctctagactctatatacagagtagaatttgttttaaaacttcacaatcctggtcaagtgttctaaagaagttcaggatctggggcaaaatcaactgcttatttataaaatacaacaatcatttgtttacataatttctcagcctatagcttagttctaccataaattagaaggggaactgactaatggcaacagaaatactaaatgatagatgccaggtgccagctgacagcctaaagagagagaagaattacaagacacaaacacaaaaactgattcaaaaagcaagacaatcagagggctttctcatacacaggctaggaaaaataatatatctcaactgttccctatccttattccaacagagtgtctaatgtttaaagaagtcttgagtcaatatgacatagttatagtcaatatttatactcataagtagtataccatatatatacatattcatacata

SEQ ID NO: 45997 - DNA, 977 bp, Bovine  19866880658120
  misc_feature (1)..(1): n is a, c, g, or t
natgtaatctttttaaaaagtaatttggcaatatatatcaagagctttaaaaactttaaaccctttgacctaattcctcttctaggaatctatctaaaggtaatactcaggaactcagaccaagatggtcactatcacagtgggaagcagtgcagtgcagtgcaaagagcacaggccttagtcagacttgggtttgaatcctggctctgtcaactcacagctgcataaccttgcttaacctctctgagcctcggtttcctcgcctgtaaaatgaggtttgtaagactgctgttgagaattagagacaatacgtgtcagcaaaggagaaaatggcaagtactgtttttataactgtataattcaaatgtcctgtaactggatgattagataaaatcagataatctgatcatggaacactgtgtagttattaaaaaatgggactatcaaagcactttaaaaaatatttcagtctacagaaatacttactcatcatcaggagtgagctggacaggttcattagtaaactgagaatcaaagttgtccaaaccaaattccccagaaatatttggtttaaacggaggtaccacctgcttttgctccatctagaagagacataatgggtgacagctcaagcccacattcttagaaaaattccacctctgtgcttctcctctgtccttaggtatttcccagtcttattaaagtgagtccctgggcctggttctacaatattcatatgaaggaaataatgacaaatctgaacactgatgcaggccccaatactactacaacctgctccattaaattaatattctaagctttcacagttttaaatgctttttaaaaagcacttagaattttgttgttttttgtcatttaaagtgattttaaaacaacaaaattctgtaaagcaattatccttcaattaaaaaataaatttttaaaaaggcactttagagagggttttaagttatgta

SEQ ID NO: 45998 - DNA, 1308 bp, Bovine  19866880658704
  misc_feature (1)..(1): n is a, c, g, or t
ntcattaaaacacggtctaagacttaggaagaaacaccaataaattcaccaaacacgaagagagctaacaacgaagtggtggggtgggcgagatctgaagacctgactcttcctgagtgggtgccgctcccactcaaacgttcttctctgaccttgagccccacctttcccattgcagctttctggaaaacatctaagccctttcttggcaaaggttcccacaaaccagtctcaggaaatacctgatgaaacacttggcccccaaagagttcttatctcttaaagatacatactgaaatatttatagatgaaatgttaccaggttgggggtttgcttctgaacagaggtgtaggaggaggtgggtgggtagggatgaaacaagtgtggccgtgagttaatcattgttgaaggtgggtgatgggaacatgggggttcatgatactcttctatttttttttcatgtttaaaattttccataataagaaaagttaagaggagaaaaggcccacaatttaccttatgtcattgaaacaaacaacttttggatatattttactgtctaaataattgcctagatttaaaaaataaataaacacaggcaaatgaatatttgacaaacattttgtacagcgtctgaagtcacagaagggaagagaaagtactagacatctcgcctgctgcttgtaacagttaacaatcctgtcccccagggaagaaacacatcaaactctggaacattattccagtaattgaattcaaagggctaaagatatcatctgggaaaagatagtttaacttgattaagagataattgcagttctttatgacggagttgatgaactggcttgacctgtatcagaattttttatacattaatttccaagcaacatattagcattgtaatccctccgaatcatgaaactgtacaagtctgagaaaaacaactgtgatttggatagaactgtctttggaacatctccacctgccttttcagcacttctgtgaggcagtatcatatactggaaagtccacaggctctggagccaaaaaagttgacttagcttccatcccacacctgctgtgactttgggcaagttatacaagctcctgggacctcagtttcctcatctataaaatgggcctaataacctctacttaggatgggtgctgtgaggattatggataatgtgtgtaaaacacctctctcatcacagatactcagttaatggaggcttattgtatttgtacctgcagattcctctttagcccactccacatctcccaatatagtgcctaacacatagaat

SEQ ID NO: 45999 - DNA, 1401 bp, Bovine  19866880710448
  misc_feature (1)..(1): n is a, c, g, or t
ngaactgtggtgttggagaagactcctgagtagtcccttggactgcaagtgagatccaaccagtccattctgaaggagatcagccctgggatttctttggaaggaatgatgctaaagctgaaactccagtactttggccacctcatgcgaagagttgactcattggaaaagactctgatgctgggagggattgggggcaagaggaggaggggacgacagaggatgagatggctggatggcatcaatgactcgatggacgtgagtctgagtgaactccaggagttggtgatggacggggaggcctggcgtgctgcaattcatggggtcgcaaagagttggacacgactaagtgactgaactgaactgaaccctttaaatattttttttttcaattatacctcaataagctgagataaaaaaggcatgagggcaaacctctcagaggatttaatgtcacacttccaaacttgattaaacaaagccacctggaaactctctttctctcagaggctgttattctttaactccctcaaaagcaaggctttgtggtgctaaatgcagaatgacatttatccaactgagtagcaccagccctgagggtcaaaggctttcttggaaaagccagtgtttaccccaaccactggagactggatgtggtttgtggcaccttttggagttctagattgttgagtgctcttcatccctcatcccttcagggacagtctggtcaatcacgacacagacttcagacgggtccctccctcaccaccgcctaacagctcaatcttccaaagagcctcagtgctttcattctctgcccacaaagacatcaaaaactaggagactcagatacctcctggatgcaggagacgcagcacgcatcacttagtttgtggaagtggagagctggagatggagccgcgatgaggaccatccaccatggatggggaagccagggctgggcttctggagaaagtaacccggagccgagtctggagctgacagtcaagtgtgtggatgtggtcagcatcgcaggagggtcaggcaggacacacctgcagcccccgaaagaagacattcatggaaagccttgtgtgttgtgatgggagcttgaacttcatcctgcaggcagtcaagcagcaggagagggttttaactaaggcagtaatgtggacaactgttagtaatagctaacatttcttgaatgaatgttttttatatgccaggcattgtcttaagtactttgcatgtgatggagtcacttaacccttaaaacagcccttaggacacctaccactattatccccatttcccagctgaggaagttgaggcatggagtgcctccacagtcacaaagctcctaagtatggagctgcgattggaacctaggaagtttggttc

SEQ ID NO: 46000 - DNA, 626 bp, Bovine  19866880716143
  misc_feature (1)..(1): n is a, c, g, or t
ngctcgtggtaaagaatctgcctgccatgcaggagatgcaggttccatacctgggtcaggaagacccccctggaggagggcatggcaacccactccagtattcttgcctgaataatcccatggacagaggagcctggctgcagtctatgggatttcaaaaaagttggacatgacttagcaactaaatagaaaacaacagcaacacccctctgaatcagatattctttttattccaattttacagataaggcaacagacacagtaaggtagtcagagaataaaacctacacatgtagtgatcaaaattgttcagagtagaggctctgagtaggaaggaaaggacaggactgggaaggtacacaagatgtttagacagtgtttgtaatgtctgttgttttctgctggaatgccttaaatatcttatagtagaaatataaagatgaaaaccctgtaaaagttaattataataatgctgtaaattttatctttctagttattttggaaaaacaaattcgcataccgcgttctttatctgtaaaagctgcaagtgtcctgaagagcttcctcaacaaggtataaattgtatataaaatcgttagtgatttatctctatacaaatggcactg

SEQ ID NO: 46001 - DNA, 1769 bp, Bovine  19866880752142
  misc_feature (1)..(1): n is a, c, g, or t
ngtccagtggttaggatgcctgcactttcaatgccaaggacccaagttcaatctctggttggggaactaagatctcacaagaggtaagaagaaaggtgtggtcaaaacaaatttttttaattaaaaaaaaaaaaaaatctgaactgtatatacaattatagtcctgatcatatgaaaatatatattaaaatacattttgtggtattactatttgctctgtacattttccaaattttcagtgaaaaaacaatacatattacatagaacagttacacacatttagtcttcacaataaccctaagagcaaagtatcatctccatttgctgtatgagcaaatgaatttcaaaaaggttgagtggcctgacaaaggttacacattcagtatatggcagagccaggatccaatctctgagaccagggagaaaagactgtttctccactcactgtatcagaggttcttagatccaagtttggttcttagatcctacacacagtaaactgcaaacaagggcaactggctacagtcaactatcactgtgccatcataatgccctacctgtgaatttgaaaaatcagatgcttcaatgggcttcaaaatacataattttgttttctcgtgtctttttttggggctttgattttggccacttgtcttggtatatttcctaaggaaaaatgttcatttctagacacaacatgtaatgtagctagcagagctataatgtataactagtctcaaatcaaattacttttagtgataggatacagcatctcaattctgatgtgtacattttgaagcatttttaaaatctgattgaagcctgagatttaaaaaataatgagaaaatctatttgctaattaaaaaccatcaactggataacttcagatgtataagatcattgggaagttactattttctgtatccaagttaaagttctcaagtatcacattatacaagaaacacctttataaaagaaaataatacagttctggtgtcatttcgatccccttaaaggggaaaaagtgaaagcttccttcagagtgaacatttaattgccttctctaaaaattataaaactaatatccttataccctgaaactgtttgcttccatcttatacatctaaatagctagcataaaattctagaactatagatatatatggaaatatataaaggatagacaaaaagaaattgtctttttttttttttttttttatcccatggtctgtggtcctccaggctcctctgtccatgggatttcccaggcaagaatactggagtggactgccatttccctctccagggagattaataacttttgaagtaagttttttattagagaaaatacattagagaccaatagatcatacattttaaaattatgctacgtgaataattttgaaaatgcaaatttgcttgctacttacaggaaatggctccaatccctcctgaatcacaaaaccttcaataacatgggtcaagatctgtggcttaacaatagcctgtggaggtttgttttcaacactaggtacactactgggcatagatgtactattacttcttgtggtagcagcttggaagtaagagcggaggtggaggaacagaaacatgtgaaggatctgaaggagatttaattactgaagcactgactgatgccactgcaggtaattctacttgctctggggaaaaaaaaaaaaaaagtcactttttaaatctgtaccattctgcccaggcaaatatgaaagaaaactggagaacattaata

SEQ ID NO: 46002 - DNA, 1961 bp, Bovine  19866880754427
  misc_feature (1)..(1): n is a, c, g, or t
ntactttatgaagctctctctctatatagatataaatatatgtcctcctctctggttttcttttctgttctattttgtttttaacaaatcataatataatggaccctcttctactttttaaagagaataaatttaatggtgtatcttgggagtggttccatataggacatactaatccacatcattctctgtaacttctttcgttgcgtttattttaaatgtgttgtcctgcctgcttcctccctgattaacccacacactttcatatgatagccacatggagcatgaataggaaatataattctaaagaggttcattcttgctgctgtttcctgatatgaatatttgagtgaaggatttaatcaggcactaaagccacaggcaataaacagaagggtatggtttttaggcagttcgaataagcaggaatagtcacagcaagacatttttcagatagacctcgtgtgtttctagtcagtactgtaactacagctacccaccagcaatcacatttatatttggtgtttctctgactttataatacaattaatattgcaccaagaaataataatttttttaaagaattgtgcataaattcactatgctagaaaaccaaggtgttcctccttgttccctgcagtacttgttcatttgtgtaatagttttaattactaatcagagcaattatgtattctgcttttgtctcttacagtgaatcataaacattgccatttgttactgtagtgctatttgtttacataataattttgcatggttggataataatctatccggttgatgtattgtttcctctaattaaaaaacggacaactgtattatctgagctataattaaataaagcttacaagaagtcaatctgacacatattaatgatatatatacatgttatgaacggcagtgtaattgactataaaatggagagcagctcacataaatcataatacatcatattctataccctatgaaatcagaatgttttaggggaggagtgatggaaaaggaaactattgagatgccctcctaaaaaggaactgacatttctattcctttaagagttagtttcaggaaatgaggctgcatttttttccccttttctgcatctggatctctgcttgcacagagatggagggagaaaaaattgtgtgcctcaaatcagattagattaattagattgatttcctaacaactagctggcaagtgtgaatcactaatggtcttctttaattcattaacttatccaataaatatttattgagcatctatcatatgctgggtgtgaaatacatagggaagaagataacctctgctcccttactgtttacagtctagataaggtgtagaaccataactaactaaataataaaataattgcaagtttcaataaacgctaagaaagaaacagggcacaatcacagatagaaatgaaggtgggcatcctttagacaagtgatcagagaaggtctatctaagttgtataaacactgaaacttggagaagaaagcgtcagctatacaaagagtaggggaaaggaggaacagtggggcagaggctctaaggtgtggtcaaagctgccagatcgacatggccagtgggagtgcagtgcgtcaggcaaaaggaagtgtgggcctgggtgaggtggagaggcacgtaagggtccccgggcgcacagtccaggacaccatggtatgaaactggatttcattataaacacatgggaagctagatgaaacttaagcaggttcacagaataatacaaaccatagttcaaaaataacttttgacccctgcatggaaaatagactggggggtgggaaagagtggtagtcaagagagtaattaagagatggctggtgtcgcccccatgagaggtgaccgtggctggcacctgagtggcgacagcgatggtgggcactgatggtgggtgtccatcagacacaagg

SEQ ID NO: 46003 - DNA, 1425 bp, Bovine  19866880775655
  misc_feature (1)..(1): n is a, c, g, or t
ntagtcaactctttgtgatgtacaaaaaggacgtggtttagaccacagaatatgggaagcccagtttctgaaatatttttaaaagttgaaatgtaagctaacttctgaaaacagatctgtgatacagcataaaaagcaacaacacttaaactgctcaagactatggatccataatttctttaaacatccactgtagttttattctagaaagagacgatcaaagaatgacttctaaagttcttccaggatctcaataaattagagtgtaaaaactttgggagttactatgtcaaattcctaaggaagacaaaaatcaaacttgttttttaagaaaacacactgtaaaggaaagtacaaaggaatgacaacaaggtaatgaaatgagtcattacactgaagggagatgtgtgtttgtttcaagttttaaagagttccttaggtttggtctcctaaggctcccaaaaatgttatatgaaatactgcctaatgtattacaattatattaatcatattaagtggattctacatgacataaaaaatttgaggggcaggatggcagaatgaaaagaacaggtttgggatgaaaatatctggagatacaacccaggtctacagtgtaccagttacgtgacggctgagtttcagcctctccttctatacccctgcccacctctgaggcttgttgacctttaacacattaaagtgtatggtaactacgtaaacagtttcacggttaacccttaaacaaaagaaagaacatttaagacatcttacttctggaaattattatttgaatacattacaaaactgcaagaagatgacttaggttctgctgggcactcgattcttaaattgtatgctaaaattttgctgtgcaacactgatatgatcacagtttaatatccaggaaggcatacgcaaataagaaatttcccaagattataggaagagtaagaaatgactactccttaccatgaatcaacagttcagaatccttgtttagctcataaagcctaaaggcttcttctaactccaactgagatgatactgtacacgggtctcctaaaaaatataaaaaggaaaagtaaagctcatattttaaatcctctaaatgtgattagtaaataatttctactatataaaatcttgaggagaaacaattacatacacacagagaaatatttaacaaggacaactgtttagatatttatttagataattctattctctgaagcaggtaatgtaacttccactctaatttctacaaaatattaaatgaggctcatagatacaaactttatatatatataaccatttaattcttaacaatatttatattcaaaatatagcaaatcgaatctaccctaatcacattttagattgtcactgcaatatgattaatggccagggataatttacttgttt

SEQ ID NO: 46004 - DNA, 1121 bp, Bovine  19866880793759
  misc_feature (1)..(1): n is a, c, g, or t
ncattataactcactaataaattcaatctttaagttttttaaagatgttttaaaaagaaagaccactgaatccattgacaagaaaagagttacaaagaaccagctaaaaagtatctttattttcttgtaaaaatctcataaataatgggaaactgaattcccagctctggattggagtgagatgggtttctgcatacaacctccggatctgcttcgttctcttcttgctttccttattcctttgatacttgtccaggacacctggacagaagtagcatagccagcactaactaggagatttttgtggttccaccacatgactcaacatcccaaacatagtaaggattcctaaaagaccactggggaagcaattagcagatgggctccagtctaacactatggaaacagaattgaaagtcaaatatgtgctaaaacacaatgcttggagcatgtattgtacatttaaagaacatgggtagcaaccatgattcagtggtaattgagtatggtttctatggcaatatgattcatttccagtagaattcgtcaacctaaaatagtaggtttcccctcattaagagaaacaaataaaaagggcatcaatatttgtttttccattattcaaagattacaatgtttgcttatggcaaagagacgataagtcacatcacagaaccaacatgaaataaggccaccattgtttttctggaactaaatggatgctcattgctcttggggagctgcaacgaaggacaccaggggcttggatgtgtcaagtcaaggctgcaggttgctgcagtgcctgcaagtgtcctggaatacccgtgagttcacactggctttccttacgtgcaaacagaatttcaagagatagaaggattttctccaggaaggagcattcagccttgaacacagcaagggaggtgtagaactggaagaaaacaataggaatgaaagctaacgcttcccgtcttcctccctgtcagacaccactccaggcgcctcctacaaaccatctcagtgtcttttcccagcaaccccacggggtaggtactactactatccctgaattccaggtgtgaaggccaatgcacaagccattcagcgtcttgcccaggggt

SEQ ID NO: 46005 - DNA, 1341 bp, Bovine  19866880795909
  misc_feature (1)..(1): n is a, c, g, or t
ntcaaaagcatcaattcttcagtgctcagcttttttcacagtccaactctcacatccatacatgaccactggaaaaactatagccttgactagacggacctttgttggcaaagtaatgtctctgcttttcaatatactatctaggttaataatcctcaaatcaatatttatgcatttgttgacattttttcttacattctctaatgatctgtttcttatttaagtattaatcataaaaaatacttagcacaacaaaaaagctttaaaattccctattgtgataagcactaggatcaacaaacatggctggatatataaacaagccatcagtaaagatgacttgtgtgtacttctgaaaagctggcattgatcaatgttaacttgttagtggactttggtcatggcatgttcactccagctgccatagtatttgtgatggaaactcacccagaagcaaatgtagcagcatcaatttcagctgattagattgttgccttaaatatgcaccagcaagagctggagagcaatgtattcagacttaagcaatgggaagtcaagagatgcatgatctgtgtcatatggcaaaactgatgtgattgttgaggtagagaagacatactgtgacccttaccatgacaccaggctttagaggagaatgcatcatggctttctctgaaagcagaaaaatgaagccttaattatagttactgtagtgagtaactaaatgtgaaaatatcactcagttcagttcagtcactcagtcgtgtctgactctttgcgaccctatgaactgcagcacaccaggcctccctgtctaccatcaccaatgcctggagtccacccaaacccatgtccattgagtaggtgataccatccaaccatctcatcctctgtcgtccccttttcctcctgccttcaaactttcctagcatcagggtcttttccaatgagtcagctcttcccatcaggtggccaaagtattggagtttcagcttcaaatcagtccttccaatgaacacccaggactgatctcctttaggatggactggttggatctccttgcagtccaagggattctcaagagtcttctccaacaccaacagttcaaaagcatcaattcttcagcgctcagatctctttatagtccaactctcacatccatacatgaccactggaaaaaccatagccttgaccagacagaccgttgttgacaaagtaatgtctctgctttttaatatgctgtctaggttggtcataacttacttctggaaagttaagtttccagaagtaagcatcttttaatttcatggctgcaatcaccatctgcggtgattttggagc

SEQ ID NO: 46006 - DNA, 1361 bp, Bovine  19866880799201
  misc_feature (1)..(1): n is a, c, g, or t
naaaatactcctagctgaacccaaacctaagtgtttcactattccttcagagccctacctactccttatatttccccaccttcctattaagttgttattgttgttcagtcactaagtcgtgtgcgactctttgcaaccccatggactgtagcccaccaggcgcctctgtccatggggttttccaggcaagaatactggagtgggttgccatttccttctccagtctataaagtacacagccacaactctatatagaaacacctagttctttaatttttcctttttaccaagttgcataaagagttacagaattaaaagtttagagctatttcacttaatagaaaacaaaacatttaccactattccttctaaagtcatggatatgtgcagaaaccacaaataaaaatgggttctttaatatctataacctataaattataccatatatcaaaagtaataacgtgataaaaatcactgcagatggtgattgcagccatgaaattaaaagacgcttactccttggaaggaaagttatgaccaacctagatagcatatttaaaagcagagacattactttgtcaacaaaggtccgtctagtcaaggttatggtttttccagtggtcatgtatggatgtgagagttggactataaagaaagctgagcatcgaagaattgatgcttttgaactgtggtgttggagaatactcttgagagtcccttggactgcaaggagatccgaccagtctatcctaagggaaatcggtcctgggcgttcattggaaggactgatgttgaagctgaaactcccaatattttggccatctgatgcaaagacctgactcatttgaaaagaccctgatgttgggaaagattgaaggcaggaggagaaggggacgacagaggatgagatggttggatggcatcactgactcaatggacatgagtttaggtaaactccgggagttggtgatgaacagggaagcctggcgtgctgcggttcatggggtcccaaagagttggacacaactgagcgactgaactgaacctgataacgtaagcttgcattttcaaattccatcagactgaagagttgtctgactctttcagctcatctcattaatgttaagcagtggattagatattcaaaagaaagtcccatagcagtccctaaggattcatgataaagcatttagaggtaaagtgtcatgtcaactacttactctaaaatgatacagcaaaaaaataaaaataagtgtttgttgtgtatatacatgtatgtatatgtgtgcacagatacagagataaagcaaacatagaaaatgttaataactggtgaatctaggtaaaggatatatgggtat

SEQ ID NO: 46007 - DNA, 2258 bp, Bovine  19866880836468
  misc_feature (1)..(1): n is a, c, g, or t
nccaaagcaagaacacagtacaggaagactaataatctataatggcaaaagagatatctgttaagcaaacagaatgggcaatttgaaatgaagggaagtaaggccattttgaaaggccattttgttcagtttaagaaaattcttaagtttaatcttgctggaactagagaatgttaagaaaacactgaatgagagagtaaaaaagaaaacttgctgttcagttgctaagtcgtgtctgactatttgtgaccccattgattgtagcgcttcaggcttccctgtccttcactatctcccggagtttgctcaaactcatatccattgagtcagtgatgccatccaaccatctcatcctctgccgccccttttctcctcctgccctcgatccttcccagcatcagggtcttttctgatgactcttcacatcagggtggtccaagtactggagcttcagctgaagtcaacccacaaaaaggagggggaagagatggcattcttcctaaagcactttccctagaaaggaagagttgaagtgggaggtgcagaggcgtttgctgggcggtgagaagtgagaatgtgtttccttcccctcaatcaaagactttaccgtgtcccaggcttgagagtaagagacatcgcacacataaataagcagatggctctttcttcagttctgaatcatccaatttgtccccagttttcagaagtcacttggcaaaaggcatcatcatgaagccattaactaatgattgcaaattcaccaagcctagaagcctaatttatacacaggaaactatttggacttttaaagtaattttctcctgttaagaaaaggggcatcaagcctttcttggcataaaaacaaaacaaacacagactcaaaaaatcaagggggaagcactggcattagaaaatgaaggaaatttgccagactaatctcgcagcttagcttgtttgcaaggccagtttctagtcaaaaagtaggataataagagttgtaaacagaatgttaaaatgtgatttatgactggactgtgtcatatcactcaaggtgatccattttaacttagctttaaatatcaaagcaaagttctcagtgttggctttttttgtttgttttttaatgaactataaggaggtccttattggaatttatttgctgctcagctgcttgcagttttttggagaagtgtttcattacaagctctatggctataagattagtaaaactcatctctcctggaccttgaatgctgagctaaggggattaagctttaagccacaagcgctgggagccaccaaaggttttagtatggtgaaagttatgaccagaagagtaagagaaggttctggcaacagtgagtgggatagctgagggagacagagagaggaggggaacagaaaagtcaagtcaggagattgtcaaaaacattcaaaagaaagagcatttcatagctgcagaatcaggggccattgttatttcttggctggtgttaaatcatgttgcctggatctggagatgagcacagctcccaggactagggctcaagagcgccctctccttgacttcacacctgacccacgccctccctctcctttctgtcagctgactggaacccctctccactcatggtgaaagggttggtggggatgggctggagtgcagagagaggtaaaccagaggagctttgcctgcctggaaccaagacggtgccaagaaggcaccacagggaagcaaagcaggggtggtggtttcaggccagcctctctagcagtgtgtgcctcacctcgcacaggttactttgcttttctgggcctgagatgccccaaccttcgaacagaaaggctactgtggatgcttgccatggttctttccagcttgagaatttataaaatcagcagtgcgttattaatttaaagatgcatttcatggaccacattcaattcagttcaattccagggcggacactgtgcaaaatgccaaagggtttgatttcctccttttattccccaccactccatttcttgtatttttccattatttctcagatacagtatttttcccccgttccttttttttttttttttcctccattttccagtggtagcagggagggggctgtttccataagacaagacactgggatcatctgtttattgacaggacaagggactagcccgccagctcttttgcacatcattctgctgatgtccccgtagtcctgtaccagcaggaagaggaagtgaactcaacctcc

SEQ ID NO: 46008 - DNA, 1703 bp, Bovine  19866880866180
  misc_feature (1)..(1): n is a, c, g, or t
nggtgattctgttgtataaccaggtttacaatgatctagaacagtggttctcaaagtaagatcccagacctgccacatcagtattacgtggaaactagtgaaaaatgcaatttcacaccccagcccagacctacagatagaatcagaatctctgagggcaatatagattttaacaagtccaccaggtaattctgatgtgtgctcaaatatgagatccactgatctagagagaagaataagacaataattagcaggtaggcagataatttaattacaaaactccctgttttttgctatataaaatatatccatcccacaaccacaaattggcttataaaatctttaacgatcttatagaataaatttcccatctctaaacatctgagtctccaaaatgtcagatttttcttcttcatctctctattcataatataagtttcccaaggagaacagtagagagatttctaaatggagcttattatgaaacatcctctactctttaaaaagatttacatggttgggctgagtcataacttgataatcttctcaaacacattttttacccaaatttctctaaatgaatcttaattacagcatttttgtaacaatatttagctaagcttttgtccttcggaagagcccaactcatagcgagaaacgaagcagttcttaatagatacccagcacttgtttcttttccttctgacaagagaaataacacacatagcaaaagtttcataattcccaacaaaatgaacacaaagccagccttcatttaccctttctcttaaatgatgcagttttgtaaaagaatacctcaaggagttgggcagagtcccagaaaccagcagagaccagtaagaacactgtatgatggtattctccaggcatgcgtcaggtcaacttgtccctgtgggcctttattgtaaattaatcatcgttagaccagctcacgggtacccttaccctgcatgccaagttgctccagtcgtgtctgactctttgtgaccccatggaccataaaccttactctaggtgttgtcaagatttcatttggaattttttcagtccctctgaggaaaaccaggtggctctagtagtaaagaacctgctggccaatacaggagactaaagaaatgcaggttgcatccctgggttgggaagctcccctcgaggagggcccagcaaccctccagtattcttgcctagagaatcccacagaggatcctggcaggctacagtccgtcaggttgcagagagttggccacaactgaagcaacttagcacacacacagctgtagagaacaaacgggacgtgtgatttgggcaacggacctcataaatcctggactaaaccatcaacatcccaaagagaagacacacttcacggttttcgcctgagctctcatctgaaaccctactggaaactgactcaaagcagccactgtgatgaagggaagagaagggagagaagggggccatgaattcgacctgagagggcaccaagataaacaaattcctgatgatatgtcccataaatcagttcgaaattctccttgtaggaagtgagaaaacaattggcagcttcaacatcaaaattatgctcagaagagcaagaaaaatcacagaggccaggatgaggatggcaacaaagccaagctattccaagagggaaggagggggcaggtaaaccctgaggctgc

SEQ ID NO: 46009 - DNA, 1193 bp, Bovine  19866880871561
  misc_feature (1)..(1): n is a, c, g, or t
nttcaagacaggcttcacttatgggttgacccttcatggaattgggcggcctgaggaagaagaaagccagatgagaagataactgcaaattgtaacaggaaacttggaattaaatctagacaggtgagtgtcagactgccagtctgtccaaggtttgtgtgcctttctccctctctagactgtcagcctctgggggcaagtcattgcattcccagcaccaggagcagtgtaagctgtaaccagaaacatccaaagatatttcatgtttggggtcagactaagaatggggataggaaggccaacaggcaagaatgatgagcagatagggtactttcccagatgacccctggcaaggagggcaaatgggggaaaattactttgttgagtgctaactgtatgccagacattgcagaaggtgagtgcttccaaaatttctgagacttgatttgtcccagattaactatgtttctgatgtttcagtgttttaactccaaagagcaaaataatataaaaataattttccaagtgtgattaaaaaaaaaaaccaaattttgaaatagttatgtttcaaaaactcttttatatttctacatcttgcaaatcaattaaaataatgcagtatgcattgatcttcatttagaaagcctgatccaggaatctagcaagcctaaccatgggattgctgttagtcttctgcaggacttgttcaagacaggcttcatttataagagttgaccccattcattactatgtctatcattactacgcattactttgcatagactaaaaacactggatgtatctgaaagggaaaacaaaatttcaggttatataaaatcgtaaatctctaggcacataagcatgtatacacaaacaatacattctatttagtatttctcataatgaaaaaccagaatttgtaatacttattcgtcttcttaaaactggtgatatatacacaaaaaataaatttccagagggtaaaacatttacatatatatgtgtaagatgttttattctttggaaaagcttgctgatctgtggcaaattccctcatccttgggagctggtataattacatctgcagaatcaaaggagaagatgatgcaacggctcctctgagaaggttgttggtgccatctgtttcctcccgcagagccttcctttccaaactcccctcccagctcgtgcat

SEQ ID NO: 46010 - DNA, 2519 bp, Bovine  19866880918682
  misc_feature (1)..(1): n is a, c, g, or t
nttttttttttttttttgtggaagatagatttggagggtaacactagtgattctagattcaaagccttccacagatgttcactggtaacttggtgtaaaggctgtctctccactcaagcctttttcttcctctgggggatgccgctttattttgctgtgacgcacaccctatttgctgagtgtgacacagctgagaggatcaagctgatgcaggtggatgctgggtcagccttttttttatacaaagggtattagcaagccttgggggttgagctgactccaaacggacaggttgtgtaaaatgtgttagcagtttttctgaattgcccaaatcctttccaagttatgctcaacaacaacaacaaaaaaacagagctcagagtagtgaacaaaaccatacacacttagggtttgtgtacacttctggaagcactggatacatcaatagaaagtcaacattgtgaaaacaaagtgagtggagacctgcctattacctgaaagagatcctatctgtgtgtgtatcctttcttcctgtcgtcactttgtttgcttcaggtatcatgaagtgtaaatacttagcaaggaactggttcctaaaatttctgcactttcttttccaagaagcctgtgttcaagaggagggccttggaagtcatatcgatacattcatccaacttgcctctggatttatcctataattcctactcattctgtcatgcctgattagtaatttggaaaagtacaagggagctattaaatttagtagagggaggaaagggaggcatagtcctcaaagataaacccacatttcttagtagcttctgtggaactgattttaatgcctcctttaagagaaaaaggtcaagtaaattatatctgtgatagctgaaacttgaagcgttagatgaatccctcagcataggccttgcccatatagattcactagcatgaaagttgtaaagatgctttaagtcagttctgttgaggaaatgccacagcacctcccagtttccttgtagtgcatgagaaaatgagaggacaagaaaaatccccttactgttggaaaatgtcatagtgaattcatgatggtccttaagtggaattccttagcttgtgatttagttttctttgtgtgaataaaagaacaatgcaactgttaagtagctttattttctacctcaattctctaaaacaagagcagggagagacaagagaaactcgccactccctgtgatcagggagtgacctaactttgctctccttggtgggaggatggtgggttttgggttctggagagctgattgctaatagccattttaaggaattaccacaaatgtgataccatcttctccttgcatagtgttataaaagggtatatacacgctgaaaagcaaattgcatactactttatcggactagaaatgagagaaaagggtgttggcaatccagtcagtaatcatcttctaatttgtaagcactctcctctcatctccatcacttcatcccatcctgtgaggaggagcagccgtgctggaggattattttcatttttaacagatgagaacgttgaaaatctaaagaagggatggcttgccaggtggcttctttcgtgatatgggggaaggaaatttaatattcgttaagagttcaagtcatcttcacacgtgtttttaattctcacaaagctctttaaattggatattttcaacccattttgcagatgaaattgtagccaagagaggttagtagttcacttgaggtctggcagctgagagccaggattcaaactttgatcggctggatcttagagtttatgctatttccagcctctgtgctggtccaaaggctagcagacagcaaagcttccatctctagaaggttggttgattaggcaagctgtctttttcttagctttctattttgcattggtgcatagcccattagcagtgttgtgatagttccaggtgcgcagcaaagtgactcagcctcaccgatacatatatccattctccgctaaagtcccctcccagccagtctcaggcaagctggttttttgtgccacactggttaaaactgggggcatgtgccaattgaaatgttttatcagtccagcacagagtttggggggaaaaaaaatgaagccgagttaacattgacaattgagagatttcaagtattctgccccaaatctcccgaaggcaagtagtggggcagccttctggaaaaggtagtgtaccccagttgcctctggtctccaccactccttacagtggccccatccttgaggcaggggaccatcacacttgccccgttgttcttaccgtaagaggtcttcctatgtgtgcgagtgtgtctactccactcggagtaaccaaaggcagcttgagggctcttgccgcaagaaaagggaaagagcatattccttggagagagtgaagactcttgtgtttagtctgcagcaattctgtgacagaaaatacaagggatgtcatcactttcctcacatcctgtctgcatta

SEQ ID NO: 46011 - DNA, 3873 bp, Bovine  19866880938531
  misc_feature (1)..(1): n is a, c, g, or t
nctctgctgggttctagttgtggcatgcaggatctcagatctttatcgcagtatgtgggatcttttttggttgcagtatgtgggatctagttcttcgcagtacgggccaccaagacctgggcttgatccttgagttgggaagatcccctggagaagggaatggctacctacctactccagtattcttgcctggagaatccaatggacagaggagcctggtgggctacagtccatgggctcgcaaagagttggacacaacttggtgactttcacttcatgtgtgggatctaatcccctgaccaggggtcaaatctgggccccctgcattgggaacacagagtcttagctactggaacaccagggaagtcctgagagttctttttaaaaaacatccccactaatgtatgaggaaggagtaaataagtgcagcccctaaggaaacaatggatccaggcaatgatcatcagaggttactaaaatcaattactgaaaactgatggggatctttgtaatggagtggctgtaattgctgagtatgagaatgtgtgccagggtcagtgatagggagtggtggggccgtggtaaattctatctgaaatcatttaaattcaatgccagagagagaaagagagaatgagagagtatgaaccaacactagagaccaaacagcataggcctaggctatatccttagcctaagtagtgattcccactgcagacctgaacctatacttgagccatatctcaacttttttccagaggtattaattcaacttttggccatttccacctcttggacagtcagtagagaattctagcatctagtcagaatggattaaacaatactatgcttattgaactgacaaagcaagaattggtaggaaatgccctaccaggaaaaaggcagtcccttggggagtctgtctgtgttgatttaatgataaagaatctgtacaccaagggtgtcagccagaccggaaattccttctggtggagagtcagaagtgccccagttggactgataggctgtggccatattgattggctccaaagggcatccttatacacatacaggcaaagggcatatctaaactttgcagtcaccggagactttcctggcctctgaaagggagtggaaggaagtgggtgaagggcctaagatagtggcacaagacctacctcttctttcctccctgtgatcaattgatttttattcaatttaaagacaattctgagattcttcctaaatactagagaaatgtcaaaagttggtataaattatttattttttaaaaatgggatttttgctctgtttcaggatcttgacaaaaggattattaatgtatttggtgggttttagcagaaagactgatggtatcaacttttgcacagtcaagaacaaacacttcttgagagtatgatataaagacccataccaacccctgtggtaagacagacataagtaagatgcagtttccactctgccaggtcttaaaatatagatgaaaatctgagattgtaaaataacactgtaagacataatgtggtaaatgtaaatgactgtgaaattaggaaaggcagagatggacagataaagcttcacaaaagacccggggattgactctagctttgaagggtggtctgaatttcagtaagcgttaaagggagagaacgctttattcccatctaattcttccatggtatactagatgttgtcagggcatgactgtcttcattccctctgaagaaactgccttgcccaaaggctcttctaggcagtcatgtttcaatgccttcgacccccattccagcagtttaggcaagagatggtctcctgtcacccccagggcagtctaactactacagccgggcttagatagacattctgagcccatgaaagtcttctttttgataatgtaaatgtaggaacataaaagagctcaagttaaacaatgccacgcgtgctcagtcgtgtctgactctgtgaccccatggactgtaacctgctaggctcctttgtccatggaattttccaggcaagaatactgaagtggtttgccattcctgacccagggatggaacttgcttgtctcgggtctcctgcattggcaggcggattctctaccactagcaccacctaggaagcccaagaggatgccatatgtaagtcaaagttacgaaggaaagaggatggtgctctcttggagcatgagagctttctggttccagtaacaggtcttcttataatcctccacctctaagtgacttgaagtaaatgcaatggataactgttccttaacaaaattatctgattaaattctatggacaatactatttcaatggaaatagtaacaaacttttttttctctcttagctctgagactgtcttggtacaaataccttgaaagtcattttagtaattataaggtggacattggccttgcctttgtatgtgagaggatttgacaaatggtgtaagttagtcagaacttctggtttctctctgttttacctccaacttctttcccaccctcctttatttcttgtctcatggatgaaataagagcaatgagagattaggtgggaaataaaatcaaaccaagtgtagagtgaacacacaactgtgtctggatatagcctacaaatttgcttctgagcatcaaagcacctgaagggaaacctggttaataacaacctttttagtatttgcgatagaagcaaaacagttgaagctcaacagaaatttctctcatgagtccttataaagggaataccattcgcaaccagcagatgacaggtggctcttacaaaaatcctgccaaggaggcgatctctccttgtttcaagtatgaagactttgaatggttgatttgatccaaggtgggggaaaaaatctaagggggagaagacataacatgcctaagaagagtgaacggctttccagtgctcaaggaaatctttgttgaatagcattcctcacaactgtattttgataagaattaaagggcagaggacttccctgtagctcaaacagtaaagaatctgactgcaatgaaggagatcagggttcagaccttgggtcgggaagatcctctggagaagggaatggtaatctgctccagtattcttttgtggagaatcccatggacagagaagcctggtgggctacagtccatggggtcacaaagagtcagatgtgactgagcgactaacacatataacatataaagatgcagagagggacttccctggtggtgcatggatagaatctgctcagcaatgcaggggacacgggttcaaccctggtccaggaagatcccacatgcctggagcaactaagcctgtgcaccacaactactaagacccactctagagcttgctagcagcaacgactgagcctgcatgctgcaactactgaagcctgtgagcctagaacctgtgctctagaacctgtgcaacaagaaaagccaccgtaatgagaagcctgtgcactgtgacgaagagtagtccctgctcgctgcaaatagagaaaaccccacgcaaagcaacaaagacctgctgctgctgctaagtcgcttcagtcgtgtccgactctgtgcgaccccatagacggcagcccaccaggctccgccatcccccgccatccctgggattctccaggcaagaacaaagacctagcacggtaaaaaatttaaaaaaaaaattaagaaaaaggggaggtggcagagagactgtatcctttaggatagaaattgtatacagctgacaacagcagatgtgtatttctgacatttttggtgttctgggcagtcaatggtgttagtgtcatagttggcatcactttctggaagcaagggaccaaacttgggagagg

SEQ ID NO: 46012 - DNA, 969 bp, Bovine  19866880959142
  misc_feature (1)..(1): n is a, c, g, or t
ngctgagcactgaagaattgatgcttttgaactgtggtgttgtaaaagattcgagagtcctttagactgcaaggatatcacaccagtcaattgtaaaggaaatcagtcctgaatattcattgtaaggactgatgctgaagctgaaaccccaatactttggccaatactgatgccaagaactgactcattggaaaagaccctgatgctgggaaagactgaagacaggggagaaggggacgacagggaatgagatggttggatggcatcactgtcttgagggacatgagtttgagcaagctccgggaactggtgatggacagggaagcctggcgtgctgcagtccaggggtcgcaaagagatggacacaaccaagagactgaacaacaagtcttggccccgccaaccctccctgggctagggaggaaagtacgtgactaagaaatcagaatcctggctctttctttcccattctgaagctaaatatacttttttaacaaaatcaaggccctacttccctttgaggggccttttggaattgaaagtagttcagaaagacctcttgacctacagtggtctttttttaattttattttcaaattctaagccaaaactggttgacttcaaaggtctctgtacaaaaatcacagcattgttttcctaaggaggccttattgagtgattgatattttgagggttttccagcccagtgatttctttgctaaaaaaaaaaaaaaaagtgtactcactcatcttggcatttgtttgcaaactaaacccatggtttgaactctgtttatcatcccccacctcacccctcgcccttgacactggaattgctaacacacagagaacacagtggtctgttgctagcaaaatgtgctcccctgtgactttgctttttatgcacagattatcatctctgtcattcattataacttcaaaggctacaagagagtatactccctttag

SEQ ID NO: 46013 - DNA, 1749 bp, Bovine  19866880974860
  misc_feature (1)..(1): n is a, c, g, or t
ntagtcatgtatgtatgtgagagttggactataaagaaagctgagtgctgaagaattgatgcttttcaactgtggtgttggagatgactcttgagagtcccttggacagcaaggagatacacccagtccatcctaaagaaaagcagtcctgaatattcactggaaggacggatgctaaagctgaagctccaataatttgttcacctgatgtgaagaagtgactcattggaaaagaccctaatgctgggaaagattgaaggcaggagaagaaggggatgaacagaggatgaaatggttggatggcatcaccaacttgatggacatgagtttgagcaagctccgggagttggtatgaacagggaagcctggtgtgctgcagtccatggggtcactgagttggacacaactgagcaactgaactgaacattatttgtaaaacacagatgctatttcccaaatgagtgaaagcacgaatggcaattactgataatgattagataccagaaaattaactatgggaactaggttagttgggaagagagagaataagtttgcaaagagaatgtctgttagccccaatttgcacatagatgcaaattgcaaatgcatgttagccccaatttgtagaactagaaagcagttatgattgaagaaagactaaacagatcaaaagtagaccatctggaggttctactgtgatgggaaggccatgaaatttaactcaaatggttcaaatggaatgatttcgatgaagggactctaggggtcaaggctgagaggaagtgaggaagaagtaccctggcctgttctcttctccccttctgatctcctgattgatatctcccattggctaaccctaacaggaagccaccagcagggggtcttctggagcacagaccagagcaggaggagtagagaggtgatctgagggagtgtgggcaaatggaagaaaagcagcacacctgccaggatggaacagactctggcctagaagatagagattaaataaacagattatttaagaaaagataataccttaacaaattgggtcaccctttttacatgagttaatttcattgagtttttttttttgtgtgtgtgtgtgtccttcaagcaaataatccctggttggtaaatacaataaagccatgaaatgaaaccgcatgggtgtgtctctacccccaaaccgctaaatctgctctctacttcactctacccagatttcagatcgagcctctggtatttataattaggatacacttccatgcttgaaagaatgtgtttagtacccaggggtgagcatctgtgaattaaattagtgggtgaagcgtgtgtgtgtgtatacatgtttctgccttcatcagtatttatcctaactttgctttaatgtcttacataaataaaaaccagtattgacttttcactttgatgacatcactggaaattattttccaaggtcaacctggtaaagctgcccagccagacgatgcaggtcagtctttccctctacagagctttgtggggcagcagtacctgcctcagttgctggaggactgttgcttaattcgttgacaaaagaatgtcattgccagcctgccactcaacttcagggatccctaaaagctgggatccctgtgccttgctgatatttgagaggcattaggatgaggtggctctccacattctaccttagatatgcccacgagataattaggcacctttgtgtaattcactctcaaggtaacaaga

SEQ ID NO: 46014 - DNA, 1148 bp, Bovine  19866880982049
  misc_feature (1)..(1): n is a, c, g, or t
ntctgttctttacatctgtgtctcttttgctgtctcgcatatagggtcatcgttaccatcttgctaaattccacatgtgtgcgttattatactgtattggtgtttttctttctgacttacttcactctgtataataggttccagtttcatccacctcattaggactgattcaaatgcattctttttaatagctgagtaatattctattgtgtatatgaacacaatagctttcttatccattcatctgccaatggacatctaggttgcttccatgtcctagctattgtaaacagtgctgcaatgaacactggggtacacatgtctcttttaactttttccagggtagcttggccctgaattcttacttaggaccttcccaccctcctgtcctcagcagggagctcttccagtatctaagaccatccagcactgatcactccaagtggtatggcactgtagccctgggacatcctaattggaattgattgcatcatcagactgattgtcataaaatgtcactgtatgatttttaagaggtgtgtgtgtgtgtgtgtgtgtgtgtgtgtgtgtgtgtgtatgtatggaaagaaagatgttaaaggaagagaaagcaggacctgtttttctggaagctgtcttaaagcaaggccttcctggattggggcagcttggtgagcctgaaattccagcatccatccatccttgaacaccagaaacattttttagacaagtgaaaacaagtacctttccaaacctgtgaacctccgtgtaccatgaggtgagatctctttgatctccttgtctggaggcaagacactttccacaccctgaaatgcaggactctgctggagtgaaagtgggagttatctcctctcccagatagtagccccctggtgacaactgcttgtatggaagttctttctactagaatagatcaggagttcttagacttttgtgtgtgtagtagactccttggcagtctggtgaagcagatgaactcctttgggattgtatttatattgtatataaactgtgtttataaatgaataacctaattacatagaagttcgaaagaaaccaattacagttaacctatgaacagcagcagtttgaatcaggctgttacatttttttttcaaaagtaaata

SEQ ID NO: 46015 - DNA, 2613 bp, Bovine  19866881002447
  misc_feature (1)..(1): n is a, c, g, or t
ngttttttgtcccgcacctcaggtagaaatattcgctcatctcattctatgtgccagacgcggccttgtcctctcctgggtgaccttcacttctagaatggcttataaccacttatatgaggcttactatgtatcaggcacaactttaactgatttatatatatatatatatgtatatatatatatatataataaatataatatataaatatatatatatattattcttttggagaaggaaatggcaacccactccagtattcttgtctaggaaatcccatggacaaagtctgagcttggtgggcgacagtccatggggtcgcaaagagtcagacatgacttagcaactgagcatatattgttcttacaacagccctatgagggagatttatttttaaccatctccaaactgaggtacagaagagttaaggcattttttcaaagtgacatagctatgaagtggcagagctgggatttgaacctaggaagtgaatctccagagcagcggcccatctagagcagcagtgtccagctgagtcctgtgatgatgaagtgttctttgtgaagtctattgggcacttgaaatgtggctagtgtagctgaaaaactggatttaaaattttatttaattttaaatggccacatgtgggttagtcgctatgatactggaccacatagctgtagagtctaataactttcaaaatagcatcagaaaggtggtgatatcctttagagaagaggacagtgagtgtcagtgaaactggggggatttattcaaggttctgaagctggactgtggaagagccaggatgccacatgctgaaatcacaagctctggtcaccagagatgcaccccccagcccccatccactctcctggctcttcatctctttccaaacaggatcggaaagcatctttcttccttcacccttattaaagagtctctttttcccctcctccattattaacgccgtaacagtagaacagtgctttgtgacaggacatcacgctctatgttcgggggatgtggcatggtcctgtatcgtttaattgagtagactggaacagcttaacttggtagtgagcagtgtgctcactcttaacattcttaagggcttatctcaaacattattctgttgtctctttcttcttggttattcttccttccaatccactccaattcttttaccattggtaacaaaatgtatgggcttcccaagtggctcagtggtaaagaatccacctgccaatgcaggagacatgggtttgatccttgggtcagaaagatccagtggagaaggaaatggcaacccactccagtattcttgcctggagaatcccatggacagaggagcccggtgggctgcagtccacggggtagtggaagagttggacacacgttggcgactaaacaacaacaaaacaataacaaaatatatgctcccaaatcaaaacagcctttagttaaaagtactaaatttatgtctacctcaagctttgttctttaatttgaacccacctcccaccaaaacacccagaaactaacaaaacaaaaccttttgttcaattaggttccccttagctagtagtattattaaagaaaagatacacaatcatgtatggtttgggagaccgtcagttttcttaagcatagttttgaataagccaacctcatgttacccactgtgaaccacactcagtatcttgtacccagtaacctctcaacaactattaatattaacatttcattgatttgcctgcctctacatccctttagagacttaggacttatgtgaataggaaaccctactttaactcttgggcatggacagagaaaacagaactctattaagcaaagaaagccctgattcttactggtgtacccaggctttgggtactgggtactgctgcctgggaggccagtcctttctggcatcacaagaaaagaaatgctgtgacttcttcaggtagcggttctgcccatctgatcaccaaacgcgattgctatcttgtctggagacaagactcatccaactcacagtcaggagggagaatctaatgtttcctattgaggaggagcacacaagtatttccagtgacctggaaagtagttcattggaaagcagcttgagagactgacgaggactcttctaggccattgaatggtggggaggaaaggcatctgtgtttgaatctccttgatgcttccaattcccctgtgacaaaccctggacttagtggctctcaaatgatgactgacttatgcaactacagccaacctgatggtacttaaaaattcagagcactgacgtagattagtgttctcatttccactgactcatttagagggaacaaattcacgtggtagtacaaatagagaaggagaaaggggtaagaaggcactttataatttctcaagggatgaagtctagcattgtacttttaaacagaagctctttctattcccagtcaggcctccaagccacctcctggagcaattctactgtttcctgatgtgcccaccaataaagcagttgggtggaccctcacactgatgctcagagatatagaagctattggttgagcctttcactgtcaaatcctttttctctc

SEQ ID NO: 46016 - DNA, 941 bp, Bovine  19866881007188
  misc_feature (1)..(1): n is a, c, g, or t
ntttctaacatacctttccctccttatattaattagaatttttactacactttaaaaacagacaacagaatggcatatgaaatcgaatgctcacacaggcagccctctctttgccactcaccttcctcatctatccatttcatggtgaaaagttgttcgttgtcaaaagaacacatgtctcgaacctcattacaaagaccctcgaaggatattgaaggttcaaaatgtgttatcatgatatccctgaaaaagaaaaaggagttttaagttagagagtgactaataatgcctgatgttttgatggacttcagagattctgtgtggacatcaacacgtgtcacttccagtaaactatctctgtaaaaaataaaacaccaatacttaataatgcttaaaaataaaaacagtggttttgtgagaaatcttaatctcccctcctcattcaagaagcccaccctacctgctttaacaaataggaggtccacttttgttttaatgctagttatcagaagctcactcttttgtgagtactatactccaaagacaagtagctctattattggtcggcttctggattatacttaactgaaatatcttacaatctctaatcgctaatctccccttccctagaagtctatcttcatcaaagagatggcccttcaaaaatttaataaggatctgtcacgtcctcttcttcagccttaacttccacagactaaccacccagattagcaatccaattcccaaaatcgactttaaaatataattcatattataaggtagacaccccaaaaacaaaggaatagacataaatatgcatttattttcacattactgttagataaatcataacacttaaataaatccactgagcagctatttactacaagactcaaaaacacaacaaaatgttttagaacaaaagcctgggtgttcctcca

SEQ ID NO: 46017 - DNA, 2056 bp, Bovine  19866881098742
  misc_feature (1)..(1): n is a, c, g, or t
ntgggctattgaacatttcttatgaggctatgctgagtcacttcagtcgtgtccaactctgtgcgaccccataaacagcagcccaccaggctccccgtccctgggattctccaggcaagaacactggagtgggttgccatttccttctccagtgcatgaaagtgaaaagtgaaagtgaagtgctcagtcatgtctgactcctagcgaccccatggacggcaacctaccaggctcctccgtccgtgggattttccaggcaatcgtactggagtggggtgccattgccttctccgtcttatgaaaaccaaattctgagttttcattaaatttaagtgaacacatagctagcggctaatgtactaagcaacaaagctctagaaagtaactttattcttactttgatatcatctgatttctcacgactacaagtagacagaaattttaggtaaagctttgagttgggggacttccctggtggtccagtggttaagaatccacccctcaaggcaaagaactcaagttccatccctggttggggaactaagatctcacatgttgcaggggaactaaggcctgcccggcacaattagagagaagcccacctgcccgctgcaactaagacccgaggcagccaaatacataaacattttttaaaacaaatattaaaataaattttttttaaactttaagttgggatgtcacattaaagttaacagaccaaaataaaaatgtttctaattgttagtcataaacactttgataaattcaaggcagtcgttgcactgtttgctacccagggaactcttgtcacttcagcttagcacactttttccgatttctgctcatactgagtaattttctaactgacctctatgcccacagagaaaaaatgtaatttttctttaatagcactcaaatcttacagccgtgtacattagatctaaagaaaagatttttaagtcttacccatttgaaagacctcttagactatttcactgcatttgtgcagcttgtacaataaggttttgctgacaacacactaagtccatccccacaaggtgtgtatagatatacatacatagacgtgattcatgtcctaaaaatgtatagatcctaagtggaagtcagagtaaagaagtgaatttggaggctctgaattgctccaactggctttctaacagcctaaattcactctattagttgtgaactactcacatatttaaggagtttatatagattacctaagatgctaaaatctacccatatgttaataacttcaccttacttaaagagcaaagccccatcatgtaatatttttatatgagattgagaagatgtattttccttccgtgaatagagtatactcaaatagaccagctgatctgattgaccaaaccttccctttccagcacagggctttaaagatctatgatgcattttttttatctttctctggccacagattccaaatctggcactcttggagaactgcttggctattgtcatcgttataatctggagtgtctgagccagaaggaattgctctagattctccacatcaaaatatgatccagctacacacacttaaataccaaaagggggcatttgttctgagatgggcaaaaacagcaatctagcaagggcttccaaacacccatgcttgattagagggaaaagctgaactccataggaaaaaaaacagatttgattcccagttgatgtggctcaatccaattgatctttcctataaacaattaactggattcaaaacaggttatggttcaagtaaagttttatatttttccaattatttacacacatcacacatacacactcacacacacatacacacacgggcattcttcacatttcattttaatctcacttaacttccaggtttggtttagattttacagagtaagatttaaatattgcctctaatatcactgaattcttcctcttttactaagcaaagtaataaaactaggtcattttcatatagggaaataatcaggctcaacataccaaaagtaaccatcagtcttgatttttgagt

SEQ ID NO: 46018 - DNA, 1439 bp, Bovine  19866881233612
  misc_feature (1)..(1): n is a, c, g, or t
ncctaggaggcatttgtaccaattaatgtatcatcagaagaagtagtttaaactataatgggaaatgaggcaaacttaatcccatctcacaatagcttcaagacttcaattgttttgtccagaacagatgctaacaatggctggtataacaagtaactgcccatctcctgtgaattctgtaagtggttttaactcccggattctttactaaaagaattctgcataaaacttgggctgcctcacacatgccaatgtatttggttgcttaggaatcttcataaaagaagagtcaatgtgaaggacagcaaagataaaatgtttgccctactcaggatgggaaaagtctgtttgtagtcaagggaatatcatgaaacttttcaagaattaggtcttccaagtcaggtaagtgaattacaagataaagaaatcccaagttgaatgtattgtgtttatgccaggggagggggtgtggagtgtaaaataaccttagtgatgtgagatgtggaaatgattgttattccctgaggccttctgtgatgagacttgggtgggtttaggacagttgttggtggagctgtttattttaacaaaatggggaagatgcaagtgaaaaaaaaaaaaaaaaaagcatttttttgggaggggaggaagggtgatttcaacctggccaagaaagccagaaaatgtttaaaagttaaaattataatgactaacattcatagggagctgattagatagggctcaagaaggtcatagatattagtcattcattgactgagtcaaataaactccaaccaaattagtggtagaatctgatgtatgagttttcaaagagaatttcagaatacctgccttgtggaaagttcactaaatgaacatcgtgtattaatggatatttctcaagagctgactgcttgcatggtgaccaagtagggcctttgtgataaaggaaaagaggaaaaacagaactgcctacaaccaagttgctgagtaaaactaattttttaaaaaatatatagagcccaatatggtatgtgtatatgaagaataggtaggggtgagatgaaattggtgtccagcagtttagctagcttgctgggcgatacagagaatgtgactgtggcctggccttttcaggcttccctgtgcgtgaccttctaaatgaagttaggggcttcaggcacagctgggtccaggtgctgagagaacatcaagaggtgtctgtcatcctttctcagttctgtttgtttcagagttagcttcctcctcagccaagctctctactcaagggcggcagacagctgccaggggccacataatcactttttaaatttttttaaaccaggttgacaatccaaatagaaggagaggatctcttttctaatccttcctacacaagtcccagggctgactcaccttgagctgacagaggtcatttg

SEQ ID NO: 46019 - DNA, 1541 bp, Bovine  19866881262643
  misc_feature (1)..(1): n is a, c, g, or t
natgctgtaagtgtagaatcccactggagtgcaaagacttagcacaaaaggaagagcataaaaatgtaattgattacatattgaaacgataatgctttgaatgcactggaataaaatagaatatattaaaaattgatttcacttgtttacatttagctttttaatgtggctcctaggacattttaaattatatatgtggctcaggttatatttctactggacagtgctgttcaggggcaacagtgacccctcccctcctccttcacactgataatataacccaacactggagttatgacctacaaaatgggattccctaatgaggcaatgatcatccaggagacattgagggtgtctcttctcctgctgcaggggaaagtggggctcctgcagcacagcccctcatgtgagaaagcacggagcagccttgggaagcagggaaagcagggaaagaggtgtgtgagtgagcacagccataagaggacacttttgattctatgaggagacaaggggtgtgagacctacagtcttctgtgtccacaccccctgaggccctcttgctccattcatgttcacagtcattacactctggcaagttttcatgaggtagagagggtccggcaatataatcacaaaacttgcattcttacaaagctgtcataactgagcaaatattttggtcaacatgaagattatcttttctccacaagttaatttggaaatactttccactaggttataatctcctaatgtacacacatctctacaaaaatgattagtccaagtggatatttccaaagaggaaatgtttgccaaccattatgctatcagctaatgaaattagtatttttggaaaaatactaccaaagtagattgcaatctgtttttttctaacagcagactcataacttgacagactttctggaatagaaaacaaacaaaaatcaatttgctatatccaattttgttcaaaatttctaaacatctacatacatatgttcaaacaaaatgcacttagatattattacctgaagatccaataaaaatgagattgctttatagttccccttatactgagccaattcctttactatgcctagaatagataaaggagtttgtgtgatacttggcagttggtatctgatggttgcctatttatatgacttaaagaagccataatgtccctccttaagagacctagagagcatctaagttccccttatgaccacatgtaaccatcacgatacagtgaataaaatatcttttcaatttttcagcatagggcagaaagacttactcttgaatccctgaccagattccctgtagattactagtagagatcaacgaaaaagtttaaattgatggatgatacctctggatacaacagaatattacaggccagttttgcagacagtctgttattttattgcacagatttcacttaaagaacaaaatgcaccatcaagtttggagagtttagggtcttggataccagtacaccatcagtgtttgcacccgtaaagccaaattcaacagtacaa

SEQ ID NO: 46020 - DNA, 1326 bp, Bovine  19866881269480
  misc_feature (1)..(1): n is a, c, g, or t
nactataaaactccctgaaggtatggatttgtctgtctcattttttgctgaatcttcagggaccacattagggactggcaagccataggtaatcaacaaatgtttgtagaatgaaggtttttccacagtgctaaaaagaatattctgcataaatatttctttatgaaaggtgtctttgacaatagcagtttgtaataatccctgttctctgttacaatgtaggaggagttcctttgttgagtaccctgtgtgcataaaatcaaagaacacaaaatctcagaaatcatttaatccaagtctcagattttacaaatgattgaactctattttccttggctgccttcacaaatccctttgggaaaccaaattatctatattacatagttataaataaatgatctttctatgtttttgatcctttaatattcagtcaagggaagacagttaaaaattcacactattataatattaaaaatatttaacattaaaatattaacatccagttagggttagagttgtattttttgatgttgatgattcatgtagctccttgaagacctcaaaaagtatttcacctcatcggagcagtaaacgtctcataaatcatacagtatccaccatagcagagagggtttgagttttagtttgcgtcattttttttttttcaatctgtgtagaatatagttgagaactttgacaacctggaattcaatattttttttgaaaaatggagatcactttgccctgtaggtacatgttcatttcagcttctgggcttccttggaagatagcacccattcaggattcatgggtctgaggcccttggggtgcactctggatacatagccagagaactccctggaggcaggttcctttcctgacaatcagcatgtcttttcattaggaaatctgaaaattcagagagcgtatttcaatgtcaatggtgagaaatgccagatttcatttggggacttttaaatgaacttccagactgcaagctatttgactgaaaagtgcttgcttccatgctgttgagttaatatttttgcaaactgcaagttcttgagtttgaatgtattcctcatagagccctttaaggagcaattgttaatgcaaacaaatattaaataatatggatcaaagaaatgatactttcatactttgatggtgggagagtgggctgacataagtgtgtttggaatataaatctatcacgtgaaaataatcaggtacaaaaaaaaggtttttttcccccaatggttgttgcaatatcatttatagtggtgaaaattggggacaatacgaatgtccaaaaataagggcaga

SEQ ID NO: 46021 - DNA, 796 bp, Bovine  19866881272195
  misc_feature (1)..(1): n is a, c, g, or t
nacgtcgtagcgctggtaggtgctctggtgcagggcttcttctcgggcgctgatttccagggtgctattccagatgccgtacccaaaataaatgagcatacctgcaggggggtggggtgagtgggaggaagcacaggtgaataagctgttgtttggggatccacgcgtcaagcagggggcttactctcaatgatgagagcagacctggtggtggatgtgttttctttggtctgcgcagtgttttgaaaagatttgacttagatgccatttaaaaatggtaaatctttaaacaaccagtacttagaaccgaaggactgacaatgctgtacccacattcctacatggaaacttctggctggaggtgagaactggccatctctttggttaggatatggcgcacttgaggtcccctcagtccccactcccctgttggacatctagctcactatactcgtgtaggtgccagccaggaatttgccttttcttgtttaaatagttacggatctcccacagtgtactcccagccttctcatagcattttactatcccagatttccacttatgggctcattcttttatttcaccacatgtgtgggtactaagttggtttggttgtgtctgactctttgcaactctttggactatatagcccaccaggtccctctgttccatgggattctccaggcaagaatactgggatagattgccatttccttctctgggtgatctcctcagcctgggattgaacccacgtctcttctgtctcctacgttggcgaacgggttctttactgcta

SEQ ID NO: 46022 - DNA, 1314 bp, Bovine  19866881364868
  misc_feature (1)..(1): n is a, c, g, or t
ncccatccctctcttgtttctgacctttgtttcctattcttgtacctacccacgaagagagacccagaggagggggttcttaaaaaaacctaccttaaagatcatctagtgcagtcctctagcaaatgtttgaatttcctatacaaggctcctgatgagtggttatctggcctctgcttaagtagcagcttgaggtcaaggactgtcttaattactttcgtattttcagtacctagcaccacgcctggcaatgcagtagagactcaataaatattcgttgaatgaattctgaatgacagtgtagctcattaaattcccagggtggccccctttaaggttactctgctactagtccctttcacatttactaatacccctttattccatgaagtgttgaagaatctcaactgtctctgggtgcatttttagagatccgatttacaaattaaataatataaatgatggggaaatgcacaacactaaccatgataaaatgttgggagttaattttacctaatattctgtggtaagccataaacacatttacaacaaattatcctaactgcatgttaaaaacaattaagaaaagaacacaacagaacattcacagtcatgccagattttctcatctattctgcatttgtggcaacatacaaattaggtcgtcaaaaaaataacagtataattaaatggcacagcagtaatgctactactgatcaggaataaaaatgaaacaccaagatacagctattgccttttcttttacctttcaatatgagggtaatttattcccttcaagtaattaaacactaaaacagactacattacattatttggcaaagaaaagaaatagatcacttagtagctcaagttagagccttaatattttaaaatacttttatcattcaacttcccccatcattatctaccacaaaatgaacagatggcatcctcatctgaaacacataagaaaaatttcaggcatgatttcattcctaaagttctttctctaagtcataaaacaacaaatacgtctaagaaagcaaaatttaaacaagtctaaaatgtatagtagaagaattaattttaaataagtaaatattagaaacttttacacaaagtttctctaagtttcaacttaactgttacgtatacatgaccttttaataatcaggtttcctgataaagaactactgtatttcggcacaatgcttattagtctcacaatgacaaataatatagaaaacctggtttcatttacaaaaagaccaataagtatttctgtcatcacttgagaacaaaagcaatttcatc

SEQ ID NO: 46023 - DNA, 949 bp, Bovine  19866881651180
  misc_feature (1)..(1): n is a, c, g, or t
naaacaggagttccaagacaaattatttttcttccagacacatttgtaaaaattggcccaagcttcactgacaagtgatgaagtaaccaaggttactcaggtagaagagacagcgtgaggtgagaaggagagagtgcctgatggattaccccctgaaaaagaaaccccacagtttcttggctgacgaagagcataggaacaggacgttggggcagggtcgtaggggttcaccacacttgacagggggctgaatagatgtttcttagatcccaacaatatgcttctcaagggaccaaatgatggggatacttcagtaccacctcctggaattcagtactgctgagaaaacaaatgtttcccagagaattcacacattatttctctctagggtcctatgatttctccttacaccccactccaaagccacatgtaagcagtactagcatccacagtaaaacaggaagtcccctacatacgggtaagttccattccaagagcctgcaagtccaattcattcgaaaatccaacagagttagcctaggtacctaacacattcggctatacagtactatactgtaataagtttataatacttttcacacaaataatacataaaaaacaaacacaaaaaataaagaaaacatttttaatcttacagttcagtaccttgaaaagtacagtagaaccagctacattactgctgcttttatgctgcttctagacatcctgggcttgaaatatagatactgtactctacacagtaatgtacagtaaagtacacaaaatcacaaccactcatagagggtttacgcacgtgataacgtacgctggacacaggcactaacttacgtgattggacatgtgaatgcatgtttacatctttgaaagtttgcaaccgaaagttcatatgtaggggactcactgtatatacaacatctaagccttgctg

SEQ ID NO: 46024 - DNA, 698 bp, Bovine  19866881847266
  misc_feature (1)..(1): n is a, c, g, or t
ncccactcaggttgcagggtggcaccctcccatgccagggagtatcagtttctggagccagcttgaagtttgtgttatcagcaagattacaaaaggttctctgggaactttcttctgcctgataattgggaaggcagcctgagtcagaacaggttcacgttgtactcttgcatgtgacagctagtctgggagacaatgaatcatttcagctttttacaagaaaggcaggaaagaaatagttcttactgctttccctgctgttttcttgtttaagccccaaactgcaactagatcaagtctagtagaatcatctgcatttttacagatgagtaaactgaggcccaaaggaattaaatgaatttcccgaggtcacaaggaaatggcagagttttgatttggacttggggctgtctgactccaaaggcaataggccattgcatcatttttgcaaaattcctctggtgttccagaaacatagatattaggtaggactgactacataatttataggtcccagtgcaaaatgaaaccatggagcctcttgttaaaacattgttaagaattcaagaagacagcaccagagcattaagccaagcacgaggccctgtgtgactatacagatcatccacccatgaagccagccctctgttaatctgcacagactacatctcaaacattctgggcagatacgaaggtct

SEQ ID NO: 46025 - DNA, 752 bp, Bovine  19866881418651
  misc_feature (1)..(1): n is a, c, g, or t
ntaaatttatacaatgttttatgtcaattatatttcaaaaaatctgggaaaaatgaaatttaaaaaaggaggctaagaagaaaatctcattaatagaaaaaacattctgataaatcaaattgattccaatattaatagtcagtttaaatcatggaattagttaacagcatcaaattgggattaaagaaaggaataaaaatctattcttacaagttgtttaaaaacaaaacggtcattggctgatgccatagtctataaatctgattatgctgtacatgataaagcattccctaagagagaaaaaaagaattccaagcctatgaaagtagagcattaaagcaagtgccaggccttactgatcagaggcctctgtgcatgagttgtacacccatgatgattttaaatagagcacaccaagaagcggagtgggaaacacaaatgagggtattgccatctcacaaggaatgttacaaatgttccttcatttattctccagatgtacctctgacataacctttagcatgtgaaatactcaccaagaatatatactaaatattagtttgaaaatagcttcaggacttagtttaaacaactgagctaaaaatgttcccagcccatctgtcattttctttaggctcaatgctagaaacttttgatccattaatggaacagtttattcatcttttaatgcatgcagtatcatagcgcctcttcctccttctcatgctgaaatcacatttcgattcaagtca

SEQ ID NO: 46026 - DNA, 805 bp, Bovine  19866882186912
  misc_feature (1)..(1): n is a, c, g, or t
naggggatgaaaaacactagctgtgagtagccttctcccctccaggggactggactaaattccccacatccaacggcctccttcagagctgatggtcatttagagaccagtttcaaactggcagagggaggaccattttcgagttgctctgacattcagtgggggctggcagcatgacgtgaactccacctccaaagggacaagctcagaaaaacgcaaaactagtacactccgcggaagaaggggaaaagtaagttagaaaacgtttcatgtggtctgttacttctgacatgtcttccagagatttggtttaaaatcggtcagtggcatagaaaggttgtcttgggaaatgcgtgtgttggtttagttgcggttggagccaaacaaagctcgaagctggctaagacggcaattttaaatcactactggggagctgttaggtgtagtcacttgtgtccattaaaatccctgccaacagaaaatcttcactttgacttgattgctgataagcttagaaatgaacagtaagtggaacatggtgattaagcaaaaccaatttctgttcatgacttctgaaaagacaaatctgaaatcacagccactcagctcacgcttacgtgtgggagtaggctgggatggggtgtgtgtggagcacaagcgtccacagtggattaagattgattgcaggagctaaagacttttctctttgagtcttttgaatccaaagtagctttcactcaaataatatcaaaggcatctgattaaacacatctcccagcagaattttatcgcgggcatgctttac

SEQ ID NO: 46027 - DNA, 2164 bp, Bovine  19866880431658
  misc_feature (1)..(1): n is a, c, g, or t
nattaagcatttcttttcctcaaagtgactcccccgtaaaacgtttgatgatcatattcttgaggagattaggtttattatgcatctgtctgtagttatttgtaaacataaagttttgtgtttgggacccctgagcaaattgcttctaaaaactaaaggtagattcctctggaaagaaacgttaggaccagtaccttaatggatcacagagtagggccacaaagcacctgaataaagagtggattcaagttcagcaagactggaatgaaccgataagcaagtgttcccaggtctaaagatgtatcacttgagatggacttggtcagatatgcaccctgcaacagcaaagtcctagaaagagaagctggccagggcaagaggcgttttagccaacggactgagatctaacggacagatgggtggacaggctcacaaagaaaagacctgatgcattcctgaatccagcaggcaagtcacaccttctcagaaaaaaaggaatcaagccacctcagcctgatgccactggagcatttaaggaccctcattctctgttttgactccacgttcaaacagactctggatggccactcagcttcctaagattgtgaccacactgagtgccaatgttctgacgtgtgcagctacaacacacgtttgcagattagtaacatggaacgcaagtcttacacatcagtcacactggcttggcgaataggatttggattctgatgaatccatttctgtttgcttctgagtctgagaggtcaatgaccaaatgctggattgtgataaatctgaggagaggcgtcttgcaaaatgacttccctttgacagtatccactcctatgcgaccagtgtaaattccaattggtagtttagttatcttcacaacacactgtcagcgatcttgtcaagcaatgaaatatccaaagtaaatataaaatgcacataaaacaaacaaacaaaaaacgcaaaaattccatttacatttctgttttcaaatataaatctgaaattacgcttttgttttataatatacatttattccaaatagcactgcctgggctactgaactttcagaagcgctttttacctatgtgattggttattaaggttcagcgacccagtctggtacatctcttccagctgcttccggttcccgaagtacagagcgaggtccgtggcgatgatggctttgcggatgatctcaagcacctgctcatattcgctggagctcagggtggagaagatgttgtgcccttccaactaggggaagacacaagcaaacacacataagcacaaacacccacacgccgacagcaagcaccggctcccacctcgcgacacaggcggtgccaggaaacaacagttggttgtcgtttaggtcacgaacagaatctgcctgcaatgcagacccgggtttgatcctctggacaaggaaatggcaactcaccccagtaaacttgcctggaggattccatggacagagaagcctgatgggctacagtccatggggtcacaaagagtcagatacgactgagtgactaacgctttcaggacacatttgggtggaataaaaggacagtttgaaatgaccaatgaaatcagtgttttggtttctccttatgatacaacaatgaagctaccacttaaatgaactatttaaaccacataacatttcccaccacagaattccagcaatttaaatatatacctagtttggagatatttccagtaagtaattaaaggattggaatatgtaaaatatttaagtgaaagaattttccttttacactaattaaaaattttggtaattttcatattatagtagaaattaatgggcttaaaaaatcatctatacccttgtccatttctgcaagcctagtgaatatgaacctaattactctgtaccatagaagaaaatgtcccagtactggaaaattcataggcatattaaaaactctccctacagacaggaatgcttctacataaaacacacatccctgaggcacaaaaactggaaggccatcgctttttgtcctcacggtacgtggacacagcagatcaccaccctgaacaagaccaaacatctgtcatccggattctatttcctcagaattattcttctatatgcgaatctcttcaacctttttccaataatttc

SEQ ID NO: 46028 - DNA, 765 bp, Bovine  19866880722444
  misc_feature (1)..(1): n is a, c, g, or t
nagccctgtttcatattgatacgtttttgtcttaagttgcctcatatccattgagagagttagtggggctctaaagaagtctattttaaaaaaatacaaaatctattaccacactgtagagtaagagcatgcgtcatagtctttcatgtactgttaagtatttgagtgtgaccatctgccactgccagttgataatttgagtgtaccacagtaatttggattccttttcaaaggatagcctgtcatctagaaaattcttatggtgtgcacgtttgcagtttgtgaacgtgaatgccctttttttagaagaaactctcagaacacccttgagcagggtgatggtatgttgctgtctgttgaccctgtgggctgcaggagatggttgactgttcaggaagcggtgatgggattcgatggtagggaaggcaagcagattctggggtctgctcgctggtgggcccgttacagtgtctgagaggaagccggtaaagagtcctccttccttggtggctggaggaatgccagggagctggtgaacgaggctcactcagcaccccggaagtctccccggggcaggtgtgtgtgggcacagacccatgtgtctagaccagagctgcctcctggagcccgttgtttctttaccagtttctgtcgtgacggtgtctcttccgcacagcttcgagctggagaagttgtgccgtttcatcatgtctgtgaagaagaactaccgccgggttccttaccacaactggaagcatgcggtga

SEQ ID NO: 46029 - DNA, 929 bp, Bovine  19866880889708
  misc_feature (1)..(1): n is a, c, g, or t
ncacattcaactcaaatgaagatcaaaatggaaaatttaacacaaccgcattatctgtggaaattctatgcacgttgagtactgctgctgctgctgctaagtcgcatcagtcatgtctgactctgtgtgaccccatagatggaagcccaccaggctcctctgtccctgggattctccaggcaagaacagtggagtgggttgccatttccttcttccgatgcatgaaagtgaaaagtgaaagtgagtcactcagtcgtgtccaactcttagcgaccccatggactgcagcctaccaggctcctccgtccatgggattttccaggcaagagtactggagtgggatgccattgccttctccgatgcacgttgagcacagatggtaataaatatctttaatttatttaaaatatcttaaggtctcttcaaaaaattttcctgtgtccaccaattggcttttatatcttgagacacatttatgttaaatacactctacaaacagctaataaaatatttcacccgcaaataattacagaaggaaacaatacaatcatcagagttcatagatggcagaaactgggaaacatactgcaggtgggaagaaaaataagaaagaaaaagaaaatcagaaatatgactggagacttttctatttgctcacagaaacaaggatgtaagatccatccttctcatggtcctcaagttcgaagcaaccgtccctgttaacaaagagtttgaactgaaacagctgaacaagcaagcaccctatgacctggatttcagctcaccccagttgcttatgatctcatcctttcatttgtttggtcccagaagatgcatgtggagcacacatgccacggcagaggctatacatgcacggcgggctctgtgcctggtgggctctgtgtcaggtgggctccgtgtctgggggg

SEQ ID NO: 46030 - DNA, 2145 bp, Bovine  19866880982309
  misc_feature (1)..(1): n is a, c, g, or t
nggcccaccgctgtgttgatggtaaaatgagcccaagcatctttcatcttcttgaccttgtcagatagcctttccggtccaaagacttttgactcccggggcctgttggcattgggccagtgatacaggatggtctccgggggcctgtagagcttgttggggttcaggtgtccggaagtgtacatgtggacatcatctctgtggtttttctgcagttggttcagaagcgtccgcagattgcacagagtcttaacacctggtgtctcacagtgcttccacctcaggtaaactggtcaggaaagacaagaagaccagtaagtgccactctagttccccaccaaggccataaaagggcctgtgcacctgctgagctggagactacggagaggcaagagggcaggccagcccggctgcagaggagggctggggtaggggcacgtgacgggcaattcccatcatcaagcccggacccgcagagccgagaaggaggaagcagggacttgcctccaacagggaattaatttttaattttaatttatttatttttaaattgaaggataattgctttacagaattatgtggttttctgtcaagatcctggataaggaaggcattcccctcggccagcagaggctcatctttgccggcaagcagccggaatacggccacactcttctgattacagcatccagggggagtcgaccggcagcttgtcctccgtctgaggggcggctgttcgttcttcagtcttctattcatgacgcccaatgatggcatcattctgccctctagccatttaccccaactgaagtttagaaatcaccattctcagcaacagctgaacctgtccaaaatgttgatgaaggttttgttgcatggtaaaaaaaaaaaaaaaaagagtcggtcacttggcccctcccttccccactcagaggaagacagtgacccacagagtgaacccggggcatgttgatgcggaccccagctccctccacaaagggtcccagaagtaagggtccatttggacacttggcccaggacagaagacgacggaaaaagcgagcttttggagtccgtttcctactgcgcgagttcagagatcttacatcatctctctgaagcagtttcttcagcaaaattaggagactcgtcctactcaggacgaggctaattgacaaccagatacaatcgcttttggcagagaggcacctggcaaggaggggccgttccctaaatgctgcctgcgtcatccaaggactgcggcgcagggagcaccgcctaagggcttccgggaggacgtgagcacgcagacgccgcagaggagcgggaggggcccactcccggccggcgagacccgaggcaccctgcccggagacgcgtgcaggcgcccacgagcggacgccacgctgtctgcggcctgccttgtcccccgagctggaggggccccgacgcagggcatccgaccaggcccatctggaccctcaaggctccatcgtgagctcccggaggccgaggctttccccacgtccacacccactgccgccctcggtccgcacggcccgaaggaggaggcccatccggaaggaggccctttcagttccagggagggtgagagcagtggggtgaccagcacgggtccccccacccagtgagtgccagcgtgacttctgaattcagcctttccaccccacctgtcgctcttccctcctcccgagccaagggggccagggcaaggcgtcccgggacgccccccctcctctggccgagacgagttcaggacgcgtccctgacctccgcattatcaccttagagggaagggctgacagcacaaaggggtgaggggtgacagcgactccgctgtccgaaaagccctgcatccagaggcctcacacccgcgtgggtcacctgccccgtggtggcacctcaggctgtgggctggctctccacgctgggatcacaactggcacgtcagggtcgggcctggctggctcctggactccttggggaaatctgtcctgggccctgtcctgttgggacaggatccagctccttgcagctgtaggacagaggtccccacccccttggtggctgctggtggggatctttcctggctcctgggtctgcccatctttcccgatcacatgg

SEQ ID NO: 46031 - DNA, 3120 bp, Bovine  19866881007674
  misc_feature (1)..(1): n is a, c, g, or t
ngaattttcctactgagatatcctcattctattactctttacatctctaattaatatctaattgaagctattgtatcctgatcctcgctgacaccgtccccgctttgaactccctggatcagccggggctggaccccagcagccttggtctcccttcttcatgaaatggggaaactttggtggacttatatgatctgacttttgtttttaaaaaatattatctacatttcatgtatattttttctcctgaattgctctggaaggatggaggtaccaggaggctggcaaagtggcaatccacagctgtgccccctttcctgtgtaaggacaggtctgtaagctcaggagtgggtggaaaagtgaaagtgaaaatcactcagtcgtgtccgactctctgtgaccccagggacttcagtccatggaattctccaggccagaatactggggtgggtagagtgggtagtctccgacattgcaggcagattctttaccagctgagccaccagggaagcccaagaatactggagtgggtagcctatcccctctccagcggatcttcccaacccagggatcaaattggggtctcctgcattgcaggtggattctttaccagctgagtggacggaagctgaccttcaaagagccctgaaggtgaatgggggaggggcctcaagagccatctcctcctgcaggagaggtactatcttattcccaagaaatgaaactgttctgataacgactttcaaaacaaaattacaagatctttcttaagttatccgcattcttccttcctgcagtggttcactttgtacatccgtttgcctccccatggtgcccacatgtgtggtccgcacggtgcagggaaggtgtcctttggacgagatgaacactgacgctcacagacgctggtgctcctcttcctgtctgtctctttctccccctcaagtaaccccaatgcttttggttctgcttctatgtagaacacttccccaggatcccttccttgttgttaaaccttgtatttagaccttgctcttcagtatttccagaaaatgtttctgtattatctcttactaagcaacaaccttttgggatttcttttttttttttttttaatttaaactgcaagggtgaaagcacaaatcctcatagcaattttacttgtattccaaaatacagttggtaaaaatggcctccatcccctattcagcttgccttgcagagacagtttgtcttatgctactcactcctcgccaggccccagccccagccatgtcctttgccaaatgagtctcaaaccctctctccgctgtattggatcacggccctcatccacccacaccagcttctccttctttcttcctccctttgtgctaacaggttttgcacataagctcttaccaaaaaataaaattctctttgaatgataaattagcaggcacattcctattcacacgtggtggaaattctatcctagcaacagtcaccaaattaattgtcatccacaaggattgggtctgttttcttctagaaggagatttaaaaccattagccagacttttccagattcttttatgttaaggagttcattaggagataaaagcagggaaacaaatcccactgaaatgatctgtttgaacttctgactttttccaagcgtattttgataacattctgtatgaaaaacatttgaagtgtggagcatgtggtctcttcaggtagctgtggtctcggcgttcagacacaacagcctgtatccgtcagcgcagctgtactttgaacaacctcatccggaagggagaacaaaatgtgaagggataagaaaagagagctgggtgagataatgtagctctacttaaaaactaatttaggcagataaatctcagcccaaataacctgatctttaacaaaagggggagggaaggaggaagcttcaacgttgataaggaaaagaggtgcagagcctccttgagtcctaacaaacctggaggcaggtacagggtcaggaaggctgcctggcaggggcagtctggattttgatgcagcccttacctctcccaggctggaggggctgcctcctcctccttctgacaaaaaccctccagagatgctgtccacgtgaagctggcctctggaagctgtctcagtacaggaatgccaaggaagtacttcacagtctccttaggtacaggctattctgcttcactttggaaaaatatatgtaatacagttggacctatgaaattgctggtactcaaccggttttgccctgtagaaatggtatttcacatggttgagttcaaccctctttcactttaaagacacagggtaacaggatttcttgagtctagtttcaagatacaaaaagaaaagtttgggaagtggcacttctgaaatggtcttcatccacagtcaccatggatatgttagatacggctgggtacctactgtgggtagtgttaagtgttagctaccccactgggtgctaagtcacatcagtcatgtccgactctgtgcgacccatagacagcagcccaccaggctcccccgtccccgggattctccaggcaagaacactggagtgggttgccatttcttctccaatgcatgaaagtgaaaagtgaaagtgaagtcgctcagtcgtgtccgactcttagcaatcccatggactgcagcccaccaggctcctccgtccatgggagtttccaggcaagagtactggagtgggttgccagtgccttctccattgggtagtgggatggaaacaaataattttggatcttgttctttggtttttctcctaaggagtataacacctaactgggagaaatgaaaaaactctaccatgaaatttcttctttaaggtatagggagtaatacgttaattcagatgaccattatatctactactgtgggcaagaatcccttagaagaaatgcagctgccctcatagtcaacaaaagagtctgaaatgcaatacttgggtgcaatctcaaaaacagcagaatgatctctgttcacttccaaggcaaaccattcaatatcacagtaatccaagtctatgccccaatgactaacaccaaaaaagcgaagtgactggttctagaagacctactagaa

SEQ ID NO: 46032 - DNA, 1941 bp, Bovine  19866881055991
  misc_feature (1)..(1): n is a, c, g, or t
ncccccacccccagttcggaggccccctctcgctcccctccacacacggctgcgaaaggtacccggccctgaggagccaccggccagcccccctaccccaccccgtacgcgcatcgcaacagttctccaagtaagtcccgagcggaagcggaaggcggccggggttgggatgctgggaagacttccgggaagggagaggcagtcggtgagcgtccagggagcaggctcttgactggctcgagagggaccttttgtgtccatgtcgctgctggctcgaccacagagacctccaggccaggggcttcggggctgaatgtgactgctaccgcttgagcctcttttctttgggaccctgggcccaggcttgcatattttgagaaccttgtaaggtgatgatgccgggccagccaggcacgaggattactagcttgacgagacgcaagagtgtttctccaagtatgaggccagggtcagtggctccagcatcatctgaaaacccccccgacccacagagtcagaagctccggtggtccagcacttggtggtctaacatgcgcctaggggatacaggcttatccctgcccctaggtgcaggcttgagtggtatgaacaccgggccagaccacgaagacccctggacctaattccctctaataccacggatgccccagacttcattttgtctggctctgaaaggagggaaaaagcaaatgaacgccataaaacaattaagcaattaaagctgatttgaaatggaagaagcttatttgggaaggaaataggagtccagctagagcctagatcatattttaaattttgccttgagtaaatggttttcaaagcccttttaattcttaagcaataatcctttgcagaaaagacaggtaaaaattacattgatttttcagtataattaattcttaatcatgtgactgtaggagtccattttgtacaggatagctattgatctaatgataaagaaaaagcctgggtgctggaatatattccagtatgtacactgacaatgagtattggcctctgatgaccgattaagcaggtgggtgatgtagcgccagctgttggtagcggtttcagtgtgttttttccctcttggaagcccccatcagtaatgacactttcttacatctgtagcctattccgacagttcatctgcgtgtctgtccatgctccagccccatgacaactggtccagccttggaatgtctgcccacaccagcatgctgcccatgggtccgaacgctggtcctcctgcaggctccaggtaacgcatgtctggggagtgaggcagagtgtgggaacgtgagtgcctgtgatgtcatcccatcccatccattagcctgtatcctgctcttcacttatgggtgacaggttgttattggtaacttgactactagccagctatgtccggggctccgggttacatgactgctgtgagttcctgcttcacctgtcctctgggagttcagtggtgctttcagggtggatggagctggaatctcatggtagggagcagggaccctctcctggctctgctgtttactggtccatgcgatggacaagcctcctgagcatcgcttcttcaggaaaagggcaccaaacaaccccagcctcagcccatcttcccaggcttgtaggtgtacaggattgtggggtcagtaggtgaatcttgaagacaagtttccagaacctcttttgacaggcactatcaaattaaggaaatacatttgttggatttctgtggatatagaatcagggtgtttcttcacatacaggtaacttgaaaagaatgatgactattttattattaaattgaaaattgtatagagggaggttggcttcaaaaaatcaagctggtcggtcaatgtattatatttcttcataggatttttataataaaaactaaaaggcaaagtgagagcc

SEQ ID NO: 46033 - DNA, 1929 bp, Bovine  19866881067204
  misc_feature (1)..(1): n is a, c, g, or t
nttggagcttagcttcaccgtcagtccttccatgaatattaagggttgatttcctttaagatggactggttggatctatgtgcagctcaagggactctcaagagtcttctccaacaccacagctcaaaagcatcgattcttcggtgctcagctttctttatagtccaactctcatatccatacatgactactggaaaaaccatagctttgactatgcagagctttgttggcaaagtaatgtttctgctttttaatatactgtcacggttagcacggggtgattacagagggctggcctccggagaaaccagaggatttcctctgtggtttcagagaattcattgactgcgttcataatgtaatacttaaatacgtttctgcctcggatgctttgttgaaacgtttagcaatcagagagccgcaagtgggcttttaaggctggatgttgatttgatcaatgacttctgttctttactgtgtaagtgaagtgaagtcgctcagtcgagtccgactcttttcgaccccatggactgtagcacaccaggctcctccatccatgggattttccaggcaagagtactggagtgggttgccatttccttctccaggggatcttcctgacccagggatcgaacctgggtgtcctgcattacaggcagactctttacatctgagccactagggaagcccaagttgctcagtcatatctgacattttgtgatcccatggactgtagcccacgaggctcctctgtccatggcattctccaggctagaatactggagtgggcagcttttcccttttccaggggatcttcccaacccagggatcgaacccaggtctcccacattgcaggcagattctttaccagctgagccacaaggaaagcccttgcaccacccgggaagaccctaaaaaaatcttttttagtctctattaaaagcgcagatactggatacctgaaactaacacaatgttgttaaacaactgtgctccaatataaaataaatttttttttaaatggagatattggtttccactgcatttttcaaactattatttttgtatatgctaacaccaacaattttcatatattaattttgtaatctgctactttattggattttcgtactgtttctagacttctctagtcttctcaggcctgctgttgcaggggtctgggattgaggaatcaatgtggtgaggcgcacacactcaggatttcggcccatttaccatgcacaggattgaggagttggtgcaatgaggctgatgggaacccaaaccaggtattaaatcccagagggaatttaattcatttgggaattcatttgagacataaaaatagacaaaatggtgcactcactcacgctcacaaatgcacaagaagtgcatcagtaagtccaaacaaagtcaccaagttccaagaaaggctcgtggggacgtccctggtggtccggtggctaagactgcgtgctctcaatgcagagggcccaggtttgatccctggtcagggaactagatcccacatgctgcaacgaagagtttgcatgctacaacgaaaagatcttgcattccacaacttagatctatgcagaaagaaggagaggcttctgagtacaggcgagctcacagcgggatgtggtccaggagttgtggactgggtctggcagggaggcacacagacacatccgaccttggaactgcacatccacagttccttaggaaatcctcggccaggtgtgattcagaactcagcttttttttctgtttgttgtgatttttagaaaagtcaagcgatgcacatgaagtgttacatacttctagagtaatcagaccccacttgtaatcaaatgaattgatattttggcagcaaaatatcaactattacaggaggagaatggagaaagactctaaatgacctcaaga

SEQ ID NO: 46034 - DNA, 1217 bp, Bovine  19866881073920
  misc_feature (1)..(1): n is a, c, g, or t
natggggaaaaagtggaaacagtgacaaattttactttcttgggctccaaaaatcattgaagaccatgactgcagcacaaaattaaaatgctgctccttgcctgaacatctgtgacaaaactagacagcatattaaaaagcagagacattactttgccaacaaaggtccatctagtcaaagctatggtttttccagtggtcatgtatggatgtgagagttggaccataaagatgatgaggtatatgacaggaatggtattttgtctatctgtgtgggtttgtagcttttttttgtgtttatgttattaatctctcacacttctccagatctacgaaaaggtacatttcctgttcagtgaaacctgtgctcaaaacctaattgtcaggaatttttgctgttgatcaaatctcattgatttctgtcccctcttaatgtcggcacactggtgcattcggaggtttgatggtaaggacagaagcgcctctgaggggtctgagtggtgacaggataacgtatgtcacctttgtgtgaactcgtctgggagggagcactggacagggaagccttcctgccgccagctctccctggagcgctctcagccaggcccccagcagacaggctgtggggatggtggctgactcatagtttacgcgggttctcctgggtctttgctcgctctctttcctgaccccacgctactctccctttctttaaaggagcacatgcgggttcctccagagctgttggcattgtgtgcccctgttcagctggcagtgggtatcgctcaaggaccacagccaacaacgcccacagtgtttgctggcccagagcctgagaacttgagcccgttcccaaacgtatacagaatttctctgttagggacaactcaccgtcgtgtgtgatgctgccgcagctgggtttaccccctccttggtgaacacgtgtgaatacgtttgggggtgtgtgcagctgcctgggaaaatgtgtggagaaaggaaatgcttagaagctgtgttccccatggtttgacaactccagtagctgattgttgcttccattcttcctggcaagctgactttctgacttgcgaagtcacatccttactgctgagggactggccacctccacttcttctcagagaatctcagggggtgtgcaaagaagcagagacaggctggctgtccccggtcagcttctcagccccacgctgtccacg

SEQ ID NO: 46035 - DNA, 1264 bp, Bovine  19866881210937
  misc_feature (1)..(1): n is a, c, g, or t
ncttatttcttataatatgtttggaggtaattgggatgaagactgcttttttcttttacgtttagaaaagctagaattcattgagaataaatgatgaaaatgggaaatatttgtgaatcacagacttagcagtgatgggacctttgggaggtggtcccaccgtttttgcagttgaggagactgaataactgctggaattaagaggagatgctcttgggttctaggtgtatgctttaatgaaattctgctggtttccatggcaggtgacaataatagcaatggaaatagtcagtgtttgttgagtgcctagtatacagtaacttatgctaaactctttttgtatttgttcatcttgtcctcttgtccttattagcaagctgagaggtattatttacaccatttttccctataaagaaattggggcttagataaattaagtaatctctttcagattaaacgtctagtgaagagtacagtgtggacctcaggctttgggtggtgttcattcactaagtcgtgtccaactctttgcgaccccatggactgcagcatgtcaggcttccccgtcctttactatctcctggagtttgctcagactcatgtccattgagtcgggtgatgttatccaaatatctcatcctctgttgccctcttctcttaccgccctcaatctttcccagcatcaggatcttttccagtgatttggctcttcacattaggtggccaaagtactggagcttcagcttcagcatccgtccttccaatgaatagccaaggtggatttcctttagaattgactagtctgctctccttgctgtccaagagactctcagaagtcttctctaacacaacaattataaggccttagcaagaattttattttaaagtttgatttatcttgtccccattcaatttggcatggagaccatggttgagtgcctggctgaaaagctctgtataaagtttagacaatgaactggaaaccctagcagacagtctgaaggcttttgcaaattaagatcaaatcaccatgcaattgttttgttctgcaagctagctgaatttaaaaaaatattacacccatacttttattgtttattggtcatgtggcaaacgcttcctgccggcaacttgtccaggctggatttttttcacagcccagcagatgaagcccccagacccgccgctctgcggtgatcctgccaagggacttcaggagatttaaatacaaatgcagagagcgacaaacaagtggaaataaatg

SEQ ID NO: 46036 - DNA, 1474 bp, Bovine  19866881267919
  misc_feature (1)..(1): n is a, c, g, or t
nctgaatctgaagctccatactttggccccctgacgggaagagccagggcattgttcgaagagaccctgatgctgggaaagattgaaggcaggaggagaaggggacgacagaggataagatggttggatggcatcaccaactcagtggatatgagtttgagcaaactctgggaggtagtggaggactgaggagcctggcgtgctgcagtccacgcagttgcaaagagtcggacacgactgagcggctgaacaacagcagcaagaggaaagacataaaatcacatggttcaaagatctccccacctgacctaacctcgtctggaacaaaatgtggggaaattcaatcccaaatgtgctcttgaaaataatggagactgtggggttaagcaaataggatatgaaaacactgagtcaaaattattccgtgcagtggcaagatttcagggtgagggaggcttttagctggtgaacgtcgcaactgcttgagtcagtatacgcaataggaaattcttctagaggtcacctgaaacactcgcaagagagggagcatctgttgtgtgaccaggtcactttttagttcaagtagttctatttcggggacctgatatgcttgatgccatttcaattttagcattcacccttggcgtcatccccttgaggaaaaatcgtgacagctgtgtcatgcagctgacaccaactggcttccatgccttcccttgacatcctgacctttgcatccacagccggcaaacagtgatgctttagtcaacatgcatttgctgcctttttttttttttccccttgcacatagtacacatgggaaatgggcttcccggagggctcaacagtaaagaatccgcttgcaacgctagaggcacagaagacactggactcggaccctgagtcgggaagaccccctgtgggaggaaatggcagccccctccagtgttcttgcttgaaaaatcccatggacagaggagcctgtcgggctgcagtccagagggttgcaaagagtcggacacaactgagcagctgaacatgcattcacgggtgagaaatattaataactggcccataaaaattcatttctgtcttattcctaaacctaaaaagtgtccagtgcctttatcttccagtgttgctgtattagtatacattcaatgcttaatgtattacagcagatgagacaatggtatggggaaaaaattaactaattgatagagatttcagcttggcttccagtattctaagaccttaactcatacagacatttcatttttctgaactggacattctgcagagataaatgaagacagatggcatcacccagaagctggttatcctggtgaaggatctcaggaaatcacagctgtaagcaaacgtgaccctttgacaccttacatgtagacaggttttggaagagaggggcggcagcatgttagcacagctgcgtctctgataggaatgctgacag

SEQ ID NO: 46037 - DNA, 1423 bp, Bovine  19866881293020
  misc_feature (1)..(1): n is a, c, g, or t
ncacagctgatgggctgtggactcccctggtttcgggctggagctgtcctcagagaaagctttggatttcactctggcagagacaaacgggcaagtcagaccccaaagggaatgagcgctgtgggcgcgtgcccagcacagggaatgggtttttaaaaagcagcagcacaggtggtctctgcagagagatctcacttgtgatcacttgtaaggctccacggttattgcttatcccgttaccaggctgaatggaggtgccaatttagtcttggcataagcaccccatcacagatgggatttggcttcggggcacagtcaaagagggtctctgtgtgtgtgtacatacatgtgtgcatgtgcatatgtgttcggtgtcgctgggaggcagggggagtttaaccacatacaacttctttctgagtgtacagtcgcagtcggcccattaaatcagtgagtgaggaaggagacttgcaaaacctcttaggtctgcatttgtagacaattaacttaggaagcctctgtgcatgacaagcaacaaaccagacttggaatcgtgctgtacaatagaacaagtggatacgctagttagagtgtagttatatccattttactgtactttaaaagggatttgtgacaagtctaaacattttcctagctacgcatttagtaaaactttttcagaaatttggaactgcttcttagaacagtttaaattatattcaaataaatgaataggtctatttaaataaaaaatgttaaagaccattgtctttgctgaaatacgtaatttgaggaattcaataaagaagatggctttaataaccacctgaggagtaatcatgaacaaaaaaccaagagaaaggaatattattttttaattgaataaaaaccaaagattctactttcttaacagaaaaatattaaatgccacataaacacagtaatctgcctggaggcagtgtttcaaacagtaacattcaaaataactgcaaatatctcaagctaagggttatcattattgtaagcatctcagcataattcgagccattcccatgacctctagaagtccctcagtgtttattctttactttttctacaaatttcagatgcataattctctctatattctatctataggtagacacgttcatgtggtaaattcaaaatctctcattcacctgggataacacgtggtgcacgttaccaaaagaacctcatattctaccctcgggtgcacgttaccaaaagaacctcatattctaccctcgggttacggtgaatcgtgggaaatgaatctcatacgcttaccccatgcactttatcatatcagcaaatgaacaaatcagttcactgggtttgattctgacacagaacacacacacacacacaaaccccgcacacacatccctcgaaacaaagttct

SEQ ID NO: 46038 - DNA, 1450 bp, Bovine  19866881406693
  misc_feature (1)..(1): n is a, c, g, or t
nggctgatgctggaactggaactccatactttggtcacctgatgggaagggctgactgattggaaaagaccctgatgatgggaaagattgaatgcaggaggggaaggggatgacagaggatgagatggttggatggaatcaccaactcaatggacataagtttgagcaagctccaggagctggtgaaggacgggaagcctggcatggggtccatggggtcacaacgaatcggacacgactgagcaacagaacaagaacaacaaacttcctagagatgaatgctccagggatggagactggtcaccatatcctgcttttaagccttacatttgggaatggacagtaacagacccttcaagcagcctgatttcaactcagctctgatatgatgctcactttcagcaggaaatgacaacaaacttaaaactccatcaagatgcatttaaaattacatatggatagctttagaagtgtctgtgtacatttatgctcagtggataagagtttatattataattaggaagctttagtagaaaaatatgggcttcagaagtgagctagctgggtgtttttctcacatggcccacttaagactcatgtggctgcacgcatattcctttgactctccatgagtgattttcctcctgtgtagaatggacaccatgaaacttgccagaatttctgtgtggcctgagctcatgtgtgcaaaactcatgcatggctctcaactgttacctgggagatacgtgtttctattaccttaatttctttcaagatatcaccaaataccaaagaacttttgcaaatatcttcaaagacttctccaaagacctggagtctgttgaactcttcagggtcacagacacatattttctggagctcctggaggaaaagagaaccaccctgcttcaggatgacttcattttcctttctggtttagtttctcgggcggggcattctgtcagctgggtagcaaaccacttggtgctgaggctctatgatcgtctgacttcatttattcccttgcatcctgtaagtcaagggaacaaacagtgcctctctgcctccacagtgtttccaaggtccttctctttccaccagtcctctcagccaaagctctcatctgctgctgctgctaagtcgcttcagtcgtgtccgactctgtgtgaccccagagacggaagcccaccaggctcccccgtcccttgggattctccaggcaggaacactggagtgggttgccatttccttctccagtgaatgaaagtgaaaagtgaaagggaagtcgctcagtcgtgtccgcctcttagcgaccccatagactacagcccaccaggctcctccgtccatgggattctccaggcaagagtactgcagtggggtgccattgccttctccatccacaggtgcagaacctcacaaataagtggctgccacaaggcccgttaag

SEQ ID NO: 46039 - DNA, 1111 bp, Bovine  19866881793488
  misc_feature (1)..(1): n is a, c, g, or t
nctcagtaatttgttttcttcttaaaaagtgtttccgaactttaactggttgtgagttgaaaccgtaacataaaagagaagtttcatgaataaactgaactttgaattgtgtgtgggaagaaagatgagagcagatgtttaccacataaagcagacatctctgtgattgatgtcaatgaatcattttcccaattcatcagaaactcctgttatttttaacaaataatgtgcagtagtctagtctatggttctttttccactgaacctatttctaaaaatttgatttttttaaaataacttgaatgcttttttatttcttccttgagtcagcttagtcattatgactactgttaccaatctcctttagtttaaatggtttaactttagaaatatttttggaaatgtactgttaccacaaaaatattggataggtcatcatgagtttgtttgaaataatgaaaaaactaacttatgccctgccactgcctggcatctggactgatttccagccctgtggccagtctccttgctggtgttaggaggtaaagggccttatccaggccacctgcagcgctctcagctgcagtgaccagcagctcgggggtcaggtgcacgccccgatgcatgaagctcttcttgaaaaggtagggtcggctgagatgtcaaactttgaaccttttctttgttttcggttttcatgtagtttttcatctctagcctctaaaaaatttgtgctaataaaagttttcatagatttatacaacattagagcagaaattaattttagagactcatctcaacactggatgttatagattataaatgtatgtataatcaccttaatatatttaatgttatacagtgatatttgatgaaagttttcattcatcttcctgtgaaaataaataatgagtataatcttttttcatcttattaatttgaacatcccagtcaaattcttatgtcaaaattcgtaagaattgacatgggggcatgggaggtacaaaccttggagtataagatagccttctaaggatgtgttttattacaatatggaaaatacaaccaacattttgtaataactttgaattgaaagtaaatcttaagtatt

SEQ ID NO: 46040 - DNA, 877 bp, Bovine  19866882105237
  misc_feature (1)..(1): n is a, c, g, or t
ncttattatttcttactgtttttttttttcctgtgttgaattaatatttatattttttatcttttctcttctttagttatttttgttctacttttgagagtttttcaattttttccctgaaattctccactgatttttacagtttttaatgttctgttttttcaagaattctttactgttctccagttgttcattttatagcattccttttaccatgaatgtaatatattttcttctctctctgagaatattatagtgttaagaacttttttcctccttgtggtctctttccaaggttcttttaactgctcgtgattttagcctcagtcttccatgttggaaactttccttgactattgcattatccttcataatcctttcctacttaagaatgacacctgaaaagcaaattggcagctccagtgaagtgagagggatgtcagagattgtggtctggtgagctctctgtagagtgactgtatggggcgatctcgggtgtcagtaccggcaggtcttgtttctggcacggtctgttctggggaagaggccttctatctcctgtcagggcagggtgggtgcaggagtagacactggaagcgcacattccagcagctgcgtgggaagaggcagctggggcagtggcggggcgccctgcattcagaaatgctgcttcttaactgtgttcctgtcggtctagagcctcagctctgccctcctctgtgtgcagcgttctccatcctctccccagtgtgtctgatttcagagtctctctgctttagtttgtcccaagaataaatcctttgcttcttctagggatgggggaaagtgtctgcaggtctggactctcgatgtaaggctttcaaaccaacccccttgt

SEQ ID NO: 46041 - DNA, 1005 bp, Bovine  19866880411632
  misc_feature (1)..(1): n is a, c, g, or t
ngatcttcctgacccgggtatggaacccgtgtttcctgtgtctcctgcattggtgggcagattcttcaccacttttgccacctgggaagcaatcattaaggttacttcccttgatggatgtcacactgtctctgagtgctgaacccaggattctgacctaggattgtccgactctgacatcttgcaggatctaacattcacgtcagaagtgttcaagtcataatgtttcagagagcggaaaatttacttttctccttctgggtaaaattaggtccccattattctggggaatcccttcctgataagcattttcacaatatccatagcaataatatttacatttgtcaattgcttccatttttaagatgctcttgctgatatgatagcacattaaggggctgtgttttgctcaaggatctctgaatctagtctttcacagacttacactctagtttccttctttatgcagggtagagctgtctcctggactcttgtacactcgttgttctcaaataggctggccctccacttctcttccatttaaacccaattaaccagcctgttttccaaatggactctgctgggaggaggaggaagggcaagaggctcagcttgcaattcagaagcatcatcttcattcattggcaaagaaaagcctggggtcttaatggaacataaagaattctacagatgaatccttcagtttcctgtcaaaggcccagattgagaaattcagagttactcagcttgtggtcttttattttaagtaacagtgggataaaacaggccacggtggcagccgaggactccatttagcttcctaaatggatgctacatctggctacttcacccccttcaatttcaaatgcaatttgtcttgaagcctccaatttaaatcacatagatcttctctaagagaaataataggcttcccatggaaaggcttgtgtgtgtgtggtggtggtggtggtggtggcaatggattggggatgatgagaagaggtg

SEQ ID NO: 46042 - DNA, 2142 bp, Bovine  19866880742203
  misc_feature (1)..(1): n is a, c, g, or t
natactggagtgggttgtcatttccttatctaggggatctttccgacccagggatcaaatccaggtttgatcaggaaaggagctgagggtcaaaggattttgggagactcagggtgtcttttctccagatgattgggtaccttctacctatctacccaaatctgggatggcaaccaaccagaaccaatcaatccaaatgatgcacatgccttagaagtctgcacattgactcatcatcttatttatttatttaattcagttttataattagagatcagtaaaaattcatgtactgcatcgtgaagtattaaatagctaccaaagttttaaaaagcatcactggtcattcaaagagggtagctctctacatttcatcataatgagtgtgatctgtgctctggggcaaccagaatttgggtctggaatgtctctttcagaatagctttttttttttttttttttctgaaatcaatcgaagcctgaagaaggtggcaggctgcaaagcttcttcttaatttaatcatttgtttttcattcattccctgatctaatgattctactgagaactagagggagcacaatgaaacagactcttgtgactgccctcctgcgggtctcccaggattgtagactgcacaagtgtgtcacatttgcccttctctatgtatcccaccagctccatgccctcccctctcttcccacaggaacctacaccaacgcacacactgagatgccgcccgtcactgtgcgttcatgccccctccctgtacagacccgccgtgtcccacgtgatgtcctgccttggctgtttccaggtctctgccagagagctgcacggatgggcagtggggactgtaggtgagacctgctctgggtcaggcccacctgctgtctgtgctgtgcttggcaagggactcatacattctgaacctcattgacaaaacgggtgtattaacacccacctcgcagggttattgtgagtgtttaaacggaataatgtgtgtcaagcagagttgtgattgtggcttacctatgcattgtcccaatctcttctgcttccttagtaacagaaccctatattttaattttttgtaacctttaagaaacatttatctatttgtttggttgtgtcccaccttagctgtggcatgagggatctttagttgcagaatatgggatctagttccctgatcagggattgaaaccaggaccctgcattgggagcacggagtcttattaaccactggactgccaggaaagccctcagaaccctatattattaaaggtagttcttgcttggctgaaaactttttttttttttcaatctctgttgcaatggggcagccaatgagattgaagcagaagtcactgggtgggaacttcagaaaatcttcttgaagggtcctttcaccttctcccccactctacattctctttctttctgtctgaaatatggatgtgatggctggagctcctgcagccatttctgactatgggatgaccttgaggataaaagccacctcattaaagatactgggatagaaacactggagaaaggcattgatttttttgagcctcagtttcttatctgtaaaacaggagcaataaatatggtatgtgttactagatactaggagtgcagtgcctagtacagcagctgacatggagcaggtcctcaactaaatgcagtctgtgctttttttttctcctttctcatcagggtttacaggaactgcagacagttttcctacttggatatattaactgcagaaggggtgaccttcacatggccacagtctgtcataccaaactgatgagtagagccaaaattggctcagagattcccttctctatctagtgtggccagaaatccttagaggcagctgtctgaatatgctttctctgtaggctggttgctaatctcttttccttgagaactctgccttagtatcttgccttcctgcggggaggtgtcagttgcaggagaagtcagtttgacaatagatgtgctaagaacggcatctctaaatcctgtgagtacagcttgggtccttgtcactcaggcccccaggagtttcttctcattccttaagccaaatggatggcaccggggagagagagaaatctttgatgtagaaggca

SEQ ID NO: 46043 - DNA, 684 bp, Bovine  19866881082453
  misc_feature (1)..(1): n is a, c, g, or t
ntttcttgcatggagaatcccatggacagaggagcctggcaggctacggcccatggggtcgcaaagagtcagacacgactgagcatgcacacacacgctcacccatttatgaattggaatagtaacggtccttataacaaggcacccacagttgttttgagacttagatgattcttatagaaaaaaaaatttttttttcagtaaaatgttgaatataggacctaacctagggtaagtgctccatactgtttcctttgagtaaatttggaaaaaaccaactcggcatctcacgctagcctctaaaataagctagagctagtcctgctctcagtgctacgtgtttaaaaatatttcaaatgaaaggcagcctggtgggagggaggggatgggagaggactgaggtatctgggaaggaacgacatcacagatggcccatcagaaacttcagagtgtcgcatccagaggtacctgccagctcatccagggacgagtcttctatgaggaccagatgctactaattggcgaggaatcctgtggctgccacccagagaagagaacaaattctttgtcaacacatggttgtttttttttacccccttccaaatggaatgcattaactctttccaacaggcataccagacttcagtctccaaaacccgtgtccacatttaggaaattcttaag

SEQ ID NO: 46044 - DNA, 1001 bp, Bovine  19866881120055
  misc_feature (1)..(1): n is a, c, g, or t
naaatgagtctctaaagactcatctagagagagactggagttgtcagctgttgccccttccttaatataaagagcagaggcagagctttagaggggctttgagtgcgtcccgggaggagtgtcaagatcaagcacctgtgttcctgagggacagtggactgggccagttttccgtttaggaagcagagagggaaatctagggggtaaaatatcagagaatcagagaaccctgcccctgacctctctggatgaaatctttctaacagaggatggaagatttccttccataatgagcattgattctcaaatgcaaatccactggggacagaaggcacatgaacctcaattctctttaaagtacggatgactggcattggggtctttctgaaaagcagggtttcagtacaccgagttcttggcgcaaatcagtggaggaagtgagaaaactcaagtgcagaaagaggaggtcattgcctaatgacattcacaattttccaacattcaaaattttgcacattcacaatttggctggaagtcagtcttccatgttggtccaataacaattcctgaataagatgttctgtccctgtagggttttccagaccttacactcacccctttctctccacccagagatcactagccactgggagtcaaaatagctgctggacttgtgctgagaaaatgcccaggcgcctgcaaaacagagcacaatggaacctcccacctcaagaccatcaaaggaaggctcgtccacggatgtgctgtggcctgaagaccccacagccaatttttcccacggtcagccgagtgatgaggtccactgaggccagccggcaccaataggcacggagggccagaggagaaagcacttccgagaacttgcgggctcaataaacatcagccagtggattccaggctctgacccataacacaagcctctctcctcccatggaaaggagtaaaaacacaggaaaagcagaaatcctctctctctctta

SEQ ID NO: 46045 - DNA, 737 bp, Bovine  19866881473858
  misc_feature (1)..(1): n is a, c, g, or t
ntcagatcaccaggcattagatcccagaggtgggaccactgtgatctttggcaggaccactgatgatacaggctccacatgggacatccactgaaggtcccatttaggactggggatctcagtgttcccactctgcccgttcctcctgttacatcatgtttcttcacatctctctctcccttccaaactgttatctgtttcaaagacaaggtctggtccttgtcccctctacttgggactcctggaacccagtaaagggcccgagacacagtagagatttgctcaacaagtcacataaatacgacctggacctcaattccattttcagtatttcccacttcctcaattcccacacctctgattagcaccatctgctcccatctcatcaaattattttccatctcttgaatacatcatgccctcccacacattcaggccttcctacacacctttctgtctagcatcccctgcatggaacaggccaaaccccataaaaggagaatattatagagcagaggtcatcaaaactacagcctgtgacaccagcccactgcctgttttcatcaataacattttattagaatacatccgggcctgttgtttacatattgtctaaggaggcttctgtgctgcactggccaagctgagtagttactctagagactgtatggcctgtcaagcccagaatagtcactttctgggccttttgctgaacatgctgctaagcctcgtttcag

SEQ ID NO: 46046 - DNA, 1439 bp, Bovine  19866881652762
  misc_feature (1)..(1): n is a, c, g, or t
ntccccgtgcttacctgtggtctctcttgtttactttcctgccaggcccctcttatttccacacacgggttcaagagagaagggagacattttcctctgaatcacctctgccgccgggaggcaggtggtggctttcttccaaggatttttcttcctagtctcataaacttctttaccgtggtgagggagaggctatcagaagtctgtttatctgcagagctgagagccgaagagctactcttatttataggatcctgagagtgtccgtgatattgggtaagaaatcacactgcagcaaacctgctgacacctgagcgtcaagaaatctgtctctactaggttagcccgagggcagcagaaagtcaagacaggctggcatcagacgccagtgctgtccctccccgtttgtgatctgggataagtgacctccctgagcctcagtttcttcatctctaagatgagaaagacaagaccccatcaaagggctgctgggagggttacaggtgaggatgtatttgaggcacgcagcctccagctcacagcctccctcccgtccctgctgccacccgctgctccgtgctctgctgggtctgtgaagcttggctcttgctccgctgttactgtccagtctggaggactatactcttcttttccggagaccttgactttgaatttatgatgccttcactggtactgtgcctgcctcttgggatgtaggtgggatgtgatcccaggccagagaaggtgtcagggattgagagtgagtttggctgggtttaggtggcctggcttaagcaagaacactgtgccagggcctggcttgcctggagacaaggtaggactgtcagagaagccgccgagaatcatcattagttgggccttctgtctgaaccaggtggatgagctcactgacttcagactttgatctccagacgtcagtgttagcccgagacccaccccaaagcgggaggggccctggctgcaaagagagacctgtttcatcaccccccctcccaccacgtccctcttcgaacgaagctctgtgcacaggttttatgaaaacatgactacagtgtgagtcaggtcatcccgcctgtaagcctctgccgactccagcgataaagaattcgggccttatttatagggcagcctggagaatctgacaggaggaattgagcttgctgccagggtgcgaaatgagatttcccagaaagacgttccctgggctgaaggggcctctggggacagcggaggagataggcaaggtgaatcagacggaatgatctgggcggcagcccaccaaggccgggcctccctcctcctacaggggattggcagcagagatgtctccaggccctgggccttagcatcttcccacgggagccaggcaaaggtcagaacgctcagatgccctacaagtccatgtaaccaagcgtgtt

SEQ ID NO: 46047 - DNA, 862 bp, Bovine  19866880385802
  misc_feature (1)..(1): n is a, c, g, or t
nctgcccttccttctggcatccaggcatccctcagctcatcactaatgttgtgcccactggacctaggaatgtggttacaatttattgtccaagctggggtgctttaaaggatgctataattaggctggaacagcaggcataaatggggatggtgcttagtcactcagttgtgtctgaccctttggactgtagcccaccaggctcctctgttcatgggatttttcaggcaagaatactgcagtaggttgccatgccctcctccaggggatcttccagacccagggattgaacctgtgtctcctgcttcccaggcggattctctacccactgagccatcggggaagtccattaaatggggattggttcagggtaaactaagacgcttctgctgtacctgggggcaaggggatgctttcatgctcctttggaagcagaggtggcacaatgcacattgccctaccctggcttctgcagtcccctcctttcaccaggagtcatctgaggtccctgagagccccgctggcctgccacatgcctggtgccagagggcatgatgagtttgattccgcaacatctcaaataaccactgccccttctgctcagcatgcagcctccatgcccagatcaccttgaaggatctgtttaactccctctacccggagggactggccttctctgcagcctttgagcacacctgggttgaggaaatgattctttttcccagaatgggctctatttgcattccaccagcaatcttcttactcagagggattccaaagacattaaattaacagaaaatgacattagcgctaagaaccaaactcgattatctgaaatacgagtatttattgtaaggactca

SEQ ID NO: 46048 - DNA, 932 bp, Bovine  19866880439405
  misc_feature (1)..(1): n is a, c, g, or t
natgggtcaccaactggaaaattcactccaccactccagaggtgggaggtgtaaagaggatgggggaagggaagtcccaattaaggaactgggcaggggtcagaggggggttccctccaacagggttcagtcctcctctccctcttgtctaccagccccttgcctcctgctaaaaaggaaaccgtgacactaagttatgtgagtggagtgtagagaaggagattctgtctacattaagccagcagcacaatccatcaatttcaggcacatcaaacagaccaactgaaaacaaaagactttgcactggatttctgcatttcccatgtacgcaaataatacgagaggagacaagcaatgcccgagcatctcaatcttcctccttccagatcctaacagaagctgacactctgcagggcaacttctcaaataaacagccagggatggacaagaagcaaatgctttgtgcaaacaccaataattctcattctatcctcttatgtattgacatgttctagctgtaatctttaaaaaaaaaaaaaaaaactttctcctttgggagaaggtaaagtggctcagaaggcaattccagtgacagagagagcagaggagaaagaagggtgacatggaaggtggtagcctggtggtggcctcatctgggaacccatcccagatctcccatgcatgaccaataacctctcctttttactccttccacacgctgaattatacatggtgtctctctgttcacatggtccaccctccttaagggtagaggcagcttcctacaggtagaggctgcatttttctcacctgtacctggctcattaaacatgaggcatttaatagcgtgaagtaggattggatggggcttcccaggtggcactagtggtaaagaaccctgccaatgcaggagacgtaaagagatgcgaatt

SEQ ID NO: 46049 - DNA, 1320 bp, Bovine  19866880506840
  misc_feature (1)..(1): n is a, c, g, or t
nctagtaaggcatatacgtcgatcccaatctctcaattcatcctatccctcctttccctgttggtgtctgtctataattttgttctctacatctgtgtctccatttctcttttgcaaataattcatctgtaccatttttttctagattatgcatatacagaggtgaaaaatttgtaaagtaagatccaaaatcaaataccagcagatgatacaaatgagtgagggtgagaggttgcaatgagtagggagtggcgggaacgctggagaaacgacaatacacacaggttctctagagagggcacttcttgcttgctgtggccatgcaaagtttctagagcttgtcttttttaaagacaactaaaaaatctggaactttatgtaaaatatactaaaatttaaatgttggaaactaaatttaaaaaaatatatatattgaaagctaaataaacttgtcatgaagccatcaatttacaaccaaccaatgcattaaaagctcatctctatccccaaaagaagtctgtagaagaactccatctactgtgcactttatttctgttattattacatcacctccgtttcagatcatcaggcattagatcctggaggttggggacccctgatctagagaacaatttcatgtcaggcaaggtgaagaaataaaactgtagacttgcctttggctggctgccaagaacatggagcctgagtacaaaaatcaaggacagagtgtttagtcggaggcctcaatgccttattcataactatgttcatctggctggtatctgggaaggtcctggctctcatctacttgtcactttcttgtactgtccaatttgacagcatattttccagttttcccttctcagatactcccaaggcctgaaatgagtagataagtagaggagaaaactgggagaagttagggagactgggtgtctgggaggaagaaactggctggaaatcactgccttaggaagatgagcaggaagttgttattctcagggtctctgtttgtagctcctccctcttatctgcccaccatactcttcctaaccctaaccctatccctatccctaaccctaaccctggtatagacactaatgccagctctggagaaaagctgaagctggttcaactgtctcagaaatttgagtaaatcaaaagatgagagccaggtgtgtccaacaggaaagaacctcttcttttgtttccacatccttgtgctcagaagtggaagctgggtgcatgccacaaagggcaggaaagaggatttcttccccaaagagccctatttccttctccaaagccctcttcaactag

SEQ ID NO: 46050 - DNA, 1549 bp, Bovine  19866880725084
  misc_feature (1)..(1): n is a, c, g, or t
nctcctcctcctcctcctcctcctaccaagtcacttcagtcgtgtccgactctgtgcgaccccataggcagcagcccaccaggctcccccatccctgggattctccaggcaagaacactggagtgggttgccatttccttctccaactgacatctcctagggatgctgaaaatgcagtgtatttgaaaggactggtccatgcttgctgctcagtcctgtccgactctatgtgaccccatggacagtagccagctaggctcctctgtctgtgggattttacaggcaagaaatactggagggggttgccatgccctccttcaggggatctttccagctcaggaatcaaacctgtttctcttgtatctccttcattggcaggcagattctttaccactgcacccacttatttgtctaacatttatacttccccttagttactttcttgctagaaataaatggtggtattctcaggtactgaaagaaatgtttttacaatggaaatatcaatttatttccatgatggaaaattgactatgttattgatcaatgtgttccatctgcctaagtcttcctaattataaatttgaaaggtacacccagtagcatagtaactgtcaaataattattgatgggaagctgttgttatatgtcttgatatgggttcctctaaagacggcctaacacagaaggagatggcaaattaaatatgtttcatttactaagtaaaatgttttgttttttttttttgtctgattctgtctcttaagagctgattaacaaaataatcctgtgaattgttgacttctcaagagacactggaggtcacccaggacaattcctgaaccatgtttacaaaattgatatctcacagcccagattaatgctcttttaatttaaagaattgattggtttatggagctctttatttttgttatctggtcagagattcttataatccccagtccatttcactttatgaacaatagttgtctcacttaaacatgttaacatctccaataaatacattccaatattatccaaacagattgttacatgaggttgttgttgtttttagcattttgcacactttatatgcaataaaggatcccagagatgattccttattttgatttcccttctaatttggcaaggatgaaagctttagcctgtcacaggccaagactgtgtcaaatggggtgaacttctaatgaatatacactactgagactaacaaacttaattacaccacaggcctcttctgaaatggacacttccaattccatacaccacaaatattggccccgaatcaaggatgaagtctgagccgatgtttttattgcatttcagataatagaggagaagttgcattgaagatgagagagaaaggagaacacctccagataggcatgtgcctaatatacatgtcagggctgagggtgaggaaccgattgcctctgagcaatctcatgagcaaaggagccaaatttataacatcaaaatattgtctttcccatcaaacactcagcattttaatgcccatggagtctga

SEQ ID NO: 46051 - DNA, 2844 bp, Bovine  19866880766028
  misc_feature (1)..(1): n is a, c, g, or t
ntggactccggggagttggtgatagacagggaggcctggcgtgttgcggttcatgggggtcgtaaaccagtcggacgtgactgagcaactgaactgaactgaacctgatgcctaccttatgggatcactatggtgatcaaatgagataagataagtgacatggggagaatattattacttattagtcaagacttatcactattaaagttctgaaggatgagttcaagctcgttcaaccatgtttaagtcttcatggttcattatttaatttgaagtgaattcccataatataagctctctccatattcaaatataaatatgaaatccattttgctgtcaaatatatgatgatatggaaggcaattcatgcctttggttaccttcaatggtgtgcagaattgctagtgactatgtcatattctcctttagttgaaaaacatctcttccacactcggccttgttttttggctacataatccctttcagaggcttttaaaaataaattacccagcaaaaaaatgcatctagtaaatacaagattccaacaaagaagaatctaatacctggaataaagacagaattaattcagaataattgcataaatctcccatttaaaatcttcagcatcaggtttacatttagccacaatattaagtagttggaccatgttcaacttgtttttgtagtgaaatctccttggtaaattcaattttttctaagaggtcctccttgttcacatgatacaaagcacaaatatattcaaaatggataaccaacaaggacttggtgtatagcacagggaactctgcttagtgttatgtggccacctggatgggaggggagtttgggggagaatgcgtgcatgcaaagttgctccagtggagtccaactctttgcagtcccatagactgtagcctaccaggctcctctgtctatgggcttctccaggcaagaatactggagttgacttgccttccaccagtggatcttcctgaccttgcgatcgaacccatgtctcttatatctcccgcattgtcaggcagtttcttaagcactagcaccacctgtttcctgcccatgggggagacaagtgtgaaagtcaaagtgttagctgctcagccatgtccgaccctttgcagccccatggactgtagtctgccaggctcctctgtccatgggagaatggatacatgtatacgtatgactgagtccctttgctgtccacctgaaactatcatagcactgttaatcggctctacatcaaatataaaataaaaagttaaaacaaacaaaagaaaaagcacaaaataactagaggccattgttaaaattaactgcacattgtgcagaattagaatatttagtagtgttgagtgctttgccatttgttacatggaggagcaataagtaggtcaagccaatgacaagaaacgtcacatcagttcagagcttctcaaacaggcatgtgtatttctcagcatctctttagctcctgccttgaacattgcctgttatcattattttttcttagtgaacttttctgactttaggtcagtctgtgcctttgcctagaattaaaaaagacagtttaccaatatgatttcccaggaactggtaaattctaaaccattgtttctggggagctgctaggtagaaaagtgagactaagacagatgactgaaagaggaacgtatttctgacttgtctagattctaaatgatcctgaaacatgagccatatggctgaggcctcaaagacaggaagtggtcaaactgggatttttagctcaagtctgactctaaacattgttcttttctacagaaacagtactgtctcttatgggggaaaaaaatcacataatgcttataaaggattcagatggaaaggagtgacaaccagaaatgttaccaaaaaaaaaaaaaaaagccatttcatacagtggtttgaaatattctgtctccatttgatacagggatttgtatggtcttcatgacctatcatgtcagtgataaaaataaccattggcccaattgcttagaacttgaaatatatcagagaaaggcaatcaatcagtcaaatatttttcaagtgtcttctgtttgctcaacactatactctactctgtgggacatgacagctcacacatcaaagttctttggcaagcaagaagtgaatgtgaagtagtattattagaggaaaactacatgcagtggtccaacttcaaagaacttaaaatcttaatgtggaagaggatgtttgcatgtaacaatagatcttcatcatcataaacagcacagaaaatgtattcagttggtgattagaacagggatgggccaacttttttctgcagagtgtgagatagaaaatattttaggctttgtgggacatctggtctctgctgtagcaactcaacttggtcattgtagtgtgaaagcagccatagatgataaagtaagtgaatgagcttggctgcatttcaataaaactttatttacaagcacagatagcctgctgtttttgatccactggttgtgctttgctaactctgtttagactgaatgtgagagagggttgcagaagaatcgatcactgtggaacaatcagggaagctttagttataactactttttattcagggttgacccttccgcctggcactctatgaatcacagttcattgaattttgagattcccaatgtaaattgcccaacatcacacaatttagtaaaaagcttaaatccaggtctgtgtgtgctgtgtgctcggtagattcagtcgtgtctgactctttgtgagtccatgaatggtagcccgccaggctcctctgtccattggattctccag

SEQ ID NO: 46052 - DNA, 1636 bp, Bovine  19866880781039
  misc_feature (1)..(1): n is a, c, g, or t
nggacttggcatccagaacctcctaagtgatgatctgattcaatttgtgtgtgctgaaatctctctggagtgctggcatttcacaccgtgatatccatcattgaaaatggatagatagaactgggtgctcattaatggaggcagggcccctcagccctgaggccatccatgttgggggctcacaccagccccttccagaggtgacacccctagatctttctaggcaaggacaccagagtccctgcactcatcctcagatttcatgaaggctgtccctgcccaccccacaccaccccaactacatcatcctacccatgatgaagacaccgcatccctaacctttatacagcaaaatccccctacgtacaatctgttgccagggcctgccaattttcccttcctgatgtttgaagcacttgtttctcattctatttcaaacattccatctcaaacccagccttttaatggtatcctaaaacaggggtcaaactttttctataaaagcccagagactaaatatgttttactttgcaggccgtgcagtctcgaatgcaaggactcaactggcatggcagcacaaaagcagacacagaaattcctaatgagtatggctgtgttccaacaaaactttatttaaaacaacaagtgctgggccagatttggcctgcaagccctagcctgggccattgttctagcacattggtctcctcagtttgtctccccacttccaatttctctctcttccagccagccttactcacaggtgccaaggatcatgttcttaatgagaactctatttccgtcacattttgcaatttgaaaaatgtacagaagccactctgtctgcttcaacgtcatcaatcaaacacttcgtcagttcctattgagcacatgtcctgcgcttagaggctgtgtcatttcattttaattcatataacacttaaatgaagtgggtgttctcactgtgttagacaaatgggaaaaagaagaagaaacaggctcatgatttaacttgttcaatgtcatcccagcaacaaacagcaaacggagcaatttgaacccaggttcattggctccagatcaacttctctatttgccccaaccataatgtttcctatttgcccctctccaaacaagtacaatctagtttgttgtttcttctgcttcatctcttggtcccttaggcaagtggttctcagtcttggctaccattacaatcccttgagaaacaacaacaacaaaaactcccatattaattagctcagaatctctggaaattaaggtctagatatcagaattttaagaagcaccactctcctggttctcctgtgtagctgagattgagaaatgctggcttaggaatttcccccagttctcaggctgagataccacaagccccagccaccactgtttgctccttaaagcaaatttaagaaactggcttagatacaaagaggtctttagcagcactgctgcacttaattctggtgctgctctaactcagggcccagattctttgtttgagtctctactatattcttagaagctcccatcacataacccagggaaacttaatttcctttataccctaggctaccccggtgttctagctcctccaagcttggggctgttgctg

SEQ ID NO: 46053 - DNA, 1745 bp, Bovine  19866880787849
  misc_feature (1)..(1): n is a, c, g, or t
nttctttaccatctgagctactggggaagacttgatgtaataacctatagctccttaaatttcctttgctagagccataattaatttattgaagacctactatgtgccaggtctcaacgtggactatgaggccaatcacagcctgatcactgtcaacctatcatctctctccctccaacttcctgttgccctaacacatgggtgggtgtttctgctcctgaaatagacatgactcagggctttgcacttctgtctccttgtctggaatgtcttcccttttcatctttatgggctggttctgtctctttattcagacctcagcttaaatgtcaccctatttcagtccactttattcaatactcctcccaccttcccttaaagaaggggtggataaaatatagtccctgggcctgccacctgtttctcagaataaagtttcattcctcatttctttatatatggtccatgactgcttgcatcctgcaacaggtgagctgagtagttgtgacagagaccctacagcccactaagccaaaaatatctactctctggctcttgacagaaaacagttgccaggcccagctctggagtcactctatagcaataagttctattttccttgttatactgttctatgaaatcatctcctttgttatttcagtctccccttccccactgggatgtgaattccatgagaatggggacctctgccttgattttggctttaactccagagtattcagaggcattcaatgcttgtatattgtctgactgactaaatgctctgaaaacctggggaagagctcagcctgaccaatgtacatcaatgaggggaggagagaatggaccatctggaagtagggtgccttttcaatttctggatttttgtagaccaaccacagacacccccatttgctatttaaaccatgaaaataaagtacaagaaatcaatttaatagcctggcctaggattcaatggggtctgatctatgacaggctcttttctcaatgaacctctaaacctccttaaagagctctggcaaccatgagccaaagaagcctgagatcggctcaggtcacttccctccatgacacgaaaccccacaaggaatcagcacttcatgaaatgttacagccccccatcccatccccacactgttgactcatccagtgccttaccacgcctgagatggcatggctttccatagaagccatcagcccccacataacgctttcctgtgtacaaatgatgttttaaaaaaagtaaaccagcctcccaaattacattttgctggagaaatcaatagcaatgacttgcaggcttaggccgtgcttttgagaggaaaagatgcaggaggcaagtggagaagggttggaaaatagaaagaaggcagcccagtgtgctggtagatttcatgctccagcaccttccgccagatccgtggaggggcgaaactgagagcgatcctctctggaagcaaggaataatggaaatgtattagtttataaatgcatttgtgcaaacaaccactcccctccactctcgtctttttctcactctttgcactgactacaccagcaaggtcagtaggtcccacctctgaaacatcttccgaatcgcacctctcctctacatccctactatacatcctggaccagctgccatcagctgacaatggactcatgcagtgggtctcctaacttgttttcctgtgttttccttccactatagcatcaaacccatt

SEQ ID NO: 46054 - DNA, 1408 bp, Bovine  19866880828852
  misc_feature (1)..(1): n is a, c, g, or t
natatgggatatgtgtatacgtatgagtgattcactttgctgtacagcagaaagtaatacaatgttgtaaagcaactatactccaataaaaattcatttaaaataaaaataaacttatacacacatgagtcattaaggggttttaagtaggagtagtgtggtcaagtataaattttgaagagatcagtctggctacaatgttgaggatggaccaacaggtcaagagaagagataaaagaccttaggaggaatctgggtgaaactggataaggacatacctagagaattagtgggagagtcagaaagaaagaaacagatttctgaaatattcagaatctaaaatcgatctctagactcccaagtccagagcatctcataacagactgcctgtgctgtaaggtcattaggagggcaagaccacccattggcattcttgtatttagaccctaagctagacagttctgtttcccaagatcaccaccctctgaacaccatgggtctgaactccttgccaaccaccccatcccttcacagatttcagttcctggaggaccgatcacctgtactgtaaaacacaaatcactaaactccagctttcagatgtttctgagcacatgctgtggttattttattttcacagcttaagcttccatatttcttattgagtgatcagggtgcatgggttgaagccttggcgcctgtgttcttttggaaagtacaagtaaagcaaagggtcttaaataatttagaagtgtcctaaatttttccagctttctccctttttccatctctccaagggatgcaaaaaagcagcctctagcactctaaaatgttcgtatttctagaagctccgggagaaacgaaaacccacaaatgttccctctttaaatattccttcaatcctattttttttccttagactcaatgatggcagttaatagttacaattttagaagaaaacagtgatctagtgaaaagactctgcatttttgccatggttgcatcgaatcatagaatgttagcgccaaagttagaatttaaaaacaatccacttcagagctggagaacacttggcatgtgtgctgcagttctcgtcacccgcatccatggcagacattgctaatccatcactgcggtctttttctatgaacccaggtgtagcctcaaagccttgtcagtacagtgtgtaagtgactgctgactgactggagttggcacactaaatgatactcatttgtcaccactgttctactcccagtcgcacaggggggaacctgagtgggggaaatgacccaacacctgcagcagaacctacgaataggtttttctgctaagacctgtctgcagtggaagaaaagctcgtctgttcctgactttggatctctctcatgtttctacgtctttgcat

SEQ ID NO: 46055 - DNA, 2150 bp, Bovine  19866880840622
  misc_feature (1)..(1): n is a, c, g, or t
naaaatgtgataaaaaattatacctatctcatagggattttgtgacgtttaagtatccattatatatgaaaatagcaaaatcctcgaaggaagaggagaggatgtttctaccttaaaagtgacatgataagacttgggttcttctaagagcatttcaaaaggtgctcattaaagtgaaaccctacaaaaaacatgagaaacagatgggttatattcaatggaatactactcagccacagaaaagaatgaaattttgccacatgcagcaacatggacagacttggggcttcccaggtggcgcagtgataaagaatctacctgccaatgcaggagacatgggttcgacccccaagtcgagaagatcccctggagaagaaaatggcaacccaatgcagtattcttgcctggaaaattccatggacagaggagcctggtaggtaagctacagtccatggagtcacaaagagtcagacacgacttagtgactgagcacggggttaagcacaggaggatggacttggacgacactatgctaagtgagacaagtcagacagagaaggataaatcctatatgatactgttgatatgtggcatctaaatacaacagactagcaatgataacaaagcagcagcagactcacaaatatggagaacagactagcagttgccagtggcagggagggggcaatctaggggtggggagtgaaaaaggtcaaacttcctgggtgtacaacaggctcaaggatgtactgtacaactgggggaatacaagccaacactgtgtaacaatcataaatggaagtaacctttaaaaattgcagacaaaataaaaaataaatttaaagaatacattttttagaaaaagaaacagatggagtgggtgggtgcataagtgggtgactggatttcaagtaaatgtggaagtaggtggatgaatgggagggaaggacacccctcgcatcccggccatccaccttcccagctgtgccttcagtccctcagctaccatcgccttctcggaaggagccctcatagccccaccttgccttgtgcaggtgacctgaggcctctgaaacttgtcatccacccgctttacctcccaggcatttgctcctctccccacctcccaaaaggtccccatgacctagccctttgggtttggaggggggttcatcacctcaggtcttctggttggttgcattcagtgtaattaaagcccccatgccagtgactgactcagggtctgcatggggtctgagttgctctgatgattgtagaacccacagtggttgagggaagagaacacagcctggaaacacgcctgagacagtctgtgccctggtcaatcttggcctgaagatcagccggtcagtcagtggcttatcttgttttactgttactgttttttattttggcaatgctgggtcttcattgcagcccatgggcttctctagttgcagcatgtgggatcttagttccctgagcagggatcaaacctgggtcccctgcattgggagcatagagtcttaaccactgaaccaccaaggaagtctctcaatatctttttttcctcttaacagactcctctgccaaaacagcattttaaattttgattaagcccaatgtatcctttttgtttatgagttgtgacttgtgtgtccccctccccctcttttttaaccccaaattagtaaagacacttgagtcaatccttaaccctcctatgactcagtttcctcacatgtaaaatggggagagtaattatagcacctacttaatgagttattttaagaatgcagagttgagctatataaagcacttacacagtacccaacacacagtgcttgctgttattattagtactattattagaaaatgtgtaataccttcgtttgctcagacgaccttgggaaaatcctgacagcaaatgccggataataaactatgaaaaaaatgcaggtgaacaaacatctgtgcaaagtaaagacccggtggaggcagagatgactaaagaatgccctgaatacataaattgggccaagtttctcaaacaaaaggtaaatcagaaacaaaaggaattgtgacccaaggcaaagccaaaataaaatctataatttggcttcttcccctcacaactgcagactccatta

SEQ ID NO: 46056 - DNA, 1695 bp, Bovine  19866880892005
  misc_feature (1)..(1): n is a, c, g, or t
nacgcttactccttggaagaaaagttatgaccacctagacagcacattaaaaagaagagacattactttgccaacaaaggtccgtctagttaattaaggctatggtttttccagtagtcatgtatggttgtgagagttggactacaaagaaagctgagtgccgaagaattgatgcttttgaactgtggtgttggagaagattcttgagagtcccttggactgcaaggagatccagccagtccatcctaaaggaaatcagtcctgggtgttcattggaaggactgatgttgaagctgaaactccaatactttggccacctgatgcgaagagctgactcttttgaaaagaccctgatgttgggaaagattgaaggcaagaggagaaggggatgacaatggatgagatggttagatggcatcaccaactcaatggacataagtttgagtaaactctggaagttggtgatggacagggagacctggcgtgctgcggttcatcgggtcgcaaagagtgagacacgactgagcaactgaactgaactgagctgggctggtggggggcaggggagccagtagcctgagcaatgcagtttactgcaggctttgaatagcatccttggatgtatttaccctcaaggtgaagttaaccacaggatcaccagtcgattgagagtgtgagagcgacttttgagggcatttaatatatagagatgaagctacacaatcgtttttcttcctaaactctgaatatccagaccagtgcagcaaggagcaggcagtggacacagcacgatctgaacaacttcgtgtgctgactcccacctgcctttctttccacagatctgcttgtcgcccaagaactcaaaggaaaacagatctgtgtcttgggccagagcatgtgttggaacaggaactaaactctggaagcctgagagttccttgtgtggagtaacaaatcaatcagagggtgtaagctatgtattttttgcttttgttcttattttcccttcctttggttatagactcactcaaccctgtggttggccacatgggtctctcaaggtcaatcagatcttttctcaaaagaatgggggtgttcaaatcaatcccattcagtccccctaggaggaactgtgtccttattgccaacacgctgtctgtttgtcctgttctatttctgaattgctgaatgaactcattgtctttctaaacaaagctccctttcttcctttcttttttttggttgcttgcgtcctggggatcctgaccaatagacccaggtagtaaggtaaaagaaaatcacagcaaaaagaggtgtgtgtactctcattaaaaaccacatagatagttattttacatgagtgtagatgcatagacctgaaaccagcaatagttttcttagttggatttgaactttgtagactatgaagtaagtgttttttctgcatccaaaatactgtcagctgaacattccttaaatacagttacacttagaattagcctgacttctatgccgtgccaccattgtctttttgtcactttggcagaatcttaggaaaagaacaaaaaggggatattattgaagggctgaacattgatagacagagccacaatgaaccagcctatgtctgacatcctttcaagggaactctcgcgatgtagtaattcatttcctgcaggaacaatttacttcgag

SEQ ID NO: 46057 - DNA, 938 bp, Bovine  19866880930958
  misc_feature (1)..(1): n is a, c, g, or t
ngatccctgcttctagaataatttgaaaatcaatcctctttttttccctggtgctcttctgtctcctgcaactgatgcatctcatttcactttgaagctgcaagtgattatctacaattaaaaacactgcaaagcaatcgtaagttaagcaagttaaatattaagacccttctaaaaaattaatggccgctatggagacatcatctaaaggatggagtagagtttctcatgatatcctgtctagttggtctcaacatattcttgggactggggtttaccagattaagctctcaaaattaattcaaaccatgatctgtgatttgggcttgtaattactgtttgaaccaaatagttcttctccctggtgatggttattgattatcatgtagttatttacccaacatcatttcctcagtaagtgcctcccctttctctatggagataatagccctgattgaatgtacttccagaaggggtgattgatttggactttcctaacctcatctactggagaaggaaatggcaacccactccagtactcttgcctggaaaattccatggatggaggagcctggtaggctacagtccatggggtcgcaaagagttggacacgactgagcgacttcatttcactcacttcatactttatcactgaagtaggaaatggcaacccactccagtgttcttgcctggagaatcccatggacaggggagcctggcgggccatagtccatggggtcacagagagtcagacacaactgaagtgactgagcaagagcaaacctcctctactcaggtgctgggcttctcttggcttcaggataccaccatctcctgctttcacttctacctcactagcttggtcattctgccctgatgatttgttatcctctaaggcctgatgtgctgtgattcatggggttgcaaagagtcagaca

SEQ ID NO: 46058 - DNA, 1764 bp, Bovine  19866880933216
  misc_feature (1)..(1): n is a, c, g, or t
nagcattgctatgagcgttgctcatataaaaggctgagcatcagaggccaagattttctctggctccctcttgaggtgctaaggattaacagatagacagagacatgccgacagaggtccatataaccaaagctaaggtttttctagtagtcatgaatggatgtgagagttggatcataaagaaggctgagcaccaaagaattgatgctttcaaactgtggtgctggagaagactcttgagagtcccttggaaagccaggacatcaaaccaatcaagcctaaaggaaatcaaccttgaatattcattggactgatgctgaagctccaatactttggctacgtgatgcaaagagccaactcattggaaaagaccctgatgctaggaaggattgagggcaggagtagaagtgggtgacagaagatgagatggtttgatggcatcaccagctcaatgaacatgaacttgagcaaactccaggagattgtgaagtacagggaagcctggcatgccactgtccatagggttacgaagagttggacacgactgagtgagtgaacaacaactactatatataaacaaataaccaacaaggacctactgtaaagcacagggaccgttatggggggtggatgccaatatatctccagtctaagtcatcttgaaacaaggcttttggaatctagacttacttttcaagcttttctttctgcgtttttatttgatgttattgacagattgcctagtagaatgttactgaccacttggaaagctacagaggttgtacatttgtgctgagaaggttggtgactctttgttagttgcgttgactgtctctgtgttgcagggttcgtttgtgttgcaagtatgagctcagtatagtggtcaccttctccttttctgatttcacttcctacttccaggtgcagttggtgctctatttcaggaattctaataagactttatatttagctttcactgcctaatgatcatttgaatatcttctttgagtcagtttccacaatgactaagacttttggaacgaagcaaatcagattttctgccccagctcctatagttcttcaggattatgcgacttccttgaagtcgactttattagggttattgtgtaacgtaaaagataacatttgtaaatttcttctagtgtctgttacaaagtgagtattcaacaaatgtgttattgtaattatcataaatataatactcttttcctttaactgtgatctcctaggaaatcgaaatgttccacgtttgttttttgtttttttcccataacatctagtacagaatctggcacacacaaagaatgtttagataaatgagtcattttcagaattaggtgatttttttttgaagggggttttaaagcattaggaattcctttgatcagtaaccaaatccccaagtggaagcaaaggcttaaatggtattatcttgtactatgcaccatcatctgtagtactttctaagggtgacattctgttccattctgcattctcacgtatgataaattgtaagttagacaagtgaggcagctatcctcaacacctggtttccttgacaacccttcatataaatagtaagggcctgttatggggggtggatgccaatatatctccggtctaagtcatcttgaaacaaggctttcaaggtcaaggttaaaatatttgaaatgataataaaacctttggttaatgtttcctagatgcattataagagttgagtaaaggcatcatctcttcagg

SEQ ID NO: 46059 - DNA, 1662 bp, Bovine  19866880945277
  misc_feature (1)..(1): n is a, c, g, or t
nttaattgaaatgtttgattactagtgatgcaatattttcctctgtttactggccacatatatttttcttcaataaattgcttgttcatgttcttactaatttttaaatttaggtttaatatttccctgcataattataaaagctctaggactaatatgtgcaataaactttcaattcataatttactttaatcctcaaaataattttgttaggttgttgttgtttagtcgctcagtcgtatctgactcttccatgaccccatggactatatagcctgccgggctcctctgtccatgggattttccaagcaagaatactggagtgggttgccatttcctactccaggggaatcgtcccaacccagggagtgaacccatgtctcctgcattgcaagcagattcttaatggctgagtcaccagggaagaccaattttgttaggcaggtttgattaaacccatcttgggataggatgtaggatcagagaagttaagtaaatttgtagcagtcgtcagggtgtgattcaaggctgagtacaggtgcacacacaataccagcttgacatctgccatctgaagtgactcagctgtcacccaggctctgttctttttctagcaggtgagctttatatctgggtaataatctagttctccatgaaaaagagatattggtaaatatatggatgtattttttccacttggtatgtttcctgttcttttgatataacctcagctccctgagagtgacatatttcctaccattggaatgccccccaatgcagcaactgtagcgataaacacaaatgtttctaatgcatgaaatatgaccagtaattgccttcaccacctgcttcttgcttgttagcaattgcagggacaattgcatcccatgctcacacagacagatgacacagtggtcgtgggacactttgagctcccactttggcagaaatcataaaaagtgatccaaagaaactggtgggaagggggtgggtaacatatctgggttaggaaccatagagcaccagttttgaaaccacatataagaatcaccagagagatttttaaaaccatcatgcttcaggtcacactcaataccaagtaaatcaaaagctcaggtgggtgggatcgagacatcggtgttttttatacaacctctcaggtgactctaacatgcagtcaagtttgagcactagtgctgtagaatcacacctctgattttctgtcttgcaaaggaaaccttgcactcagagatgcaggaaggctccaggagagagagaagaaaggtagggctcaggaagagcttggagacctggcaggagcagtcagaccatgctgagatggcttctacactgcctgcctcaactccaggacgttctttgatttaaaagtaaggtacctccactggcttaagtgactgatgttgagatagttctatctttgagtaaactcatacactgaaaaagtcagctcattggagaaaagggcacgggtaaaatactgaggcgggtccttggcttagaaaccaagtcgctgttaggagatggagcttatgttcttttaaaaaggaaatttctcttgagctcaagaaagatacaagcatgaggtgaaaggatccagggaccttcttaatgagcatgatgatgctataagcacttcccaaa

SEQ ID NO: 46060 - DNA, 2133 bp, Bovine  19866881004150
  misc_feature (1)..(1): n is a, c, g, or t
naaattgactagaggccaaacaagacatccaagcaaggtcatggaacccctgctgcagcaagaacaagcaacaggttccttgcttgatccttcctgagcagggacaagcttgttccttatatggggtgacataaggtgtgtccaagggtcaggctggagtggagcttgggtggcttgcccctaggtggaatacagggtgcacgtgcagtacactgcttttgctcctggctcttcagaagtggttgttgtggttttggtctttttgtatcttttgtccagaatttgccccagttgcatgcatgcagttatttttagtcccttatagtttcttagtattttgttgttccaggagaggtttgtccaggtgcaagcattgcagctctgcagcaaaagatcccaggtcctagcctgtttcaaacatgaataaaagcagaggtgagaagtggagagagatcaggtcctcccatctacccagatggaaccttacctgaaggcaggtctacccttgggcttcgtagataataaaccactaaattctgtgttttgtttagttttttttaccacttgctactgggaaagccttttttttttttttttttaaacacatttctaagaggaaataaacaatgagtatttatctatgacctagggttgttgtaatgacaaaggaaagaaatatattttcaaaagcattttcaaagtggtaaaaccataattggatattagatatctgcaagggaaaatgagctagaacctttcaaaatggattttgactttgtcttcgttagagagcagtaacttttcacagatgaaagctaacggaagagattagactatatcataacactctgtattttcccaaagtgagttgactttcaaaaataatcttaaatgaatatacgtaaaagcagttctaaaggactgggagtaaaactgcaaaaggattctgtatttatttttaggaccactttcacttttctgaattagattcttttcttagtatatgtgcatgctgagttgcttcagttgtgtccgactctttgcaaccctatggactgtagcctacgacactcttctgtccatggggattctccaggcaggaatactgaagtgggttgccatttccttttccaggggagcttcccaatccaggatcaaacccgcatctcttctgtctcctgcatgggcaggcaggttctctactgatgagccactaggaaagcccctagtatgtgtggcctcgactcattttccttgatttttttttctttgaactttttactttgtgttcttgcctggagaatcccagagatgggggagcctggtgcactgccgtccatggggtcgcacagagttggacacgactgaagcgacttagcagcaggagcagcagcatagctgatttacaatgttgtgatagtttcagctggacagggaatggactcagccatacctatacatgcatccattctcccccaaactaattttcctagatttgtaagtaggggctgttcattgtgaggggtgcctatttggtgcagtactagctggtttgcttatgatgtcattaaattgagtactttgtgttaagtatgaagtaggaaagaatccctaacctggtcagtatggatatgtgttcttcatattacacattttcctctgtaggtttgcataagcttttactttttgcaattcagaggcattttagaggcttgttctcaagtgatttggccagtgcatcatttcatgattttataatccacaagtgactggaatgaacagttttaagtcacatgcagcagaaagggcctagattttaaggctgtgtggatctgggcttgaaaccctggtgcccgcaacaccctgagtttgggtgacctcatctgaaaaaccaaaggaccatagttctgtatagtatgtttgttataaagattgaaagaggcaatgcatgtgaaagtgcctcataccaggtagatagtcagtaatcacatttcttatccttttatttattcatataaatgagatattttaaggcagtcatcctggctctagggaaattaagaattttattaagaatcgattggtctctatagctttcatcttgcaactctttaggctactaaatcttattct

SEQ ID NO: 46061 - DNA, 1448 bp, Bovine  19866881008417
  misc_feature (1)..(1): n is a, c, g, or t
natccttaaattaattacatccaccaagaccctacctacagataagttcacattcactttaccagggattaagacttggacataccttttcagggagggactctattcaaagcactaccccccctcacccatccaaattggtacctccatcaccagctgctctctggggtccagatccacattgccaactccctaccacacgtctccaaccccagggtgcagaagaatctcatagacacaggtccaaactgacatttatcattttttcttacttctaatcattctcaattttctcttgtggtggaaggctcaccatctgtccagtcttacaagctagaagcatgaggctcatcttagattccttcctctcttacctcccacctccaatcaggctccaagctgtgttgatatgactgggaaatagcccccagagctttccatttccagaatttccatcttgctgcagccgtcagtgtttatcaccactggtttgcccacagctctttcaccagcttccttctctccttcctccggtttatcattaatgctgctgccaaagttttccaccaaaagattatgaatctgatggtgctagagatccataatcctttatctaaaacttggagtgttgcaaaagttcagaatctttcggatgaaagaaaatcaagattcaggacactgtgtaggccttgtagtgtactctgagccatcactctatcctgaaatgcaaaagagcacttacatgaagagggacaaataaagattacaaatagcgttcatgtaagtttagtgttcactgacaaatgagtttgtgccaaactcatgaaaaagtcttcgattgttggcttttagaattttaagataaaggttaatggattgtggagttgaaatctttttctagaaacttctgtcagcttctgactgtctcttttagcagcatttgaaaactggtgccttgcaactggtttatgacctacagacatgttgtatttggccatcatcatattttggggcatgcattcatgctcagtcatgtctgactctttgtgaccccttggactgtagcccacaaggcttctctgtccatggaatttcccagacaataatattgggtgtgggttgccatttcctactccagagtatcttcccagcccagggatctaacgggactctcttgtgtcttcagccttgacaggcagattctttcccactctgccacctgggaagccccatcatatttttaaacatcacttacttacagctttcaggagaacatgcaccaatagttcatcaagttgtcctggttttcaccggcacatattgtcttgacaacttatgacctcacacattcatgtagcgtggtctctaagttaatagtcagccacagtgaagcatgcaagggtgcctgcaaaacagattcccacattacttctccaggaccattccaa

SEQ ID NO: 46062 - DNA, 914 bp, Bovine  19866881014984
  misc_feature (1)..(1): n is a, c, g, or t
nttcatgtcctttgaatcagtgatgctatctaatcatctcacttcctgtcacccccttctcctctggcccctcaatctttctcagcattagggtcttttccagtgagttggcccttcgcatcaggtggtcaatactttaaatggtgtcaaaggaacagcataaaggcaagttctagaacactgagttctagcaactgacttcatgacccaactggaccctcactttcttgaggcctcagcatccgattaaaataattacaggttccataactgatctctgacacccaaaacacaacatctgcttatcagttccaaaatccatggggagatttaaatcccttctctgcaggactccagaactattcatggtttctaacaatcttttccttttctagctgtaggtaagaactttcagctaacattcctgccactttcaaattaaatcagattaaatcgcaggcatccagccttctataaaaaaatcaaattgttccgatatatctcactcccacagcacattagacagatgcagcacataaagtaaacagtctagttaagaagtgcgagttcattagttgtggggctgtcaggagcacccaagagctgtgataacacaacgcggttcccatcttagaagtcaagctaaatgctttccatttttatcacccaattcataaccttgctgtctggctttaagaatcaatagcctggtggttttggtatccaataaatttgtcttcatttggacgtttttcatttcccatgccacttgaagagagaggaataaggtaaattgttcctctcatgacatttgtttttttttttttaaatctataatttcacactgacacattccacaaaccagtgaaggcaaagacaggtaaagagagcagatagcagaggccccatcctga

SEQ ID NO: 46063 - DNA, 1179 bp, Bovine  19866881086488
  misc_feature (1)..(1): n is a, c, g, or t
ntgagctgagccctaatccgaatgattgcatgggtgctcagtcgctcagtcatgtctgagtccttgcgaccctgtggactatagtccgccaggctcctctgtccatgggatttttccaggtaagaatactggagtggatggccatttctttctccagggggccttccggatccagggatagaacctgcatatactgtgtctcctgcattgcaggcagatctttattactgagccaccaagtataatctgtgtccttttaaagggggagatctgaacacagggactcacacagagggaaaacgatgtgaaaacacaccgtgagaacatggtcatgtgacctgagtgatgcatctcaaagccaaggattgtcaaggactgtcggcaaacaccagaagttaggagaggcaagaaaggattgtcccccagagccaacacagagactgtggccctgctgacacctggggacagcttgattttggattctagccttcggaactgtgaaaccctgcacttgtgtcgttctaagcccctgagtttgcggtgctttgttacagcagccgtatgtagtccatacagtgtaggaaggtgcctcatccaagatgagccgtctaataacactgtgctcagtgaaaacttcttgctcctgggtcctgttctctcactgggatttactcttaataagtcagtctccaaatcagttaccaccatccacactggcatatgaaggggtgatgctatgtggatgggtttttcgaaacctcatcctcctcccaggtaacacatgtgcacttcaaacacatcctgtagcaaactgctttgcaaagcattgaagctttggaatttctggattgtaggcaagctaaattcaggtgggggattttttggtttctgacatgaaaagattaccattttgacaagctcctacctactctccacatccttttggctgtgatgttccattacaaacatcgacagaccagacaatgaacacacaagccatattaaaacaataattaatgctgggaaaagaacagtgacaactgcttagcagaagagaataatgggctggtttgtcatctgcggcgtttaaagaggctgagccctggatgcgaatggaaagtgatttctgatgcaataacggtccttcagggacctgggtcaaagtgactcattaagccc

SEQ ID NO: 46064 - DNA, 1595 bp, Bovine  19866881107391
  misc_feature (1)..(1): n is a, c, g, or t
ntatatgtgttagtatactgtattggtgtttttctttttggcttacttcattctgtataataggctccagttttatccacctcattagaactgattcaaatgtattctttttaatggctgcataatattccattgtgtatatgtaccacagctttcttatccattcatctgctgacagacatttctccaaagaagacatacagatggctaacaaacacatgaaaagatgctcaacattactcattatcagagaaatgcaaatcaaaaccacaatgaggtatcatttcatgccagtcagaatggctgcaatccaaaagtctacaagcaataaatgctggagagggtgtggagaaaaggggaaccctcttacactgttggtgggaatgcaaactagtacagccactatggagaaggtgtggagattccttaaaaaactggaaatagaactgccttatgacccagcaatcccattcctgggcatacacaccaaggatttttatttttattatattcgcttacttgcagatatgtttgctcatccttagcatgtgatccctccaatcaagatttctttcccaggattccagtgaaacgcagaggaaagcctggagacccaagcctgggagagtgggtccagtggtcctgattcagcccaggcctcatgttgccaaccacgttgaattaattatgtgtgtggaggtggaggggtggggtttgaggcagagtggcatttataaatgagttcttttcctttagattctggttagagaagtttcatttatttggaactatggaatgggagcagggagttttatggctcagggaagaaattttatcattccttctgtatcttgcttttgacttgtggaactcaccttcctcaagatagcaagaactatgtcttgtgtttaaccttttcacatctctaccagtgtatctcattgaatacttaacatcttccatcgaagcaggtatctttattttgcagatgtggggcctgcggttcagagactgacttgccccaggttacccagtttgaaagtggcagaaaggacttttcacaaataataggctttctgatgccaaaccatgagctctttctagggcttgctcctcagttttccacctatctgcccaattcttttggcacatcctcatgcgttcagcccagacagaaattcctgagtaggaagtttctctctgctgcagcttctacaatgcctgttaggagcaaatgcttggctttctcagatgctgtgcgaattcccacccactctttctgctgatggagtcagaggagccattttgctagcttaactagatgctatcatcataatacacaattgctaatttgcctctggagtctcctaacagcccgtttagtggaactcaggagctgccttccttttatctttttaatttttataaaacaaaatgcataagccaaagaagagaaccaaacttagatctgcttcagaaatgcctctcttctttggcttgttcttgtccctggcaattctgggccaagacagagtctcaatgtcttcctagagatagccaagaaaagacactctgataaaaatcgaagaggcagt

SEQ ID NO: 46065 - DNA, 1282 bp, Bovine  19866881125054
  misc_feature (1)..(1): n is a, c, g, or t
natatgctatggattggacctgagctgcagatgaaaagaaatgagtgaagaatgtcctcaaggatttgacctgatcaagtggagagacagttagtcttttccaagatgaatatgactgtgggaggagcaggtttgggacatgctaagtttaataagttactcattaaacatccaagtacaaatgtcaaggatgcagctggatactgagtctgaagttcaaaaaagtagtttagatgataaagaaattttggagtcatatccagtgtagaaaaatggaaaatacaggaaaacattttttaaaaaaggaaacatacagaacagatttataattgaaatgcaaggaactgcacatgtttaatgtctgtagtctgataggttagacatatgcaaacacctgtgataccatcaccacagtcaaggaaacagacacactcaacagtttgggatggaaatcctacgggatgtataggtgaggcttttcctacaacctagcagtaggaggatttttctcttggaagtacagactggcccaatcaatcataaagtattcattttgcttctcatttttccactgctccttgtaagtacagtttccttaagaaccgcacaggaaagaggtcactgggatgaggtaggatttaggtattcccaactttcttggcaataatgatatcagaactttgtcccatttgtaagagaaagaattcctaatgttacaaccacttatctgttacttgaatgttatcttcaacatcttcaaaaaacactgatgcaagctgtacatatacacctcctgtgacaaggatctctttatctcacaaagcccctctttccatctttccacacttatgaataaaatgttccttagtgtatcaaaccaagtctgacttccagtaacctccatctcatagtcctatttctacccctcggggctaaaatggaatgaatttaacaaacgtattccttttttttttttttttttttagtgtaacagctcttcaacttgcctacaattccctctagttatgtcaaggtctgataacccacgaaaaggagatattcccaagtgtcggcttcttctgtgtaattgacttttctgctcagtgctcagttcaggcaagccactgttgatctgctgctcttaagtcccctctgtgtacacagccaaatggagtgcaacagctagggtacaggtaatggcaatggatggatgtcaagggtcctgatacatctccatttcatttgttaagaaattgcccattcttagggccctaaaggagac

SEQ ID NO: 46066 - DNA, 1852 bp, Bovine  19866881151484
  misc_feature (1)..(1): n is a, c, g, or t
naactattttatgtatggagaatggataaatcacaggatcctactgtaaaccacagggaactatattcaatatcctatgataaaccataacggaaaagaatataaaaaagaatgcatatatattaatatatgctcagttgcatctgactctttgcaaatccaaggtctgtagcctgccaggctcctctgtcctctagttttccaggcaaatactggaatgagttgccatttcctacttcagtacacacactcatacatacacacacacacataattgaattactttgctgtacagcagaaattaacacaacattccaaataactatactccaattaaaaaacaaacaaacaaactgaaatcctttcctaatgactttgcgtctgtctcttaggcacccagcattgagtttactgtgtatccatttagtaaatattttcataggccaggcatcatgccaggtggtagggataacaagagtgataaaaaacagaagcctagctcttttggaccctacacttgagggaaggtagacatttacctgctcatcacacaaaggcatgaaagtttacactcagtggtgagtttacagaagaaacgtatgtgatcctccaagaagatataacaaagaaacccctatgagatgatgaaagcagagaaggtttcctcaagtacatagaggttcagcaaaataatagggaattaattagcaatggggaaagaacagactccctaatacgacagacagaagaaatacttgtgcaaaggcccccagcagaagggaaggagcacagtagcctggaaaatttagcaggtgagcagcggtgctaacaatactagaagttggaaggaggcaggagccagaaacacaactcagttaaggagtgcactctccatcctaaaagcactaggaaaccatcaaaggttttacacagaggacagggatggtgtgttgggctttcctgtgggaaagttgatttgttactgatgaagaatagattcagtaaaggagatgtaggcagataagaagggaagatacttgtctgggggaaaatctcacgtgcttagactatgatagtatcaggggagacggagacaagcttggacctcaaatggccagatatagagagagggaaagggacacattgaaggcagactcttagttccggatgagcagctaagtagatggtggtgctagatgtgaggaaggctcaggtcgggagagtgggcagatcatgatttaggtttgtcaagcagaattatgcataaattattatgcatcattctcatgaattatggaaaaattacattttacagaatgcctcatactcattgtccttattggattctgacaacttgcctcatgggatacaggactgtgggtgatagatgtttaagtggtagggaaatgaaatgcaggtgggagggactttgtgttgcaatcatcagtagaaggcagggtcaagggcaggactccggagaccatatccttcagaatacatcacatggcaattttctttttcttattttttaagccatgcagtcttcaaatggataaaaattcagtgtgcaggcttccctagtggtctagttgttaagaatctgcctcccaatgtaggggacaggggtttgatctccaggccgggaagattccacatgccaaggagcagctaagcccttgtgccacaactatggagcccacactttagagcccatgctccataacaagagaagccaccgcaatgagaagcccacgcaccccgacaaagagtcgctcctgctcgctgcaactggagaaagcaacgaaacaatgaagacccagtgtggccaaaagaaaaaaaagtgtgtaaaaat

SEQ ID NO: 46067 - DNA, 1443 bp, Bovine  19866881189448
  misc_feature (1)..(1): n is a, c, g, or t
ntatggatgtgagagttggactgtgaagaaagctgagcaccgaagaattggtgcttttgaactgtggtgttggagaagactcttgagagtcccttggactgcaaggagatctaaccagtccattctaaaggacatcggtcctgggtgttctttgaaaggactgatgatgaagcttaaactccaataccttggccacctcatgtgaagagttgactcattggaaaagactctgatgctgggaaggattgggggcaggaggtgaaggggacgacagaggatgaaatggctggatggcatcactgactcgacggacgtgagtttgagtgaactccaggagttggtgatggacaggggaggcctggcatgctgcaattcatggggtcgcaaagagttggacacgactgagcgactcaactgaactgactgatgtgacctcagacaaatgccctcagttccctgagccttagttttctcatctttcaaatggggacaatgatacctagttcatatgaatgttgtgtgattatttcaggcataaacctagctcttggtagctatgcggtaaatgctagctttgcttctccaacattaggagggagaaggaaaagcaagtaagggaaggtggtgatacaaaaggagagaagaagaacaggggtcaaagtggatggaaaatgtggcaagtgtcttcctggggattgtgacctctgtgctgtcttaagtatttttccccattctgcccacaagattttctgcaactgactgcatttggagttggaacatcaagcatttttgagcttttactgcagcaattaagggctcataaagccatttttatgagtgtataataaactgagctacatttggggttgccaaagtgaggtttctgtgtggggaactcgatgttaactacttgcagcctacaggaacctatgggagcatgctggatttgatttttggatcagcacggtccagtagaaatgtaatgggagccatgcgtttaatttcacattttccagtaaccacattaacaaagcacaaaaaggagaaattaattttaataatatatgttagttagaccaatgtatccaaagcattatcatttcaacattgaatcagcataaaatatttttgtttggttgatttttattaatttttactataatatagttgctttacaatgctgtgttagcttctactgcatagcaaaatgaatcagccagacatatacatatatctcctcccttttggatttccctcccatttaggacaccacacagctttgagtagagttctctgtgctatagagtactttctcatcagttttctgtcttattgtttggttgctgtttactgtttagttgctaagtcatctccaactctttaagaccccatgaactttagcccaccaggctcctctgtcccttgggatttcccaggcaagaa

SEQ ID NO: 46068 - DNA, 1203 bp, Bovine  19866881190201
  misc_feature (1)..(1): n is a, c, g, or t
nactcttcctatctctttggcttccatcctagtctccggaaattcaaagtactgtcccatatttttgacaattcccagggcctgtacattcctcatagctgcctttggcagaatttttggcttccttcttgtgcaggatatctcacccaccagtgtacagtcttggctccatacatggtcggcctatataggaactcagccacccacacactcatgcaccatacgcttatattaagctgtctttgtgttggttgatattactgaagatgtgtgtgaagaggaaagctgaggcatgatttagatctcaagagcatcatttcattcacttaaccatctttcccttcttaggaacaaatgagatttcctctcctttacatttgtttcttttatcttctgcagaagggcttatttccgcttagagttcctgccagcatcactgctttcagagtcccacctcctaccccaagaaacttcctaaagcatttcccttaaaaaagacagtttcatcctcaagaaaaatgctgctaccggctcctaagataatgcattttcactcccactctactttcaaagacttttgctttctaggagttgtacaacagactcagatccagtggcaccaactcagtgcgtgcatgtttgcctagtcgctcagtgctgtccaactctttgtgacacgatgaactgtagcctgccagactcctctgtccatggggattctccaggcaagaatactggagtggtgccaacttagatgcaagtagacagcatattaaaaagaagagacattactttgctgacaaaagtctgtctagtcaaaactacggtttttccagtagtcatgtatggatgtgagtgttggaccataaagaaacctgagcaccgaagaactgatccctttgaactgcggtgttcgaaaaggctacttgagagtctcttggactgcgaagagatcaaaccagtcaattctaaaggaaatcagtcctgaatattcattggaaggactgatgttgaagctgaaactcaatactttggccacctgatatgaagatctgactcactggaaaagaccctgatgctggaaaagatggaagataagaggagggggcaacagaggatgagatggttggatggcatcactgactcgatagacgagtttgagcaaggtctgtgacttggtaatggacagggaagcctggcatg

SEQ ID NO: 46069 - DNA, 1255 bp, Bovine  19866881252129
  misc_feature (1)..(1): n is a, c, g, or t
naagagggaagagaacaaaggggtggagtgggcagaaagagcccgaccttgacaaaggtaaccaagttgagggaccatccccatccggccaactgggtccctctagccaatgaggccagctctaggaaggggtccactgggctggtcctcccatagagcatccaacactctcctggactcatccagcaccacaaagccactgctgctgcacagaacaggggctcccacagaccctgcctcggaacctcttcaaagcatgaggatcccttcctagcttcagaagttgcattacagctgatgaagcatcaggccccacagcccttgcctggggagcacccagctcgactgtgcagccctggcagttgcacgcatcaccctttggctcgagagcagagtaaatttgctgtggacgttaccaagagaaaataaatactgaaactccacaaggactccatgcaaaggctttccaaagtccagccacgtgctgtaagcagatgtggagtcggccccgactgcaaaatctgaattcaattgacatattcagggaggaggggaggaggagattaggttgctggtcaggaagaacggtttcatacctttctaaaagatgggaggaagggggaattaaaaatagatttgttgtcgccgtaacactgcaagccacacacacgacattgatcagagagaatccacgtggctgagtattggacatggaggtaccagtggactcatttctcacccacaaatattgactgtgcagtaagaaagcctgcgagtccaagactggatcatggaccttcataggccatgagtgggcgagtcagcaagcaaaatccatgcctctcagctcacatccacccatcgcccatacacactcagacacaaaaactgaccaagccccccagtcacctctcctaagcttcccagtgtgtcctggcccactcctaacaagcatgggcaaaggccacgactcctcttaacagtgaacctggcccaactctctgggccagcctcttgatggttcttatatggacacaatgggaggcctttaaggaaccagggagagagagggtctaggagggacccacactgttcatcttcaggtagcaccaagaatctgagggagcaggcttcttccttcctctgcacccacatcccttcttctgtgtcttagtttctgtcacacacctttaaaggcaagcatctcccttatcccagtaattcattccttaaataaaatgtcctagtcacaaag

SEQ ID NO: 46070 - DNA, 1218 bp, Bovine  19866881295608
  misc_feature (1)..(1): n is a, c, g, or t
ncagtgcatctccagctttcaaaatcctgtgaagcttaaatgaaggcatttctctgctaagagattttcatttgttattgagaggtacccctgatgtgcttgggctgtctcagaacctcatttcttcataatggacagcctagggttataaatatacaggaaagacgttttccctccccaagctcatgtggttacaggtgatttccttgcagtctcctttgttccaggatatatttttttctgatccactattttacccacagtgtaacctcttgagggttccaggtttatgcagagtttcatttgcaacttctacttttaaaaagtcaaaggccttgttttcttctgtgacagctactaaagctcaagcttcttgcttaataagcatggcaaatgctctcacagttgatctacatgagtgtaacttacaatttgaattacatctccctctgtttcaggtccctggggatttctccttctttctcagaagctcagctatgcatttaaaagaatgcttgcaacattttatctatcatttccaagtattttttcctcattcaggagctttccaaaaaccttctcagatagccagaaatagagatgttctgattgctttctgtattttaaataaacatcagaattatggttcgcttatgacattctcttatgttttccagtgctgttaagtatttactatcttttacaatattttttccatcattcaaagagatttttatgcaaaaggtattaaaaaaaagtgaattcagtctaccatcttgatccaatttttataatgggtcttgaagattaagagggtatttgccagatagaaacagagaccaaggcaatgcagttatgaaaacacagagagacaagatgaatctaaaagttagataggtttagaggatattactaataaaaagagccttgtgacttccttggcggtccaaaggttgaggcttcacctccagatgcaggaggtatgggtttaatcctgatcagaaagctaccatctcacatgcctggggccaaaagaccaaagataaaacagaggcaatattgtaacaaaattcaataaaaattttaaaaagattttttaaatgtgttacctggtattataggagtctagaatctgccatataattcagcaaaaccacctactatttatttattacttactaggtggtaggcactgtaccagagattttacatagggta

SEQ ID NO: 46071 - DNA, 1362 bp, Bovine  19866881345693
  misc_feature (1)..(1): n is a, c, g, or t
ncctcttacatgaagggggacatatctgtccccatgtacacatctgtccccatgtacacatctgtcccctgtacatgaagatggtcttccaacctgattctctgctctcacttgttctgtgagatgtggtggaatattgtgaaaagcagaaggagattggaggtagacagaaaggactttgatcctcaagactgacatttagtaaactgagagatttggggcgagtgatttaaccattctgagcatctgttgtctcacaggtaaaatggaaataatgataaacaaccttgcaatattgttagaaaatttctataaaactcaaggcacagagtaggaactcaatagatggtgattattgtcatgattatccctgtgagtagctgtaaggaatgaaaacggctgaggtctaaaattaaaaaattaaagatgagcctaaaggagttgaatctagggaactaaagaaaaaaaaaaaaagggtcaacattggggtcaaaatcaagattcagacccgctggtgagaaacaggagacctgtcagaaacagaagcacagaacagagagaagataagaggccccaccttcagaagatacaaacttgagatcaagtcatgcctcagcccttgcattcttgtacttttccttctggggcagaagtctacccatcagctcagttcccctgtgatctgaggctggcccaatggccagagggagcaggtgtctggaacatagatggaagattctggtgttctttctgggatgttgaagttattgacctattcacactgagcccctactacctaccagtgactctgggtgtagcctgtatgctctatttaccttctctacttcttctctcatccctaagaaatggattgggatgagacttcagttacctttcaaagactgggtgggtgactacagagaacaactggtggcctccagctcatttcctcccccttgccagttgtctgcattcctcttcccatctccagtggtgggaggtggttggattatagttatttcctaggaattacagctgtggagatgacaagatggctaagaagtaggtctacctggcacaattcaccctttttgggtagatatttatgatgccagggatgaaagaaagagctcatgaactcacaaaatacagaagttgcaaactaaactgcctcacctcaatcctatgtgcccttgtccctgggagacaaggtacccaagccagagggatgcactctcccaggtgtccaccaaccagtacatgcattcttctgtgggtacaggactgatgttgtcacaagggaatgagcttcaagacattcattcagggttggcaggtaaaaagtcatctctcttcttctag

SEQ ID NO: 46072 - DNA, 1681 bp, Bovine  19866881389606
  misc_feature (1)..(1): n is a, c, g, or t
ngggtgccctgctgtgaagtcctcttgtgttatttaccatcaaattttgtattttaaatttaagtacatttgacctcgggggcttccctggtggctcagacaataaacaatctgcctgcaatgcaggagacccaggtttgatccctgggtggggaagatcccatggagaagggaatggttacccattccagtattcttgcctggaaagataagaggagccaggcgggctacagtccatgaggtcgcaaagagtcagacacgactgagtgactaacacagctgacttacaatgctgtgttagtttctactgtacagcaaagtgactcacttatacatgtatttgcattcttttattaaaaaaaataaacatgtatttgaccacactggatcttagttgcagcatgtgggatctagttccctgatcagggatcaaatccaggccccctgcattgggagcctggagtcttagccattggatcaccagggaaattcctctttttaatgttcttttccattatagtttatcccaggacattgaatatagttccctgtgttactgagtaggaccttgctgtccatcggttctaaacataatagtttgcatctactaacctcaaactcccagttcattcttcccaatccccttccccatcttgggtccttttgaaagaatgccagccttttggtcacctaaactggagagctactgtaggagttaacacgaggccattatttgtgaagctgtaagcaatcccaaggctgtaaatagagatggacctattttgccttccgtagtctatgcaacagagaggaggtgggggcagaggaaagatacacacacgatgataaaaggggtcaggaaggctcagctgccagactcccaccaggcaggagaagggaagaatggggggaatcagaacctttgtctgccatcaacagaatattcagaggctggttggaagcagcagtctccagggggacctagaaatggttaactcacagtttctctcctgatgagtagcttcagctgctcatcaatagaatctccagctgataattattaagtgaaactgggggcttgtatttgcatatgtaaagcatacttccctctgaagccacaatgggagggagaagcacttcctgattgtgcagccctggggaggctggggccgggcggggctccagcctgctttgtacgtgcttctccatactcatcaagccagatactcagcagaaataaaccccacatctcaaaatgcgcctttgtcaaaatccccagctcggataagagacctccctctcagctctggtgaagaggcagtctactgtggtaggtgtctgtaaggcctgagattacccaatctggtacatgtgggcaggcacacacacacctgggttattgtacaggatgatggagcggttattagtttctccaaaaagaaggcttttatcctcctcacatatttgacacttttcaatcttggcacctgtcgattaagaagcttcagccccaaagaagcaagaaggaaacgcaaacagcatcaaattccaagtatctgatggctcatctctgttatgacatttatcttggcttgcgaggaggaaagttactgagcttgtctctcctcccacgggaaaagatggcacacagaaaaaagccttcattcccaggagtatagcg

SEQ ID NO: 46073 - DNA, 708 bp, Bovine  19866881477844
  misc_feature (1)..(1): n is a, c, g, or t
ntctatttatttctcgcaacaacccttataatcaatgctattatgatcccattttgcagatgtgaaacctgagatgagagactgagacaagagacaatttggccagaacctccgggttagaaaggggtggaaacaggaaggaagcccctcagcctcgccctaggtctgggttttaaccaacacatagcactgtgtaaaaccccttgctgattggtgaaatcggtggggtgtaaccctctgttggcctgaaagagtgtttgcatttattgctgccagttgcctcaggcactgtcagtcctgattactttgaattaaattctccgtttgatgtttattggagtaacaggtagcctgagtatggtagagcttacagaatgggtgctcattctcaaggctccctgcctgtgtccagccacagtcccccgccaggtttaaggaccaggtgtttcctgtcttttctctcccggatggtggagtttatttctagatcacctttatgcagggagtagtctttcaggtcctagctttatacagtgccctctctccttactagggcagaccatgatccctgtcttctctcttctgcaccccagccacggcaatgaaagcagagttcaaggactgcttccctcagggcaacagttggtttcaggaattacttatagtctaattgtccaactttgctttgctcttaatgttttgtagttt

SEQ ID NO: 46074 - DNA, 1627 bp, Bovine  19866881514698
  misc_feature (1)..(1): n is a, c, g, or t
ngattttgcccattgaattccttagatttttttttttttttttttttgaaggttacttagatttttattccctcttcatgtgcagtgtttctggaaaatctgcacatcttgaacacccatgaagaatcatttctaatatctgatgctaatgaaaggacagcccctgtgctgatgagagatggctgaacacagcagtgtttggaatgtaaacctctggctggtcttttgagtggtaaccagccaaccatggagggtatattcccaactggcatcctacagatgttaactgactgcccctagcatgcaaagaaggagtaacacatacatactacactgtcagcacagaggtattttgaatcacaagcaatacaacaagaagtcatggtgatttaagtttttaaatatttttaaatgataaaagcaatgcatgctccttatatactatttaggaaaaatatgtgttcgtatttgttgaaattacccatatgctatacccagcgataacttcccaaaacatacctttttcatatctatagctatgatagtatttatacatttataaacagtttatcacattggatgaaggatacttgcaatcacatttaatgttcaactttgaatcctacttttgtggctaaacagatcatgatcatttttctggcacatacagtgtattttgtagatttgaatttaattggttaagatagatgggagaagacaaatggagtagatacttaggaggagtgttggccaagagattggatttggatttgagagaggggtatttaaagatgactcttagacacctgggttaataagtgaggccttctcccttcccccaggcaagaacagtttagagactggttttctagttaatacatgaatatttgcatatgcttgggatgtaatttgcagcccacctctgtttttccccttcctttcttcttcttgtgttgattccagtattaacttcctggaggaacctctgatataaattgagatttttctttaaaatgtgtttttggtgcacagaggtgtcatttaaaagtcaaattcatgaaggaatattttttacctgctgggtttaatttcagatgccagtgttatcataaaatgcaaaccaccctagacttggttctaaaactttgtacaaattgtgccagttgaaattaacttctgcagatggagagaggagaggacgaaaataagtgttataaagagtcttaaaaaatgttatttaaatattaatgccacttgagttccgctccatatatgttccatcttttccctaagtatcaacttttctatagctttccaattatatttttgtctatttaacctttttgtgtgtgtgtgtgtgtgcaatgggagcaaacaatggtgatatgtttgaccctgggaaagaaaataatcataagattcaagatgaaggatttaggtttgatcagaaagaaaatgccccccagcagagttgatagaatgaattatttaaggagagcaaagcttgaggtgtctctgccccagatgtgtgtaacctttggtgagttaattcatctttctggattttagtattctcatccataaaatggggaggaaaaatagtattaatacctacctcaggttattt

SEQ ID NO: 46075 - DNA, 725 bp, Bovine  19866881529153
  misc_feature (1)..(1): n is a, c, g, or t
ncggatccgatcctccctcttgaagtgtctggtcaggtggctcatcttccgcctccattctgcctcccaaagctccaaattggagtcaggggcccagaaaggctgattactgaagcccagaatctgcaactcaggttttctttctcctctgttgactctcttgagaacatgtgtgctgtagggttccatctgcttctgtaataaaacataaattattaaaaccataaaatattgatgaactattttataaaacagagggactttaatgtattgattatgaattaagaatgccttaatgagcttcagaaggagaaataattgggaaataacagggagttgatttcctcctgtgtccccaaatgataagcagttttgaggtgatgttgccctcatcccatttggcatcactgtcagctagcatttttgccacggtggctttaaaacctacactttccatggacgttaaatgccacccaaagacaaagagaaggaggagggaagaaaaccttcttattgaatagcagtaaagtattctggttggaaatttacttgtttttgtttatctccttgggtagttccacagaggaaactggtccacagaggagaagtattttgttcaagatctcacagttaactggggtcaggagttggcctggcactcagctcccatgactgttgtatgagtggattctgctataccccacatcctcagggactcttgaatg

SEQ ID NO: 46076 - DNA, 1046 bp, Bovine  19866881535455
  misc_feature (1)..(1): n is a, c, g, or t
ntgagggcaagtggagaagggagtgacagaggatgagatggttggatggcatcactggctcaatggacatcagtttgaacaaactcggggagatagtgatggacagagaagcctggcatgctgcagtccacgggatcacaaagagtctgacatgacttagtgactgaacaacaacaataatttcacttcattcatctctcacatgccatccagactacaagcccctaaaggggaacagcttactgcttttatctctgtacccctgatattcagagatcctggcagaatgtttgcatttaaattttggttgaacacctgagtggatgaacaaataaaatccacacagcattaagcagtagacctgcactgtttaattcctggtctaggactctatagtatgaagcaactctatatttaatacaccccatattcctgaagatgactctacggcagaatcacagaaatgcagtgaatagtttacaacctgcaacacactcagcaactcaaatgacaacattaatttaatgaacttaaacactggtgacctctttaacacatccaaagttatttatgttgggatatgcatgcccgaagactgcttaccaaagagagactcaaatagaggtgacacatctatctttcaaatgttaatttgcatttttaactttgatacaaagaacttagctcttctcttttggaaccaagaaagattagctgactttttgatccatccatccatccttcctgtatgacatatataccattaagccttaggaattcaaacaggtcatccctaccatcacagtctattcagaggcacacacagaattaactataatgtaatgtgttaagtataatagtcaaatgataaagagctacaagtagtaaatggtttgttggagaaaactattcatgaagatggtacacatccatttcctggggccgctataagaaagtagcacaaacaggatggcacagacaacagaaatgccttccctctcatttctgcaggcggatgtccaagagaagatgccagcagggtggtt

SEQ ID NO: 46077 - DNA, 1259 bp, Bovine  19866881551932
  misc_feature (1)..(1): n is a, c, g, or t
ncacttcctgagttctttttcttcccccacgttgccacaggggcaactggggagtgagtagtggcagtccacgtggtggtaacttcatgggcaaaagcttagaagcagggaagttgtgggtctgggacacagcatcctgatttacttgattcagacggtctcagggtgggggagtcatgagaagcaagtgctggaggtgggaaggggcccctgtaaagagctcagagttggtggcagaggaaatagggatccttgctggacatttgagcaggggaatggtgcctatctgttaggaccagggaggatccatgcaggaaaagtctggaatctggtgggtcaggtggctggtggctgagccctgagaccccagataagatggacaggaagaagtgattctcaggaacctgggggaagtgtctctgtggagctcgtacagagcacatgctctgcctttaatcagagacaaatgggtgctgatgacctctggccatgcatgcaaaccccactctgcacagccccaagtgatttgatgcctgctaatgaggttttctggagggctgttgaagatcattaaaagcagtttttgcaaactcaatattagtttttaagtagttagcaagggtaagcccttcctgctcagtgtcaaccaaagcgagtgatgagttgccatttaggaagcagaagggggcaatggtacgccctcaggtctcatggacggcaggggtgcttccaaatcaattctttcccacttatttccatttgagtcacaaaatgttttttgaacactctctcattactagaactgtgctaatcattaaagaattaatagtgatgatagtaataacagtaattataaaaatagaaatttattaagcatctactatagattaggaactgtgcttttaacaagaacaaaatactcacactaatcctgcaactcagctgcaaagtattagcaaccccatttatacatgaggattttgaaactgaaataaagcaaaattgagatcctttgactctcacaatctaagggaacaaatgcttaaacaaatgaatgtcatatcatataagacttagaaagtagcaagagtataaattgccaacactgtcctgtcccatgagtaggacactcttttgttgttcttgtttctttgctaagtcgtgtccgactcttttctgacaatgtgaactgcagcccgccaggcttcctcggtccatgggatttcccaagcaagaatactggaatgggttgccattgc

SEQ ID NO: 46078 - DNA, 1118 bp, Bovine  19866881584252
  misc_feature (1)..(1): n is a, c, g, or t
ncccaatttgttcttgtttacaaatacttttaagttgtttgtcaaacaaaatgattctgtctgccagatgagatcccaatttcctaagctcattaccagctgatgaacagaaagggtcaccctgatgatttagtaatttggccctgctgctaagtcacttcagttgtgtctgaccctgtgcgacccatagacagcagcccaccaggctcccccgtccctaggattctccaggcaagaacactggagtgggttgtcatttccttctccaatgcatgaaagtgaaaagtgaaaatgaagtcgctcagtcgtgtctgactcttagcgaccccatggactgcagcctaccaggctcctccgtccatgggattttccaggccagagtactggagtggggtgccatttggcgctgactcttgtcaaagacacttaaaaaaaaaagtccaagctgtcaggagagaaaggaaatgctgctgctaggtcgcttcagtcgtgtctgactctgtgcaaccccatagacagctcaccagggtcctctgtccctgggattctccaggcaagaatactggagtgggttgccatttccttctccaaaggaaatgctatttaatccattttgtgcactatttttgtgcaaacaaagagtagatatttacaggcatgagatattaagtctccacaaccagggcaggacgatgaagaaacacaagaaaggagaaagacagagaatgtttaaaatgccccgagttggaagccatagtcagttcagttcagttcagtcactcagttgtgtctgactctttttgaccctatggactgcagcacaccaggcctccctgtccatcaccaacacctggaatctactcaaactcatgtccattgagttggtgatgccatccaaccatctcatcctctgtcacctgccggggtccagccccagtggatccagggaattcgaagcggggatggcatcggtgaactggatacaatagctttaattaaatattaatcagagacataaagagtaatagaataaggatagctcagtaggaaaattcagcagagaaaagaggctgaataacttggtttatgtggaaagccaataaaattccagacaagga

SEQ ID NO: 46079 - DNA, 554 bp, Bovine  19866881587006
  misc_feature (1)..(1): n is a, c, g, or t
ntacacctagtactgcatagtgtcatgtgctgcctcagccgcaggtttctgttataacttttgagccttgaggaaatcctgtctttgtgcattcagggtgtccctttctgcttttgtatagtattggcaaagcattctcatcccttcccccacttccctccacgcccccatctttggccctcagtgattctgtattaatagaagcgattaagcccgcctcatctcatcagggaggagatattaatcttcatcaggcccaggaaggggctgcctttttttccccctgctctcgcctcctctccctggactccctccatgagctcagagactactccagtgtctgtggggagctttctaatctgcttctgcagatgcctttcagggggtcacttccctgctcacctcccttagcctcccggtatccaagcatcacacactgtaattgaagaccactgttggaggatggagggaagggaaaaaatgttccctcaaatggaaactcccagcttcattgtcctcgctgctgctagggaaattagagcagggcaatacca

SEQ ID NO: 46080 - DNA, 736 bp, Bovine  19866881626539
  misc_feature (1)..(1): n is a, c, g, or t
nctagataagtcagcacatttagaagaatctaggtgaatgacagtgccatttcaaactttattttgtacgaaatagtggaaagaatggggctatttaccctggagaaagagaggctccaggtgtatatgaccagcttcagcaaacaatcaaatggccaccatctgaaatagagattgggcttactctgacagtccctgaatctatggagggatgtggcagggagccagatatcaagatcatcataataagggtcattctgtccagtgctgggatgagagggaaggagccctgggagggagagatgagaggtgtgcagacagaagggtgatcatcaaggcagttgcacagggggaactgcctgcctggtcctaacccagagatcctgagactctagaaaagcctgaatgtttattcagaaacaaaaatttcctccttggagttcttgccagttgccgcaggcatcagtacacttccaaaagggcctgcagagacattcttttctctgtagttaaacataacaactttgaaatccatttattgacacccttgagttttctgtctcgaggcaagtggaaccataaataagggacagagttgctgcctgaattcggagttttatgtgggtttatttatttctcaaccctgtcctaatttcgatggatgatctcctgagagcagagcctagaactcttcctggagatgtggatgcttttagatagaatatgattttggagt

SEQ ID NO: 46081 - DNA, 1743 bp, Bovine  19866881714382
  misc_feature (1)..(1): n is a, c, g, or t
ntagcgtctcaatgagacatctgaaagtcaggattctctttgctaaatgcaagaagaatctgcatcttccacccttcatgggtgggcttcgccctttccaaaaggcaagagtctgttctttgggacccaggaggatggcacagctgttcagattgtttttcatgtgcctcccaaaagcttgtcaggtggggcaagagttgctcccagctaatcgttactgtaaaacctggtggatacatgtttgtttatcaaagatctcctttggacttcctctcagttctgaagctgggaaggttcagacaagagactactgactgattttgatgtaaacatgcctgtacctctgaattcatgtgagggtatttgccccggaaatggttatctcatttacctgtccacttactcccaatgcttatttccctttatcattgctcagaggctctgtgaaagtgttagttgcacagttgtgtctgactttttgtgaccccatggactgtagcctgcaagctcctctgtccatgtaattctccaggcaagaatactggagtgggtaccccttccattctccaggggatcttcccaacccagggactgaacctgagccttctgcattgcagacagattatttaccttctgagccactagagaaactcggtgttcagaggctccatggaaatcccattttttgacagtagcctggagaatgtggtttcgggtggcccagctgggaaccgtgaatagctccagactggaatggaatatccttggtttggagtccctgtgtattagtctgctagggctgccatgatacagtgccacaaactgagtggctcaaacaaacgaaatgtattgtcttaacatttctggaggccagaagtccaaaatccagatatgagtaagtccgtgctccatcacaggtgctagtgaaggtctgtctagggtctccctctggtcatccctcagcttgtggctgcatcactctggtcttttacagccttctcttgcctgcatgcttctttgcagatttcccattttctaagaacaccagtcatactggaataggggcccactctgctgcagggtgacctcatcttagctagttacctacaactaccctgtttccaaggttagtgtgtcaaagtacaaacttgggggatacgtgggccaacccattacagcctgtaaccagccagtggctgtacatggatcggttcctacattcattgttcagtcggtgaagacctgagaaatttgtgccaggtgctgttctagacattggaggtaaccagtcagcgaaacagacttcttgatctcaggaagtttacttcatgatgggaaagacagacttctaaaacaatatatttatttttagggtctttagttgtggcatgtggggtctagttccctgaccagggctagaatcgtggacccttgcattgggagcacagtctcagccactagaccaccggggaagtcctgggaaagacgaatactaaattttaaaaatataatggcaaatcgtggtatgttctaaggaaaaataggaaggcagataaccagtggcacttggcatgggaggctgtttgagacagagtgctcaaggcaagtgtcttggacctgcagacatgtggaccaagtttcactgaagtcaggagtaagccatggagaaatctcgagaacgagtgtcttcgagacaagtgctcattgtacgttcattaatagtatgtgtagagtcatttcaag

SEQ ID NO: 46082 - DNA, 731 bp, Bovine  19866881963467
  misc_feature (1)..(1): n is a, c, g, or t
ncatcctctttcctttgtctctcttactttttggactccccccaaatatgtttctccttccctttttgtttattttttccccagagattcccccttccctttttgtctccctaaatctctcctcctagccctctgcgccatgcctgttttttgggggtttttttctcctttctttccctcatctctgtctcatctcagtggttttttcctgtcttgatatttgccaaactaaatcctgaaattccagcagggtttgaagtcggcccccagatgcacagcatgacatgagccccaggatctgtggggcctcccacggcatgatggacaggagcagaggatggagcatggctgcttgagcgtcatccgggctcactctgtatttgctcctgttagaggaaatggaccacatgctgacggcggtcactgccacatgactgtggctgaggatttcatctccccaaatcagaaaagttccagaatgaatttttgcgttcctcataacttaaccaggcacatgcgcatgcacacacatatataaaggaggtatgtttgtcagcccatacagtaatacacggttctaagtaggaacacagtaggaagagagatggttactgtgggatctgtaatttttaatttactgacttggaggctctaaaccagggcctggtgcttaatgtagtgttcttacattggatggaaaggcataaaatcttacaaaacgcagaccagtg

SEQ ID NO: 46083 - DNA, 1669 bp, Bovine  19866880353682
  misc_feature (1)..(1): n is a, c, g, or t
ncgggcaagtgcagtttcacagtgagacccgggtttcctgcttccaaccaattaatcatcccaatggcatgatccacaaataaaaatactggatgtggtcaccttttaaagaaacaaagtttaattggtcagtgactgatcgattcacaattccgggcttgtaacaactagcctgacttagcatgcattaaaaacagtgagcaggatattgagagtgccacctaaagtgaaaaatggatagttgtgtccctgtgacaaggaagatattatgaaactgggtcaggaatttagagcaacacattagacacaggaacccagtcaaaagtctctccttcagtcacgaaggtccttttccacacagctgccctgtttccaaactgtgcaaattataaacacatcgtgactaacttacccagtctgccctgacgagatgaacaggtaaattctgtggaaatcgagaaaggatatttttgttcacgttctagtttttactgtgtgtggtccactagctcatggagtgtttattcaaatagttgttttcactttcttcctcctctttcctcttctttaccctgggccacagacctcaagggccccaaccagaagggctcgtttgtgggacaggaggagcagggctgggatacaggaggcagagagacaggacaagcctggctacagccactgaggatgtgatatcctgtcccatgggcaaccagagcgcttagacgtcacgggaggggagtggtggggatgggagggcgaatcatctctagtgagtacctctcctccatctctcagacctcaggatggagactgcctggttctggtccacaggggaccatggagctgtctcctcggagggcaggcagattgaatgggacggtggggagcttgaacttggcagatgacttggagcggggtggacagagcaacttaagagaggctttggaagcagaatcaacaggtctgtagacagactgcattgtgggcaaggggggttggtgagttataggtaagtcactctcttctaacagacctcctctcccttgctctgtttgtggggccccctcagtggaaagaagcttcccagtggttcagcagtaaggaatccgcccacaatgcaggagacacaggttccatccctgggtaggggaggtcacttgaaggaaggcatggcaacctactccagtattcttgcctggagaatcccatggacagaggagcctggcaggtaacagtccatggggtcgcaaagagtcagacatgaccaaagcaacttagcatgcatgcatggcatcggtggaaagaggtgcaacttggatgtaagatgtggatgtggggcccacctttccatgtaagacctaacgtcttacatcgatttttagcatgaggacccaactttagatcgaacacaggatcaaatccttcttatcattaaaagaaaatactttttaaacgattcacaacaataaagccctctgttttcatctgctatcaccatgcctgtttctcagaaggttttgaaactgaaatttcaaaatatcctgagtaataagactctcttctgttactgaccacatggaagcaaaaataatgagagggctgagaatcagcatgtttacagaccaattcttaaaaaataagattaagtatttgatgttttgaagct

SEQ ID NO: 46084 - DNA, 2677 bp, Bovine  19866880482318
  misc_feature (1)..(1): n is a, c, g, or t
nctctgatgtgtttttaggcattaagcactatgactaggcactgggctatatcgattctatacctaggtttacactcaggccttagacttgatggagactagatatttctagtccccaggaatctacattgtatttcttctggtacagcataaatttgaacccacatataaatggacaataattactagcaaaactgagtgacaaaatcaaaagttctcaataaggctctgcaatcataataatgtgtcagaaacattaaaatgtgtttccatatataaaaatgagtatggaagtgagggttgaggacattttaggacatttcttgaatccacaatcttaagttattaaattttgacaagttcaaatacaagtcaaaaccttaaaatttattgtgatttatttccaatcattttcacagagcaccatttgaattattatgtttgaagcttattaaagacaaatgaatggcacatttatagtctatataaatgcacagcctctttcgggaaacagaaaatccacagtaattctttgtcacagacttcgtttctgagctgaaggtgagagctggccaggatgattgatcaaagtgaccaaagatgctggtgaagttcagggcaggtagacaagtgtctcctgttgtctagaaacacctgcaaatgtctaaactgtgctggtcctggttctcagatgctgtttcttcctctttctgcattaggaattcctatgacctggttaagcaaatactcagtggaaggacagtccaatatttcatgatgaaatgcaggggaaaataatactcaccttgtctttctatgactaatgcaaaaatctaatcattccctccattccatgacccacactgggtttaaacagctagtctgtctgccaggtaaaaagacttaatgtccctcttgagaagaaattaactgctaaaacagactcaggtgaaacggagttctgtcttctgtcctcaatgccaccatttttctctttgaatctggctcttccgttcaagtagaatgaaaacttggatttttgccttgagcaaattttacttcctaggctcaaattctgggactctgtttaattgcagaggtgagtttgccttgtagcaactctgaaatcactcttaaattcaccatttaagagcaggagggggctgaagtggtattccacttccttagttctgtgttgctcctgagggaaccccctgcctgtttttcttattcaacacaactttactggattagttaacactgaaaagttaacaagacccaggcactgagtagtagcaaaccaaatggactcaggagtatgacttgggcttctctagccagcatggctctgcttctgatcctggggtatcaggaaggaggaagctgggttctaaaaaactagaaatgtttgtttactaaacaagattataaaacaaagttaaaaaaccaaaacaaaaaagtaaacccgatgtattaataagaaacagaacaaaaaagatattatttcaatccaactgcattctagaaaaagtaaagctattaataggataatagttcagcagtttccatgagtttggagaatgggtgaagcattgcaagggtgaaccttgggggatattttacaccagtgaaactattctatatgatgatgtaattttggatacatgatgcatttacagcactaagtgtgatcccaacacagctaatttttaaaaattgttcaggagtttggcagatacaggatagaatgcaaaatgagggagaaaaagaatctaactctacaaatgtatgaaacaatttcactgaggggagtggagagggaaagatgctgacctcagcaactctggaaatgtgtggactccgtgagactgaaggcaaaggaaacgacacataagtgctgtactccggttgatgcagtactttcacacaggggtccaagttaacaattctgatgctgctatgcatgtttactgaaagcaaacacacgattgaatatgaacggtgatgatggaagtcagctttctctccataagatttaaagtttacaggtaagcggggagaggaggttgtaatgatccatgttgtaataaaccaaagccagagacttaagcatgaagtcagatttagcttaatatggctacatgtacaaatatgtataaatatgtatgtgtaaacagttagtatacatacgtatgtttccggcctctgtcatctcagtggacctagaagtaacaacacagcgtagcagtgaacacattttccaataaaaggaagtgattcttgggggaattactggtttgtggactgaatcaagaaacacatgagtgaagtatctggtagtgccataaagtaaggagtgtccaaaataaaataagagatggaagtaggtcaaaggaacgcagaatccaacctacagagctcccagttaccaaagctggaaaaatttacacaaaaaataagtaatgtactactggatttacaataactcaaagcataaaataaatgtctgtgagtctattttgataaaagtattgtgtgcttagtcattcaatcatgtctgactcttggatggtctatgggctgtagcctgccaggcttctctgtccatggggattctccaggcaagaatactgaagtggattgccatgccttagtccaggggatcttcccaacccag

SEQ ID NO: 46085 - DNA, 2277 bp, Bovine  19866880589819
  misc_feature (1)..(1): n is a, c, g, or t
ntcaggagggtgagaccagtggccttgctccccagcgcctgtgttctgacaatggccccaggggatgttaggtgagaatatgtggcagttgctttccgtgccattaaactcataagcctaagaatgttcacagcatactccactcatacgtattgactctcaaataaataaagcaagccatattctatttttcaaatacacgagcaatttaaatcaagagtaaacttttcacagcagtttagtttacaattttaatgttctgttgtgatgattcatttctcttcctcctcgatttaaacgaaaaaaaaaaaaaaaaagaacatatatgatttcaaaggttttaggtatatgactgatccactcactttagttcaccaacacaataagacacagaattgtattgtatggatcattgacatggccgatgatactgcctcctgtggagttattgtgacccatcttgtcgatggtagcttcctcattttaaaagcaatgccctctatgtggtcgctgatccaaaatgtgtctcaaagaacaatagagaaccatggattgattctgacttttttattccattgtgatcatcagaaatgtctaaaagtcaactcatcctattagaatttcacagcctataatagatatacattttgaagcagctctgtttaaactcattttattcagtttttccttaaatgcacatgacaaaactaaatagagaatagctgttatttaatacataagtgtttaatgtgatactcaattctccaggttaaaagatcaacaaccacagcaagaaaaacaagccagtgtttctcaatttatgttatcaaatactaaatcatcatctacattagttggcatgctaataattttcactcagtttggaaactttgcatcagtggttcaccaaagcagcagcagagacctgttaaagtttaaattcttgggccccatgccaagatgctggggtttcctaggtggtgctagtggtaaagaatctgtctgctaaagcgagagacttgagttcgatctctgggttgggaagatctcctggagtgggaaatggcaacctgctccagtattcttgcctggaaaagcccatggactgagtagcttcaggctactcagttgcaaagagtcagaaacgactgaagtgactaaacacatcctaagacgtacttaaatcagaaacccatcaaactatgttttcataaggtccctagtacttctgctgagtccccacttgctccacgtggagatcaagtttagactggtatgcactagcaggatttgctaaaatagttgtatctttagtgaaaacatatggttgcaagcactctacaattgttctgatgccaatctttagaagtcagacataaaatgcattgcttaactaattatcaaattaaaaaaaataaaatcttctctagctttcttcttccctacagcaaatgggatagttagcttcagctcacctccctcattccacaaagattatccaatatcattcggcctggttctacctggatatagtttgttgattggcggtatttggactgttagtggaaacatcatactataagaatattgtgcaaatatatgtaataaggtattttttctctgggtgtctccagcctgcaactgtatccaccttgctcatttcctgctattgttgtcgtttagtcactgtcgcacctacatcttttgtgtccctatgagctattgcctatgaggcttctctgtccatgggatttcgcaggcaagaatactggaatgtgttgccatttcctttcccaggggatcttcccgatccaggaatccaacctgagtctcttgctttggcaggcggattctttactattgacccaccagggaagcctactcacttcctgtatgcttctaattttctaggctctccaattatgaaattatgttaagctctatttttttctctacaattgtatgttttggaagcttttatttccattaactcaaaacggtaagtcacattccctctgcgttctagaaagagacacgctcatccaaattagtgttaattactgatacatttctacgcattcaatcagttcagttgctcattcatgtccaactctttgcgaccccatggactacagcatgccaggcttccttctctgtccatcatcaactccaagacattgcttaaactcatgcccattgaatcagtgatgccctgcgaccatcgacagacatcctctggtgtccccttctccttctgccttcaatctttcccagcat

SEQ ID NO: 46086 - DNA, 1557 bp, Bovine  19866880740771
  misc_feature (1)..(1): n is a, c, g, or t
ntgaaggacccagtgtcaaccattaagttgaactgctctctgactctcctgggactttacacagaatattctggaagcgatgccattgctttcttttttctaagaaacaaacattcagaacgaaaaccctcacacacatatccaacccaaatgaactctgaggctaatatctaaggaaaaataaaataaaaccttctcccaatactgtgtagcctagccctaaagttattgtattataagactattttaataatgatttttgaaggaagagatgcacatgatgaggagactactacaagctacaacaagatgaatttttaaaaacaaatttagatccaatataaatacaaacaccattatggaccagatttctgattctttaatatataatgatatgtcaagttaaattactatataaatattctttcttttagtactataagtactctcatttgatcaaaaaggtcattaaatagtatgatggctatttagggacacatggaagagtcgtcaagtcattaggatttcctagtaattttagtttaaacagacatctgtggtattgtagtgtatgccacagaaatacgtttacaaatgacctgggctcctgccagtctggggctaagtggattattaacggggtgaattcccagacaactgctctttcttgtgggaaatgcaatgaatagcatccttattttgttcatttaccgatatcagtctaatttctctccatccatgcggattttagctcactgacaaatgagagcgaaactccttaatgaaactgtgcagtggaatgcttaccacatagcaatattttggggggacactgtagcaaagtataatgtattttcaagaaggagtcaaaaaataggtttgaaaacaacaaagtcttccttctttttttctttctttcttccttgaaaatccagccccaaactctggagtgagaagaagactggggaaaatgtgggagtgctggggtcaggatgccaagaggacagtgaccaggcagcccagagagagcctggctgggctggggctggggtggggcagcccagcaaaggagggcagagggcagggaaggagcgcactggaaagcagagtccatgtgagtgctgacccaccaggtacagccatgcattacaaataggagctgacatgtttcttgctgcagaggaagggagttatatatatgaaaaagggagaaactaaaatggacagttcagctttgaactggagtcaccagtatcagtgtgaatgcaccattttttcagtatataactatagacataaaaacatgtaaaaacagctgatcgtgggtgtatataaattccagttctcatgattttctttcttgaatatcattctccattaaaaagaaccagggctccatagcgaaatgggtaattctagggctgaggcgaggaaaatacaacaaggtgttgtcagttttatagcaattaggttagaacttccattatttcagaaaatgagattcgctttggtcatgggatggctctgcctacctcacaagatagccgtgttaacaag

SEQ ID NO: 46087 - DNA, 1735 bp, Bovine  19866880834321
  misc_feature (1)..(1): n is a, c, g, or t
ngagaattgttttatgatatcactgagggagactgaatagagtgagtagagaagggggtccagaatagcaccctaagaatgaacaacatgaagcacccaaagtaaaaagcacagaagaccaagagcagtaaatcagcaagttgggagaaacattttaaaagggtagtataaaaaaccaaagagggtcagacactttatatgaagaaggagtgagaagagaacactatcaactgtaccagagagatcaaaaaccataagcaatgatgtgtttaaatgtggcctcttagaatatctaaaatacaaagcactcttttctctaccaaattacatgataataaaggcaatggcaccccactccagtactcttgcctggaaaatcccatggacggaggagcctggtaggctgcagtccatggggttgctaagagtcggacacgactgagcgtcttcactttctcttttcactttcatgcattggagaaggaaatggcaacccactccagtgttcttgcctggagaatcccagggatggggaagcctggtgggctgccgtctgtggggtcacacagagtcggacacgactgaagtgacttagcatagcatagtatagcatagcatactctgaaacatcttagtaaaaagtagattggttattgcagccaaaatatccctgcgtgacttcatcctatgagctgtgaaattgcaaaagatatattttgtgtttcaagcatatctagatgctaacaaaggcttagagtaaattcaaagtaagacaattctgagacttcaattaaatgaaggaaatgggcaacctaaattgtacagtttctgctatccatactgaggtcttatatccccacacatgcacactcttgggcacatcctacatggtcaagatcactgagggtatgtgaccagggacacaggtaggggcagaacagaggtggccaaattagttaaccaagaaatcactgcactgacaaggaagtgataagtagctttccatattccctttcctgtgttaactgggtcatttagctgaaagttactgggctgtgagaatccttatccagagctgacccaaaagatcttggcttagaaagaatgcctgaaaggtaagagaaatgtcacacttcttattgtaaataggataatttctgatattaggtaggaatattttcggaagggttttttatggaaaaaaatgtgcaggtcaaagcatccttctttggggaattgactgtcaccttcccaggagtcctgatggactatagggccaggtacagaatttatgctggactattcagagaatctccaagctctgtcaactgctggctcagagaggattatctgatctaagcagaaataagccagtattttttcctaggattgtctaataggattgggaagggaaaagataaaaagcaacagagagtgagatagagtaagagaggtggaggggcaaagagagagaaagagagtctgtgtgctgaacttggtaactgggaatgtgagtctagtgctgccaagagctacctacatgcatatgaaaataagccatagagaaaaagcagagtagagacgctgggagaaagagatagacctgacattattattttagttcctgagtttcactgggcctgaagattctcccctagccctctcagtttggtaaaccagtgaattctcaagctagttgatttaactttctgatacttgcatgtaggaattttta

SEQ ID NO: 46088 - DNA, 1463 bp, Bovine  19866880868513
  misc_feature (1)..(1): n is a, c, g, or t
naaactattctcaaagaatgagacagagtgtgtcagagagacagagagagagagacacccccagtcctcatcatgtagtcccttctataaattcaaatcaaacattgatttgatctgctcttagctttattaaattaatgcagctgagtagacccaaagatgaatgtgggaggagataaagtattaaaacgtctgccatttcaaacacagtaaataattttaaatttgccacctgtgcagagcacttttctacatttcagtttttcgaattgtggaagatgagcagattctagataggaaagccatcagcaggcagcaaaaccactgattcttggagagaaagggaaaacattattttataaatgattccattaagtagattttgaaagcttcctacttctctgaaagagttatttcttctttttcttttcttcttcttcttcctctttttttttttttttttaacataacaaccatggggactgtttagaaatcaggagctacttcactctaaaaaaattactcttaaataaacagtttgcaagccctctcagtatgtggccagagcaaagaaaaatagataaacatttcttaaaagctctatcaaagtataaaaactccttaaatctttctcaggcatctgagtcctcaaggactatttccctttttctttttcttagccatgttgaatccaacttgggtgatctttgtcacatccgaaagtttctagagagttttgtcaagagcctagggacactgagcttatagattaccatgacttttatagtaataaagcattaataaaatactatatcaactttcatctgttttcaaaacaatcattcacctttttattacaaatttgattacaaaaatctcaatgtaaagcagagtaaactggggacgggtgggaaataatttctgtataaaagtacatggtgctacaaattatttagtacatttcgcatgtacgtgcatttgtagcacactgatgtaaccatagagggaagaatacttaaactgtgaaatgttagatacatttgggcttcacatttttatttcacaatatgcttcatcagatctttgttctatatagggacatgaaaatacttcacagaagtgtttgcctataggccgagagcaaagtgactcagattgaaactcagtcctgggacttccttgatggtctagcagctaagattctgcacttccaatgcagctggcctgcactgaaccaggttcaatccctggtcaggggaagagatcccacatgcatacaacaaagatcaaagatcttgtgtgccataactaagacctggcacagcctaaataagtaaataaataaatattttaaaacaaaacaaaaaggctcagtcctgctaatctctgggccatcagtgttggctgtctccacctgaaacaaaaataagagggaaataaaacattatgatacagtttattcg

SEQ ID NO: 46089 - DNA, 1127 bp, Bovine  19866880907919
  misc_feature (1)..(1): n is a, c, g, or t
nttaggaagaagctgatgcgtaaaggaaagcagaagacctgacctatggcaagttgtctgtggtgtgagatgaggcagtgtgaagggaaacttcgatatttcacgctcagacgttaattggagcacatcactcagctccctgcccatggttggaagtactggttgggaatggtcaaaatggcactagagcaacccatggtctggggagctcaccctattatgtacagggctgggactgatgcatcatgccacaacccctgatgttccctgctcataattaaggacaaaaattttagtttcattttaaaaaaggttaaaattgaccttgactctttaactcacagagtagttgggagtatcaacaaggtcatctatgtaaacgcagttcataaactgaaagtgtacataagcgcaagatgtaataaaatttaaagaaagaaagaaaaagtcataagtcaagtcaaaaaacataagtcaagtcaaagtcaagaaaacataagtcaaagctggagagaaaataaatccaagatttatttggatttggtcagctcttcctctgctgaccatcttacccatggctttttaccacatctttcctccatcagaattgatcaagttttccttcaggctggcacaaatctcatgatgtcaatccactggtagaggttcatttttcttttaatggctgggatttaaatgcactgctgggagtgggggtttggggagtgtgaagggtcaggatcaaagctcagtggatatctagttatcatggctccttcacattgctcagaaaagtgaaggtcagtgggcaaatgctctagtgcctgctggggatatctgaccctaaccacctaacatggtgaaaaaattacattaatatttgtattgtacccccagcaaaaacagttatagtcagccaaatgtcagtgtgactgaagcttgcggtcatcatagtgatgtgaggcaagttcttatagagcctggagcctttctctaaatgttgtaattatattacatcattattgatcttccatggaaaatgccatgtcatttctcctagttaacgcttaaatttctacctctctctagcttggcatgtgaatttaatcaaacactaattgttgcaa

SEQ ID NO: 46090 - DNA, 1052 bp, Bovine  19866880919024
  misc_feature (1)..(1): n is a, c, g, or t
nttcaatggacgattcagactgcatgtcatgcactgttcaccaataatttattatatgcataaatagccttctctattagatttatatctttgcatttgaattcagatccacttagtctgatgcctcagagtctagctgaaaatatgccaaaagtttggctttcaagttttcaagcgttttggggggattaattcatccaccagaagcactataattccatatgtccaagtttagatatattcgctacttctgaaagaaacaatgatgacactatgtggactttcaaaatgaatcaaataaaagggaaaacctaattcaaagccaaattgggattcacttgcacacattgcagacttaaaaaatttttgttatcatttgactggagctctgttggagactatttataagtcatttctagagagttctttttaggatactcagcttaaaattgcaccaaaaccctgttttactttccctgatcatgtaaccaaccaagggactgactttttataattttgtctctcaagccgtgtcagcaggaagactgcaaagccatctttaaatccagtaaaaacatgaagcctgagatgaaatttagcacttgaactcccaactcaagagatcctattgtaagagaagatagagtagaattgaattataaaacattttctggacataaagccattcattcttaagacctcaaaatggctgcctgggagaaattatagctctaaaatttttaatagcactcttgaatatcaaacagatttagtggcaagtctacagaagatgtgagtatttaatgacaaacaaagtgaactttactgtcagattgcctttattggtatttttccattcattcaacaatggatctccttgaaaggtcacattgtaccacctgtgctgtttctcaaaaatgaatcagaaacattcactgagttcctagggatgctgtaatattcttgataaaatgaaggtagtatatttttatgacaagcatataaacacctgttccatttaagaacagtagactgtatcagataaagacaaa

SEQ ID NO: 46091 - DNA, 973 bp, Bovine  19866880925349
  misc_feature (1)..(1): n is a, c, g, or t
ngttaaaggttgcttctctgctagaggttatcctaggtgaagatcagtctgatttatatccagcctcagatttatctatcttatcatccactggtcagatgttttgtataaaccaaaggggagaacaaggatgtagcaaaccagaaattcctgtgtaaatcagtttgtaagatctacgagtaattgcacatggttaaattgtggaaaatatataagaattaggtattttactgacaagtacatcattttgtgttccaaatcaacaaaaataaatgtatttttaaatattcttatgggtctaaatcatagacctactataacattttcccatttatatctatcttgttataaattagtttaacctaccaaaattctatttttgtgtattttcgaaatatccggataattccattgtgtttaatggataatctattctttaaattcctatagctttaatattttcaaatccatttctatctggttatctgtttactttgaaaggagagtcctatgaaatttgtaggacagatagttactttctctgtttaataggctcttagagattgagtcagttgctaaagatcaccagccagctgggctgaggtcaagtctacacacaaccattcagttcagttcagttcagtcactcagtcgtgtccaactctttgccaccccatgaatcgcagcatgccaggcctccctgtccatcaccaactcccagagttcactcagactcacgtccatcaagtcagtgatgccatccagccatctcatcctctgttgtccccttttcctcttgcccccaatttctcccagcatcagagtcttttccaatgagtcaactcttcgcatgaggtggccaaagtattggagtttcagcttcaacgtaagtcctaccaatgaacacccaggactgatctccttcagaatggactggttggatctccttgcagtccaagggactctcaagagt

SEQ ID NO: 46092 - DNA, 830 bp, Bovine  19866881008707
  misc_feature (1)..(1): n is a, c, g, or t
ntacaattggtgataccttgagttttgttacagcatggaaccttccatctgctctgggcaggtggtacagtggtgtgtgttgatgtgtgtaatgacaatcacaaagtttgcttattcggcatcagctgccttgggttaaagtctgaacctttcttaagctctgcacgtcaggggtgtttaggacaattcaatcatttatttagccagtactgatactgctctctggcaggtggattcagagctaagctccaagtctccagctctaattggagaaatctctgataaattcccacagcattccatttggatacgtattgtgttctgttatggatgttctctgccctgctcccacccataacaagtctgctggtataagcctgtcctacaaactgctgtggtggacagtatatctttgtattgatttgatggagctgggtttttctttcctagtctcagtggagatatctgtcagttcagtatcctattttgtaggaataatggacaaggcaaagtggtgataaattctgatggtaagccaagctgtattttcttgctacatgagaagaaaacactcatcctaaaggcagtttgttctccattttaaattactcaaagaaagcatttttacccagatgctaccccctgggtctcctttgtcacctcaagcagcctaactcatccttcccccccgcgccccctgacacacacaaacccttcgttaattttttatgacttgtgaaagatctccactaacgtgaaactgtcctacagacactgtgttggccaaaaagtttgtcggtttttccataagatgttatggacacttcacg

SEQ ID NO: 46093 - DNA, 1374 bp, Bovine  19866881019854
  misc_feature (1)..(1): n is a, c, g, or t
naatgtttgagaaacttaatgcttttaaaatgttgtggacctgaatttggaaatctaattttattaaattttcaaatatgctttttcttctcattttgtttttccctcttttaaatttttcttttccgcctatatttccctttgtgtttctttccatctgcatgaattacctatcagttaatagaaactttagcaggtgagggaaataaaaggtttaaagatgataaaatagaaaaaaatagttacatcccagagtaaatcttatattgagataagcagaaaattcttgaacatattctcctatgataaagtacttgatatagcttcggagaccttattgttaaaaacaactgacgtaatattcttaaaaaaggaaatttgcagaggtaagaaacggggaaattgcttcaatcttttctactcatctttgtacacacacacacacacacacacatgcaaagaacacaatttattaacagcactacagtggaaaaacaatgtatatggaaatgaaagctggcaaagaatcgcatttcagttttagtcatagatgtggatgactttgagtctagtaagtggactgaaacacccattttcattccacaggttcagggatgtacttcatacagttcaggggtcacaggtagtggagagctaggaggagaagggttgatttgtcattgcaattctcaaccaaaataaaattccagtaagagactggaaaatatttcatttcaaatataagttgtaagcattttcatcttacattaaaccacctcagagcaaaaaacctttttctttttttacatagatagaaaaaaatgcatactgaaagtcaaattcttgataccagtttaaggcttctaaaatacactttaagaagtgcttgaggatgacgatattttatttaaatattgttacctttaaatctttcctcataatagcttcatcaacattcattttatatcaacattcattttttcccttattttaaaatcagctaaagcctatttttgctttacaatatacatttcaaatttaatttcatttaaaataccaattcgagttctcattttttccttagcaagcaaatatcccaacctcatagctctttgccaagccttggcctcaaaatgttgtatttaaaaagcaaataaagaacacaaacttattcaaactctcggaatgcctgagcctgcaactccgggaaagtctttatctaaaaccaatgaacttttcagggctgttgagaaatgaccagaggggccaattagttgttgcacaattggaatcttcctgacgctttgtcaataatttataaaaggagagggcagaggggtcactgtcacgagggagttaaattaaaatgtttct

SEQ ID NO: 46094 - DNA, 1628 bp, Bovine  19866881243913
  misc_feature (1)..(1): n is a, c, g, or t
naaccagtgtcaaggaaaggaaaccttgaactgtaattagtgaattgttggaggctcaatgtgaacaactctgagggttaaaaactcccagggggaccctgtcatgggggatctacccacgcttttgtgaattttatctccaggagctctatcagggtctcacagtgaatgttggagataaaaaatcccctgtgctcctggcagggggaagggaaaagacatcattttgaaacataccacagcactctgttctcaacaggcaaggagactctatttgccagaccctgaattgggggttttattagagcctaatcaacctaatcaatgtatccaggagatagtggaggaaagaggagcctggtatgctacagttcatagtgttgcaaagagttggacatgacatagcaactgaacagcaacgaccaacctgggagaagggaaatacctgtctcaggcccactctagccttccattcggaggaaacgaaacacacaactccagccccttccagccattgtgccacctaaggcagggggtgggggacaaatgagaagcactgatagttcataattcagggcgcagggtcgccaaaagaccaagatttaatcacaggactacagaatactttcctcctacatctcactgctactttactaaaggcctatttaccacagttccttttacccagtatatcatgtctgcctttcaacaaagaaaatacaagacacattaacaggcaggaaccacagtttgaagatactgacaagcatcagaaccagagtcagtatatggcaggaatgttagaattactagaacagggatttaaaaaaaaaactatggtaaatatgggaaaagtagacaacatgcaagaacaggtgggtaaagtaagcagaaacatgtagtttttaagaaagaaccaaaaagaaatgctagaaattaaaaaaaaaaaaaagtaacagaaatgctaaatgcctttgatgggctcattagctaaggaaagaatctctgagcttgaaagcatgataatggaaactttcaaaattaaaaagcaaagagaaaaaagacttaaaaaaacccacagaacaaaatatccaagaattgtggaacaacttaaaaagtgcaatgggactagcaggaaaagaaagagagacaggaacagaagcaatatatgaacaataatgacccagacttttccaaaattaatgttagacaataaaccatggatccaataagctcccaaaacagcaagcatgataaatgccaaaacaaaacaacacaaaaaaattacacctaggcttatcatatttaatcttaagataatcaaagacaaacacaaactcttgaaagacaccagagggaaaaaatcctgcttacagaggagcaatgataagaattacatctgacttctctccatgcaatctaaaagaaagtagagttaaatatttaaagtgttgagagagaaaagactccaacctagaattctgtgtcctgcaaaattattcttcaaaagtgaaaaagagattaagactttctcagataaataaaaattgaggaaactagtcatcatagaactgtcttaaatattaaaagaagtttgtcataagaaggaaaagacataggtcagaagt

SEQ ID NO: 46095 - DNA, 810 bp, Bovine  19866881367924
  misc_feature (1)..(1): n is a, c, g, or t
nggctcaaacctgcgtcacctcccattggtaagcagcttctttaccactgaagcactagggaagccgtctaaagatatactgtagttaatctagaagattctttaaaagaaaaaaactttccaatgcagatttattttgtttagtaatttcaaagatacctagaaaatgaagaaaaaagttgtgcatatggctagggaaaaatataggtttgcaaattaaatatgcagaatagcattacagattggatgtccagtcattccacagctcatgccttttctacttttgaatgttttttgaaaaatagagtagtgactagacatgtgggttaggaaaaagaaataggcatttgttacacatcttttatttgccacgtgctgccgtaagttcaaatttaatgttcatgataggtatatagtaggtgatttttaaacacataataaaacaaaggctctgaataaaaagtgaaagtctacttctctgactttctaatatttttcatcaaatattaccacagttagttttgtctgtaccagtagggaaagtaatatgttttgtaaaaacctgtgtacgtaatgtattgttttttaacccattatgccaagggacctagaaattacaagaaattagaggagggttgtgattctccaggagtttacaattaaacattcaagagtcaaagaacagtttaagaaaacactggaagagactctactaaccaatgtgactgtcatataaatagtaccatgaataaatggccaggagttcagatataagagatgctttaaacaagggaaagcttcacagagaag

SEQ ID NO: 46096 - DNA, 1222 bp, Bovine  19866881374367
  misc_feature (1)..(1): n is a, c, g, or t
ngagccggggcagtgggtattcggccttgggtggaactgctcggcggatgttgacagctgcagcgctcccagtgtgcagcagtgggattagaaatccttctcccagccaaaactgcttccaacagctggagtcacgccccctccccgcctcccacctctgctccatttcttgctggagaccatctgaaaggggagcttaaaatgactcagtgtctttggggtaaagagctttggcttttccagactgaaccgccagagaccttcaggaaattaaagaaagaaagaaaaagtgagatgctctgtgtctggtgaatggcatgtctcgaatgtggtggctgtagggtgatgaggctagagccgttgggaattctgcagtgttatttatttgccttggcacaccgagttagaatgccgagcagtagagtgaaaacggggtgacgggataagggtaatgagaggaagcaaatccactgtgagacactgggttctgaaagagagtttctttccccagaggagggagacaggactattacctcattgcaaaagagtcattaaaacatcattgagggctccacggacggcaaaagctcacagctagcaatgtctaacttcattttcagtggaagttaaaatcaaaatcaacaccctgatgaaaagttgtaacacaaattagagaacaaaacagaaatcttttctgggaggctttagactatgctttggttaaaataagaaataataccgagaaaggaaggaaggaaggggggtggaaagaaagaaagaaagaaaattgttgccactgtcttcatagcccgttcttggaaagatgatgctagactgggactcattaaaaagagggtcttctttgagacacatgaagaataggtgggatgcttgagaggtcaaaacttctgtcctcctttccttcttcctgaagatccacgtgccctttgatccatattaaactggaacaatgcggaagtagcattagtccaactacatgcataccagcacttcacaccttctcaaatgtatatcgaagaagaaaagattaaagatgtttataagtaaatatttattaagcacatatgaagttcagaggtacttttcctcgatatagttgtaggatgtgaatggattgatagttattctacaaccagccacagaggaccacctaatttgaggctcttctgtacatcactttccacaatatatttttgactca

SEQ ID NO: 46097 - DNA, 710 bp, Bovine  19866881731075
  misc_feature (1)..(1): n is a, c, g, or t
ntggacagaggaaggaaatcagaactaagtcgtgcaaatagcctgtgaacaaccagaaaggtggctgaggttagaagcaaagacagggtattaaataaaagacacactaaataaaatgtctatttcaaagctatttccttacttatagaggctgaatttgaacaactttatctcttctaacttacatcccttttagagccagttggcatcccatatctgggagcatcagagacccctgtgaatctgagcactgtggttccactgcgggctttgtagactggtggctccaaacaagatttcagtctttgccttgctctgaaaacttccttttttttcaccagcgttacggcgcttgccaagagtgacataaccttgaaattatttgttacattttccagtgaacaaacccagcttgttaaggaaatgggcagcctatatcattagcaaagagcacaatagtggactcagaattcagcctcgactggtgggcccgcagtattcgacgtttctgggaaatctctctgattttagaaacaattcagcattctaactgtgctgctaggggtgggctggcctctgggaggttgttagggaagcaacaccacatgagagccgaggctcacatggtcctcaatacattcctgtccagggaacatggacactcattttaattgcacttctcatctattagtgtctttctttaaactggg

SEQ ID NO: 46098 - DNA, 899 bp, Bovine  19866880741751
  misc_feature (1)..(1): n is a, c, g, or t
ngctattagtataagcactcttcagtaactaattatcttttcacacctgggagctggagatgtcctaaaagggaggtttcctggctcccaaatggttgtccccaaatggatattatggaatcagttgttcagtgcttttctgcctaaatctgaatcatggtagggtagtagaagtatttagggatgaagcatgaaaaaaattaggagttttatgtgcccaaaatgcatcaaatgctcagatttgtgaaagggtgccagttactgcccagcacttctaggcctgaagcccttctggttagatcttcaaaaggcagtgggacatctgattaaatcatctggaaaaggtggtttaggactaatgagcctaataaggatatcttaaaaccactctgttgcaagatgggggcaggttttcaagtttgatttatttggagaatctcacagagaaacacatattttctaaagaaataactagttgtactcgttatttgaccctattattctgtgagaccttatcgaatgccaagcctatgaatcatttatttactcaaaaaattaatgagttcctattcttggtaggcataaacaggaaaaaaaaaaataggatccccttccccaacaccttccccatatgctttttgtccagtttaaagaggaagaattgggactttcctggtggtccagtggctaaaacttgttactccagtgcagagggcccgggtttgatccctggtcaagaaacaagatccctcatgcagagtttgcattccacaactacagatcctgcaggctgcaagcaaggtcaaagataacatgtgtcacagctaagaccctgtgcagccaaataaatattttttttaataaataaagaggaaggattgcatagaaaaacttattaa

SEQ ID NO: 46099 - DNA, 1330 bp, Bovine  19866880774093
  misc_feature (1)..(1): n is a, c, g, or t
ntggggtcgctaagagccgggcacaactgagcgacttcactttcacttttcactttcatgcattggagaaggaaatggaaacccactccagtgctcttgcctggagaatcccagggacagaggagcctagtgggctgctgtctatggggtcgcacagagtcggacacgactgaagcgacttagcagcagcagcagccaagcgaggctggctttccccacgaccccagcctgtctgccagcagctccacgagcagcagcttcacatctgtcaggaaagcattctcttcaggtgggagctacagaaaacctctcaagtctcacggatctaaattagacgtcatgcaaccacggaccattgaaaacatggttattgccactgaaaatctaatcgtacattttattcacttttaattaaagcaccgtatgtgacaagtggctaacttatgaggcagcacaaccttgggttattctgagaaaaaaatgcaacatcgacatgactttgtaaccacacgcattaaggatgttaacaggtggctcactttcacagtccactctgctgagataaagactttcttaccctagttatttactcagcagatatgtcccaaatgtagcttttcagttcagagactgagagctgaaaactatggttttcacccttttgctgcaaggagtgcctatgacttaacccttggttagttttcagctttgggtagaaggttccatctttctgccaaaggaaacgcaagaggcacataccacacacactgggtacaaagcaaggcattgctaaaaaaaaaaaaaaggcaaagaatctgaataaaataatgaatacaatcgacaccataaacttcagttgactttggattatgttttgaatacaaagtaaaacaaaatgcttttcctgtcctacaatgctatttaatcaaataattcctaagcaagtttagaagtacctctctgttgacttttcctgctggttagatagtccaaaatgtcaaggcatcaaaccttctgcttggtagatttgccacagtgggcgtgttcctgaataactttctgagcaatgcagcagagaaaacaactggctatattcccaaattcactccagctcatccctcacttggagaaggcaatggcaccctactccagtactcttgcctggaaaatcccatgtacagaggagcctggtaggctgcagtccatggggtcacgaagagtcggacacgactgagcgacttcactttgacttttcgctttcatgcattggagaaggaaatggcaacccactccagcattcttgcctggagaatcccagggacgggggagc

SEQ ID NO: 46100 - DNA, 1832 bp, Bovine  19866881317121
  misc_feature (1)..(1): n is a, c, g, or t
ncaagggttttgcatagtttgtagagggtaatgtgaagccgcaggaagcttatcatcaggactgtgacgtggtctgatgagttgacatctaaaagctgtcaactgcaaaagcccaggcaagctgtgatgatgtcctggatgatgactgaagcattgctcacctaagatgatgaagggaaagcaggagccaggagaagcccaaggaagggttataactaggtaacgttgtgacgtgttggctcctgggactacagctgaaacttacaaggagacaacatcaagctgtgaggagggccttctaaagaagacacagtgtgttgggaggacgcctgcatttccagagtttagaaaggctgtgtcagtaccctgacaccttggcaaacgtccacagacagcagagttgtctctgctcagtgtccaggatccagcatcacaggtcgtgcttctggctgtgagatgggaagtgctttaatgtatacgtgctcagcatgatcttccagaaactcagaaaccagtgagggacagagccattgaggactgccaagagatgagtttgaaccacaggtccaggaaaacgactgtatttaaataggcgagtgtttgcgaattcagtgggtgatctggatggaatgagctcattcctgcttctcctggttcactaaaacagtctaggcatcttctggacctcactcttcaccagcctgtattgcctcctgggggcgctttactaacctgcagggcggggcgttttatgttcctgctaatatgctctaattgcctccaatagcagcccccatcttaaatatgggatttagactattaactttatatggtatctttaaaaagcaattccaacaaatagatattagccattaaaacaacttgttcattagtaaatagagccatttaaaactgcattttaatttctatgtctaaaaatgaaagtgcacggttttgttttgtttttaaaagaccccccaccaaaaagggcatacatactatttctttccttctttatccataaatttttaccaatattatatatgttgatctgaatgctgagtattggtaaaagtaaggtgaataggcaaagtaaactggaaaaggcatgcaacgtacatgtatgtttatttttttaaactttttattttgtattggagtatagcctgttaacagtgttgtgacagtttcaggtggacaacaaagggactcagccacacacacacacgtatcccttctctcctaagcttccctcccataaggcttccatataaccttgagcagggttccctgtgctatacagtaggtccttgttgattatctattttaaatctagcaatgtgtacacattaattccatacttcctaactatcccctttctttctttcttttcttttttttagtagttaagtgatgggaacacaactgaaatcagaaaggtactttatttgtacataaatagaagatcagggttcctgattgcaggaacccggatgcaggaactcaattgttatatatccatggcatagtttatctttccaacacagcgtctcttccttgtcttggctccatttgtatggttgtctcctatgatagcaagatgatgatagcaacactagccttatggttgctcaggttcaaatctctatgttcaacagttggggcaaaatctcctgacctattcttgctgctggttgtatccactcctggaacatcctttatgttaaggggaacaaagtgccctgatacgatcatattccctccacctcttgaagaatggattgaatccaccctatccaaatacatcgctaagaagagggcagggctggctt

SEQ ID NO: 46101 - DNA, 908 bp, Bovine  19866880695965
  misc_feature (1)..(1): n is a, c, g, or t
ngttgagttttcttctttgttggagtttactcatggcaacaccctctcctcccttgttattagttattaagattcctaacacagatgttaagaggctaggatccctgtccagccccttccccacccgacacctaactcagaagcatgtcctttgaatttgggagacagactgtctccaatgcaccttccagcagggtttccatagcaaccactgccacttcaaaggtgccagaatgtctccatcttacatctgactttctccctccctgtgtatgtgccgttcaggtaacaccaggcggttgaaatgagcctcaggtcaccttaccaaatgtttcacagctggcaggagcaggtgtacttattaaataaattacgtgagcgacatagaggctggggcatcatcttcctgccactccagaaagaaggctgctttcatcggatctgctgttggtcaggaatccctggtcttaaagggctcaatgtctcggtgctccgtgatgatctagatggtgcggtggggtggggatggggggaggtgtatatgtatacacgtgactccttctcttcattgtacagcacaaactaacaaacattgtagagcaattacactacagtttaaaaaaagtgactcagtatagttttatcttttcttatttttcccattactcatgcttgcttttgaatgttccccatccttgttttggaagtcaaatggaaaggcagcaatagtaacacattttgaggggatgaggcttcagaccgggtatctcatttttgtcaggaagccactcacacctagaatcctcactcttctaataagaagatttcgagttgtgttcccagggtctacccaaactcagctgtgcacagcactcttcagtaacatagtttatgtttacttatttatt

SEQ ID NO: 46102 - DNA, 1660 bp, Bovine  19866880826051
  misc_feature (1)..(1): n is a, c, g, or t
ntgatgatccaatggatgttggcaatttgatctctggttcctttgccttttttaaatccagcttgaacatctggtagttcatggttcacatactgttgaaaccccacttggagaattttgagcattgctttgctagcttgtgagatgagtgcaatcgtgcagtagtctgaacattctctggcatttctttgggattggaatgaaaactgatgttttccagtcctgtggccactgctgagttttccaaatttgttggcatattcagtgcagcactttcacagcatcatcttttaggatttgaaatagcttaactggaattccatcacctcccttagctttgttcgtagtgatgcttcctaaggcccacttgactctgcattccaggatgtctggctctaggtgagtgatatcaccatcgtggctatctgggtcatgaacatcttttttgtatagttcttctgtgtattcttgccacctcttcttaatatcttctgcttctgttaggtccataccatttctgccctttattgtgcccatctttgcatgaaatgttcccttgatatctctgattttattgaagagatctctagtctttcccattctattgttttcctctatttctttgcattgatcaccaaggaaggctttcttatctcttcttgctattccttggaactcttcattcagatgggtatatgttttcttttcgcctttgattttctcttctcttctttcctcaactatttgtaaggcctcctcagacaaccattttgcctttttgcatttctttttcttggggacaatcttgatcactgcctccggtacagtgtcacgaacctgtgtcctagttcttcaggcactctgtctatcaaatctagtcttttgaatctatttgtcacttccactatataattttaaggaatttgattagggttatacctgaatggtctagtgattttccctactttcttcaatttaactctgaatttggcaataaggagttcatgatctgaaccatagtaagctcccagtcttgtttttgctgactatataaagcttctccatctttggctgcaaagaatataaccaatctgattttggtattgaccatgtggtgatggccatgtgtagagtcgtctcttgtgttgttagaagaggtatttgctatgaccagtttgttctcttggcaaaactctgtaaggagcatctttaatttttttttttttctttcggtatttcagactgtttccttaggctagatttatggaaggggattgaaaaatcaaagggtttggttaacttcatgactcttgaagcctgtctcataagattttatctctgcctccggattataacaatacaaatgtatgtcaaacttcccaaggatttgctaaattgcacactctcctttttaagttaactaaaagccacagttgaatgttaatctttcccctattcttttttgcttttttgtttttttggttggatgtgtttgatgtcggtctggtttggttgtcgtctttctaggtttgtggctcatgcagaaactgaagaaatccgggtcgcttttgcagctgaccttcagggataatgctgatctgcgcaaatgtttcctctaccaactaagccaaaagacaggtgagtggatcccccagctgca

SEQ ID NO: 46103 - DNA, 1321 bp, Bovine  19866881011556
  misc_feature (1)..(1): n is a, c, g, or t
ntggtttgatggaatatatttttgagaaagtagatcgcctataaattcatttgcttcacaataattaatttgaacaaactccaaaaatatgctttaataacttctcagatcccaattagggccaaattaatggcttccatttatggcagggccaatctgattaggtctcttgtttggttgtgctgcaagcattatccaccctgaggggaaccaggctaaatacaaatcttcagattgatttaaccacaaatgtgtatttataaattgcaactgacttttctaattaattttgcatcgtgctaatggtttttctttgtaaccactgattatatcaggagggatccaagccggatctggagccatttgcagtcactgttagtgtagagagaaatgagaggaagcaataaagaaagcagcttctagggacctaactcctggaaggtagttactgatttcaacaaatgtctagagaagcaatgcaatccagagcatcagttaggaagatccaccctattacccgttttacagctgggtttccttgcaactgaatttttttttttttttgctgaagaaaatgtttaaatgattattgcaaagtctgtgtcaaggttagacatcaaagaatatgaaatggcttccaattatgggaaggaaaagtcatgaggacagattttcaagaaatataaggtgtcaaagacagggctaaggaggaggagacctggatattcagggtacttttgcttcttaataagattcatttccagttggccagctggtggtattgatatgagtacaagaaaaaaaatgagatggagctggcatgagagaatagaatatgtcagatggaagaagtgtggttgagccttagcaaagctagaacaaactaaacagagctgagtcaaaacacaactatcaggaactatcacaacattgtaaaccaagtatatttcaattaaaaaaaaagaaaataatggtaataaatttaagtcctactggaaacaagggagtagagatatgaatggagaagcatgaagcaattcagagtgtcctattagagtcttgggcttcccaggtggctcaagtggtaaaaaatccacctgccaatgtaggagcctcaggggactcaggttcagtccctgggtcaggaagacccactgtagtaggaaatggcaaccatctcaatattcttgctggagtaatcccatagacagaggggcttagtgggctccatggggttgcaaagagttggacttgactgagcacacacctgcacacgtattagggtctactagaacctgctgctgctactgctgctaagttg

SEQ ID NO: 46104 - DNA, 1201 bp, Bovine  19866881026716
  misc_feature (1)..(1): n is a, c, g, or t
nttagtggtcagtccttttccttatctctgacacctgctttgtgcaaggccatgcactctgcagggtgaagggacagacatgtgaggaagaggaaagagaatcatttcgaatgtcttcgatgtgctgagcacttgtacctgtttgctcttttaatcttcacaacctttctttgaagtgtggaccttgttgtctccccacggaaaagggaacccatagtcagtccaacctggaaagccccagttgggggctccttttcttgatattgaatcctaatttgtagcccgaaggtcaggcatgggcacacacccaggatatgccctgaggcttggtggaggaaaacgagcttgcgcacagagcctggccttgtgcaactgccccctcgacacccgtttcgtctctctccttccagatggacacgtttgcggattttgataccatgaccgatcggttactggatgaaataattcagcacatccagttgtacaacctctccatatcgagaattaggtaaaaggaaaccacaggtagttaatgctgggggggagcggtgccctttttaagtgtttgctgtgtatgagttcagcacgatgccatctgaataccaggctgggattagttaacttagggctttcaagggactagattacttccagagcagccgtggatcccaagcctgcttgacacacccatgtctggcatagccgctgtgtaggagcctacagcttgtgcagctcagtacaaagagaactgggcttaagtatgtgtgttctgtgtgctcagtcgtgtctaactctttgtgaccctttgggctgtagcttgccagactcctctgtccacagaattttttcaggcaagaatactggagcgggtagccatttccttctccagggatcttcccgacccagacatcaaacctgcgtccctgcatttcctgcattgcaggtagattctttacctgctgagccatcagggaaggccttaaacaaatactctaggttttaaatccctattcttttgacagttacaagtttgtgtctgcattctaccatgtaaccttgaacaagctttctacatctctgatcctctgtttccccatttattaagtgggaccagcccgaggggattcactagctgccgcatagaagggcttcattcagcactaactgtgaccttacactgtaatagacaactgggtgtcaa

SEQ ID NO: 46105 - DNA, 2107 bp, Bovine  19866881386085
  misc_feature (1)..(1): n is a, c, g, or t
naaatgctccttatttggccaaaaaggagaagatgctataaaccatggtcccgccctgcacttgggcacttgtaaggaactgtaagttcataggctgcactgtgggaaccacaccccgctctgggtcacacagcagactggtcatgttcatgagtaaccagagtctatgcccatcaagagcttggagaaatacccagtgggagagtgacacaaggcattacttatcccacacgtgttaagactaagatacaatgagatttcgaagaagacccacagagaccctaaatctcttgtgtgggaggtttttccaaccccctctccagcttttcctttctttagaaatgcctcagtctgctctcctgaaaagttgtctgcctggacttgattgccatggtctactgtgttttcaaagtcacactgttaatacctgaggaactgaaagtctcagctgagaattccttggcttactaccatggcactagtgggcatcactaaggttatgatccaggtgctgggaccaggagtctggttccagacgagttttcagtttcagaagcaacttttgcagaagtgggaggagcttctgtctgcagaagacgtgtcttctgtgttaatgatccctgtggtccttggtcatgtgttccttcattacaactaaatgatcctgcaggcttctgttagcccatagcgcatactcagtctttggaaccatattaaacactccagtaatttttcaaaagtccccttaagtctcttaccaataacaatttgaatccccaacctggctgttgttctgtctgatctcacatttgtcctgttgtctcgtgtgtgtgtgtgtgtgtgtgtgtgtgtgtgaatcaatgataaccttccctagccctttattttcctaaggcaagaagacatttctagtgaaagataaccagcacccttctcagagcccccctgaggttttaaatccagcactcctccattgagatgtctttccccttccacggagaggagaagcagctggccatgtgatggttttcatttgtttgcgagtgcgtcaaatgctaacataggatttctttggacgggtatcagcaggagcttcaccaggtgtgtgcacatttaagggcctccttctgctagggttagtctcagtctgttttccctactacagacagagatgtcagcaatcacaaaaaattatgtgtgaaccggggttatgcatagaaaaagtctggaggagtaggtggagcagccagttcaccagttaaatttttctctgcaacaaacttgcatttactgatagcattgctctatacctcaatcaccccaccggctgctgttaagaaataaaaccagaggttatgaagcattcctttgtcccttgttgagaaaatatgaggagagcataagaatatgggttcacacggtcttgaacaagtggcacatttgaatcaattaaggattatatttacacaaatatgttccacttctgcacagaggttaacctgagttctgaaatgcttgagtgcatcaaaaatgataaagctatgaactagtcacatacccaacaaacctagttaacttggagccatctctctgtgagccagtgggagttaagaaggtgggctcaccaactccaaggattctgtttctttattttctccaaattgtgctagaaagcatcttgaatgagactccaggtggctagacaggttcgggcaaagtcttgtctttgacactatcgattcagctttcccaaactctccgaaaagggaagcacctcgaatgtccggtcccacccccaccctccacccctcagcgccttcctctctgagctcaaccttggaatgacagaggtctgtaaaaggatgtctcagccagagctctcatggatcttaaacgtttctggcgagctccccaaggcccgcgcgctcaaagccactacttgaagtagttgagtcccgccaccaagaagaacttctccaggaagagctcggagtccagcacagcgatgtgagccgctcggccaatcagggtgttggcagtgttgggcaaggcgtggaatacattgtgtcggaatcaaagtgcagtcctggcgtccaccagagggcga

SEQ ID NO: 46106 - DNA, 1313 bp, Bovine  19866881399053
  misc_feature (1)..(1): n is a, c, g, or t
nagggaaggcgcccaatgatcatgatgtctggtgatgtacaagaagcaagtcatccctggaaagccaaagatgatgactaccgagagctttctctaataacccattaaacacatacatttaggtatttcttggactgttttacactcttataagttgcaatcccgtagctacagcctcattaagaaaaaggctgcaaacaggcattttcccttagaaagcaactccacattatgtacgcagggtagatgtttaatacatgtttaataaatttaataacttggtggatgaatgaatgaatgagtaaatgaacatgatgactagaggcacatgtgccttttcttcctgcattggcctgcccacgatgtcctcctgctagaatgatgtaaaatgcccaaacaccaaaacaaaaaccaaaccaaacctacccgaaacagtgcttgctactgtgacatttataagagcgtgctgacgcctgagggcagagggtcagctgctgggctgagtctccccccattcctagttcccagccccttacccagctccatgcgcggcagctcggggatgtccctcaggatggtcaggaagtaggcacgcagtccccggtaggcgtgcaagagcaggaagcacagctcccggtgccacttgtaagcgtgctgcatgcagttctcagacggcacgtagaagctcccctgtggggggaaacagaagcagaagctgaggacctggtcctgaaaaaactggggaagacggtcaagactccagcaaaagagttggaatctcctccctccccttctgcatgggaaacccactgaaattggccaagcctctgtcttataattttcaaattaaaacaataacgatagtaataacaacattagatgatgatgatgaccatgatgagggcacggacctcacaggtttggggcaagtgaatgtcgccccctcttctaagactctttcttgccactgtaagaagaagtcatgtgaccgacagagggggctccttctcacagggaggtaaggcatttagaaagacctctgtattggtggatgaagagcacagtgctgagaaggagaaaaacgctttgctgtaaaataggaggaagtcggtgagtttcagctctcggtgttgaaagtgtcagaggctgtgggtgtgaccatggagtctgagaatgctccatattgtgtttgtaggtgtaagacacattacacccataattacacattgcaagtcatttatcttgcaggaaaagatgcctgagtccacaagttacttgtaggccaagacatgaggaggaggaccaggacagtt

SEQ ID NO: 46107 - DNA, 1181 bp, Bovine  19866881493586
  misc_feature (1)..(1): n is a, c, g, or t
ncatgaaagtgaaaagtgaaagtgaagtcgctcagtcggttccgactcctagcgaccccatggactgcagcctaccaggcttctccacccatgggattttccaggcaagggcactggagtgggttgccattgccttctccacaggtgatgctaatttcagttcggctcagttcagtcactcagtcatgtccgactttttgcaaccccatggatgctaatttaggtaaagttaactgcgccttgcttctcctcctgccacgaatactgcattattctctataaaagcacttaccattttgtatgtattagaactctccatttttctggactgcattacattataaatcccttaagagctgccatcttgtattattcatttatatccctggtataaggtatgtcatctggcctacagaggtttagcaaaataactcttctcactcccctctttatcttattaattctttaattggatgtaaaaacagaccagattagcttgaaagaaaaaaatgacgctcaatcatttgaataattttgtagtatatgaataaaatatgtttaaggctaatccctgagttacatattggacaacgattacaggaacaatttcacaatgtaaagcccatattgtacatcttcctaatggcagagatgcactgaaatgaactgcatggcgttttcccctttttggggttatttaatcctatcaatcttatttccagttcaattatgaaaccaacataccacacatgccatacattcaaaaacaaatttagtcttctgaatattaattaacattgtttcaaagagacaaccgctgtttatcattgatttaaattaaatattgaggaggaaattaaagagatttttacttcatttatgcagcagcaacattacaatttatacaaatgaaggcataattaaacagtctgccattaaattacaatctgcatctcatgtaagcaaacatattaaaattgaaaatgcctgtcatgaatataaagccagcttccctgaataagaattattccaaatgcatgatgcacatttaagcaactcttttattttccttaaaggaaggactgtgggttttgtgatatgaccatatttataggttgctttatttttaagatatatagttgataatcccaattctaatactaataatagctaatactgtg

SEQ ID NO: 46108 - DNA, 2067 bp, Bovine  19866880376772
  misc_feature (1)..(1): n is a, c, g, or t
nctgcaatgggtgggtcccccgacttacccgccccactggggcccgacactgtacccagctggttgggaggaccagggcctgtctcagggaattgccccccgggggcggtgcagggaagcagggaggtgcaggggagaggggccagccttagctgtcaccagcacttttgaccaaatcctactactgtgtcccctgcccctgggcttagtgcctgggcccccctgccctgggggtcatctggggccagggctctccgggtgccttcctgctgccctggccagggctggggccatggcctcaggatccaatgaagccaaataaactccccaagctgtctccccaagcacagcctgtcagcgttcttcgagataactgggggatccagaccatcccatgaccctggtgacctcaggcccccagcagaatggcaggtggcctgggccaaggttgggatcctctggaccgcatctctctcccgggatcaagttcaactgatcatcaggtgttacaaggcccttgttagcctccctgacatccacacacttgggccttacttgcctgttcccaccctggctgggcctttcccaccatttcaagcaactgtttgccctgattgttcctgtttcggggtggttcccacttattctcagggcccacaacaacaccacctcccctggggccccttcctggccatgctgcacccattccaggcagcttgctgaactcaggagcccacagttctctgggtggtatcttaggcgtttgtccagggtttgtttttatcctgaggcctggacacagaagagggtcatccaccctgacacctggcttcactcacacttctcttaagaaggcacgggggttctacagaccacccctcccatgccacgccctaggacaggggcccctgggctcatcctccagtggtttgtgggagtcgtggtccaggctccctctccccctcccctttgcacctcaccacagccaggtctactgtgttcagcagggcggggactcgggagagcacaaaagtttctcaggaaggattgggaatggcggaagcctcacctctccagagcacccagcatcctccacatctgtcctgcctgccccatcccaagtcctaccatccttcttcccattcttctgcccaggccaccaccttctcatctggggtaccggccgtagccctgtccataggtccccatttttctcaccacccaacctccttcccacctggcctggcctcttctcttccccagctgaactgtcgctctccaaagggagcttttcaggccaagttcccctcccccagaacactctcccatcatccagggcgtttccttcagggagtttatgacaatgtgaactcgccctgccttcttgctaacaggtttctcctgggaacactgggagggcagggacctgcctctgtcctctcccctagggtcctcagggtctggggacctgctgactagtgaatggggtctgtgactgggtgagctcacatgaaccaccactgtgggagggggaactggtcaatcgccttgctttcacctgatcctcaccgcccatcactcaaccacccagctttggggacctgggtgggaaacttgttgcccccagaaacagaggagtgaccccagctccctcccaagcctgagccgcctcgccttgccctcctggctccactcaccccagctccatcccaggcttccttccctctccagccacccacgcagcccctccccccagccccaccctgcccagcccctcccaggtgcctgtggtggagagttggctccccgggcacctctgacagactctggtggcataccatgggggctctaaggccctgggcccgatacgggctcttggctgtggcccacctgctggccctgggccttggggccacagtgctccaggccctggaggggcctccagcccttcggctccaggccaacctcagggccgagctggccacctttcagggcagagttcggggcctgcctgccagctggggcgctggaagagctgctgggcaccgccctggtagcccaggccca

SEQ ID NO: 46109 - DNA, 1201 bp, Bovine  19866880411501
  misc_feature (1)..(1): n is a, c, g, or t
nctccgatcatggctggggccccacacaggctgaacatggccattatgagccagcgcctccaactcccggccaaaacaggttcctctcccaccttctcaatccccacacctgaaggatgtgtcacatgactgtcagtacagaacagacggcaggaccgaccgattttagcccggaagggcagctggcccctcaggtgccctgccccagcaacttgctggcactgtcagccctgggggcccccaacttttcagctcagctgatagcctggccccctcgagggctcctgctctggccacctttccaagtcacaaggtgaggagaaagcgctgagccaacccgctgtccacccgacccggcacctctctgagacgtagccctggaagtgccctgctcaggggacatcctctctggcctgggtaggtggcagcctccttaccagctgccccctccctgccacacgccctgcctgctgaccttaccctcaggccacagctgaggggggtctccctaaaccttcaccccgatagtgtcagtctcctcactcgccttctcagtccccagtctcgctgccaaggcctgttggcagttccaacagtaactcctactgccccgaaccccatccggacaccatgcgccagccccaggggtggactttcacttccccaaatcgtttcctcagtctggagcagcctctctcttgggcggctggatgtcaactctcccttcatgacccagctcagccccacctcctctagaggctccttcacccgccttcttcctccctccctgactttcatgcctcctgaagcctcctcaaaccccagcacggcccccagggcctctcccattacagctccgacgccgctcccaccccaccatggctgctggctactcctgtctccttaggcagaggctggggtcaggaggacacactcagggcacagcgcgtaacagtaatggcaggctgtgcattaagcatctgtgtgttggatgctgtgggtgccctgactcatttcatcttcccatcagcgctgtgaggcaggggcccttaccttccccattttacagatgaggaaactaagggtcagagatgacactcaaacagggcctggcttgggccccactgtctaatccaacagtctgttcccaggcttggccaccaatttgctgtctgcctctgggccagtcatacccacctgg

SEQ ID NO: 46110 - DNA, 663 bp, Bovine  19866880424836
  misc_feature (1)..(1): n is a, c, g, or t
ntgttcacgtccacctgctgtcggaggctgagcaggcccccctccagctgccccttgcctcgacccccgcccctccccagccggcactcacctccccccagcgcaccttcctcccgcagctccccgcgccagccaggctggttggcagcaggtcccctgcgggcctcggcagccagcacagtgggctcagcggcagccagctccacccccgcctgggcctccagctcagccttggagcctgccgggggaccccgcagggcatccccccctgccccgtccatgctcagcacgcgggcgtgcgttttggcgctggcagtactaggcgtccgctgggtcccatagggccgcttggggggcacagccatcccctcctcagccccgtggggggcccgtcgttttcgggctcccccagcagccccccgagaactcgcgggggaatagcatgaagtggaagaggagctgtcggtgctgtagcggcgctgggaccggaggctggaggctgggctcagttcactgccctcgctggtgtcgtcatcctcgaagaagccccggccttccagcagcggccgccgaggggcacggccggtggcaggggagtgtctccgcacaggcggccgccgtttgctgggccggagcagcgccaagtccttgggccgacaacca

SEQ ID NO: 46111 - DNA, 761 bp, Bovine  19866880437671
  misc_feature (1)..(1): n is a, c, g, or t
nccccccctccccattcttcccgccaaccaaaaggagccaacaggtggaaataaatgatagactttattaaaacacccgaagcagccttttccttcccccttctcagcccgggtcccaggcttcagtggctctcttcccggtactggatggcgagaaactccagggacaggcggttgaagaacatggccccgttgagcactgggcagaggagagagcccccatcagccttgcctgccccctccttgctgtgtctctgcgttccaaagctccctcctccccccaagtccacctcccttccctactcactcaggatggtcagggaaaagcagcgaagaaacttgtcatatgtcatctccgcgtagagtgaccccatggcggcccagcagatgctgatcacctgggagaactgtagggcccatcccttgggaaagtggcccctgacacaacagtggggtttccatcagcccctgggcctccccagaccacctctcgagcccccgccccagcctaccatcaggacgacggtgtagcggaagctcatgcggtcgtagcggtaggtgacccagaagttgtgcacgtcgctggcaaagacagccaggtgtatgaagaagagcatcagcgcggccatggtgagaatcatgccttgtgggaaaaagagcacagccacacggtcccgccagcgcatcatggcaggagtacagactcaagggcgggtggcagagcttgagcagcggacactgtccaggaagagcagccaatc

SEQ ID NO: 46112 - DNA, 1180 bp, Bovine  19866880461604
  misc_feature (1)..(1): n is a, c, g, or t
ncatcctgctccgggagttcctggtgagcaagactggaggctagagggtcaggcctgggatcctggatggtacagtgaagggaaaggaaagtgaaaaacaaggatcacaattgctcctcactgaccaattgtgtaaccttgggctgctgctttatctcttgtggcctcagttttcttatttgtaaaatggggagcatatatctgactcccaaggaacagggaaagacatgtggtgatgctctgtggacagtaaggagctagaccaagggttctaaatccaggtacccactgagccattctgtcttctcaggtgacccatcacctgcccgccgagagggtgtgaagaagaaggcggccgagtacctgaagcgggcagaggaaatcctgcacctgcatctgtcctaactcccaccccgagatgggagtggacctgttcccaggactctggctccagcactgccagccaccctcttctctccctggtgcctgatctcctggtcctgtaactggctctttctgtatgtaactggaccaggaatgagaaaaataatgagttctcagctccctgaaaacacctgccaccttggaatcagggactcacatgtctgatcctgactgtctctatcttgatatgggaggctgcagctctggtccgtaagccatctgtttatccatctagaacaggggtctgcaaactaccgcccacagccggatatgccccactgcctttttttgtaaggcccatgaactagaagagtttttacttttttttaatagttgaaaaaatccaaaataataatattctgtgacaggtgaaaattataatgaaatttaagtatctaaaaaataaaagtttattggaacgcaaccaggctttttcatttagtgttgtcgaccgttgctttctcactacaccggcaaggctgagtgagtggttgtgacctgtaaatccaagagtatctactgttttgtagatactgtctttgtagtatctactgtctttgtagaaaaagtttgctgacccctgatctagaagacagggagaagagtcctcaagggaacagaaaagaacggcagtaaggccgactgagtcaggttatcgggtaaagaggaaccaaagcgggtctccccacttgggtcgggtggttcagagctaaacaatgatgggattagagggagg

SEQ ID NO: 46113 - DNA, 1331 bp, Bovine  19866880520637
  misc_feature (1)..(1): n is a, c, g, or t
ngtggggccgggctgaggtggggcttgttataccgtaaaggaatccaaggcagggtaagcagggccttggcattgccccatttgtaagtgagggtccagggctgtagccctagcttggccaggtgggcagcacttcttttttcacacactgcatgttacactcattcattccatcgttcattcattgattctgttgcacagatgtccattgatgacctctaaggggtaggtctgagctgggggctggtgacaaagaagacactatgcataagatacaggctcattcagagaaagacccaatgtgtcatgacacagggcgacaggggctacgacagggccacccacgaggcggctgaggcacacagcacagtccagggtgtgggtctgcagtcctggagaccccagaacctgaagattgagaggaggggctgtggggcggggagaggagagggggagagagagagaaggggaggcgaagcatggagggaagggaaagaggacggaggagggaaggatgccaactccatcagagccgtggtgtgcgctgcgcttcggggcatctctgtaccctcaggtagtcagcagtggctcacccacacagtgcagtgcagcctggatgtaggcaggatgggatcgctgtctgaagcaacacgcagaggccacgaatgaagtgaaatgaaatcttgatagagaagcatgtgtgggctgtgcccgcgtttgtatgaaaaagggggatggagcacatgtgcgtgctcaggactgttgttcagtcgcccagtcgtgcccgactctttgcgactccacggactgcagcttgcccagccttggattgtataaaatcataaaacatctctgtgagatacacagaaccaggctgccctagaggaattactggagtgcagggcagaggggagaacgctggcctgcatacccacttgtaccttctggaatcttgaaccatgcgaatgtattatataataaattatataatacatatatctactttaaaataaatattttaaatacatattaaatacattaaaatacatattattttaaattttagtttaaaataaactttaataaagaaaagttaatgaacagactggggaaaccctcgcccccaaaggctcacctgtctgcaaggctgccaaacacagcggcgcctgccagcaccccggccatgtaggcggactgagccaggtcgcggagggtgcgggcctcgcacaccaggtccactgcgggggagggagggacgctccagcctcggcctggggtgcagcccccaccaaccccgcagcccctggccccacctgacctccgtcacgatg

SEQ ID NO: 46114 - DNA, 1432 bp, Bovine  19866880656319
  misc_feature (1)..(1): n is a, c, g, or t
nagaaaaaccagcagctgaaaggttagataatttaatcaacgtcaaacagtgggcaaagtgtgggtttgaagcccagatgtttggctccagggccatatcctttaaccacacaccataccgccttgtaacaggaagttcttcattaaactgagctgaaattcctctctcggtggcttcctctatcctgttctcactcccgggagcaaaccgaggaagtctaatctttccccaagagattgtacaacccagcctcccctccactacttcctcccaactcccccgaatcttccttatatgacacggttttgcatatcttccccagctggccattctcctctgaatgcaaatatgtgacagaggcgccgtaaagaaactctgagaacacatctccccttagcgtacatgctagagagaaagcactgtacacgtgctagattaaagtatgacgtggacattattcacagcacctgatccctgatgacagagaccaaagaaggggagagaccatgagtcaccgtttctggaaatcctcactttgctgctgttctcatatcctgacacttgaatgcttaaggccctcaatcttgtttacacgcaaggctctaacccaagtgcaaagcaaatgacttaatctggtcacaaaaccagacagcacttataacccattttaccaagttcatccaaggtagatgttctaactagaaggtagacagttagtgaaaaggaagctggaggttgacttttcatcattgatttaaaaaaacagtatcaatcaggaaagactattagaacaactcttacctgtgctgggactagaataggagcaaaagcctcaattttgtaatgttccttgagttcactgccaagttcttctatcttacaggtcagaactgaaatcccagagggaaaaagtgtgtttaagacattttacttgccaagcagagaaaacacagcaccttgtaaaacactaaagtcagtcatttcacagaagcaggcagggtgccaaggacagcagccagtctgtaagctgctcaagcccgagccaattgcccaatatttggttgctgaacccggccttccatttggccatggtcggggggagggaggggtcacggatgaggtcacagtcccaaagtcggcctggatccctccccagcctgcctcttactcaggtggtcaggggggtttcagggaagccaagaacaaccctaagagccttccagtctttccaaggaagaagccataaatgtctccgcttcctttaacactctaattggcttcctctacacagttcaagtggttgttactgggaaacggttatgtgctttttcttagcaaagtgcttgtgatttgggagaattattgagagtggtcatctcatatccgtttcctaataggggcgcccagaggacatctgtcaatcaaagggaa

SEQ ID NO: 46115 - DNA, 903 bp, Bovine  19866880675822
  misc_feature (1)..(1): n is a, c, g, or t
ncctggtgtgagcagcattagactcccaggggaaggaagggctaagcctaggacccaggtcggggcactgggcccatccagccctggggaatgggggagctgggcccaaatgcgaggccgtctctgtggcgccacccacaggtggactcatcggtggcggtggggacacccgactacatctcccctgagatcctgcaggccatggaggagggcaagggccactacggcccacagtgcgactggtggtccctgggggtctgtgcctatgagctgctcttcggggagacgcccttctatgctgaatctctggtggaaacctacggcaagatcatgaaccacgaggtctggctgccaggccctgggattctgggcgggccgtgggactcctgaggctgtgaggttggagatgccctgggtgggggtaggattccagacactcacctgcacccgtcccccgggacctcaggaccacctgcagttccccgacgtgcctgacgtgccagccagcgcccaagacctgatccgccagctgctgtgccgccaggaggagcgtctgggccgcagagggctggacgacttccggaaccaccccttctttgaaggcgtggactgggagaggctggcgaccagcactgccccctacatccccgagctgcgcgggcccatggacacctccaactttcgatgtggacgacgacaccctcaaccatccagtgagtggagggacccacagcagcagtggctgcgggaccctcccctgccccgcaaagttccccaaagcagttgctgggctggggatgggaggcccatgggagttacggttcacctgggctggttcacctgcactgaagtggattgtgccaagtgaaggatctttgaccacaagtgtcatcctgtcatcca

SEQ ID NO: 46116 - DNA, 1137 bp, Bovine  19866880697597
  misc_feature (1)..(1): n is a, c, g, or t
natttggctgttttcatagcagctgttaatgaagcctgaacttccaagtgatgcttgaaggggagggaaagggggaaagcgggcaaccactttttccctagcttttccagaagcctgttaaaaagcaaggtctccccacaagtgacttctctgccacatcgccaccctgtgcctttggcctagcgcagacccttcacccctcacctcgatgctgctggtagcttggatccttgtgggcatgatccataatcgcttttaaggtaattgccaaggtcttccggtgggttgcactactagaaaagaccattaatttacctgtcaacaggtaatatttagaccacaactaaaaagctcttaaagtgttgtaaatgtgtggcattatccaatgactttaaaaaaacatttcaaaccagtaagtggagaaatagcatctaagaactgtcatattgggtgggagagtacatttatgaactgaaaagtgttttggcagttgagagggctgttgggtgggattgcaaaaattctctgctaagactttttcaggtgaacataacagacttgaccaagctagcaccttagctgaagcagattctccagtgctcttcaatagggttattgataaaggtttttcttttcctgagaaaacaaaatcttttttgttttctcaggttttgcttttttgccttttcttatcttaaaaaaaaaagcaaaagatgctggtggttggcactcctggtttccaggacggggttcaaatccctgtggcgtctttgcttgacttttactctccagactctacttcctgtctctcaggtgctaggccttagaattaggggaggtggaagataatagtgtgaaactctgcatttgtgtttacatgacaacgtaatggaactaccatgcatctaatttgcagatattcctcatgcaactagtgattggagaagcctgttttgaaaaattgattacacatatcaataaaaattgaaaaaacttcactggtgtgattcatttatgtatataccaaacttctgttcgtgaatagaaaatggatgttttgtgagtgttctgcctggttcctgtataagtatatgggttctgtcatgcagccccatctccaggaagagcagggatcta

SEQ ID NO: 46117 - DNA, 1096 bp, Bovine  19866880742117
  misc_feature (1)..(1): n is a, c, g, or t
nccgccccgcttccgcggggcgcgcgtcagagctgcccaccctgaccgagctgtcactggcgctgcctctgcccggctgcgcccccccagcgccttgccttctcccagaccaggcggcctgttcccgcttctggaggtttctgcatcccaccccatcaaagtcacttttaggggcaaagggagcaggtccctcctccgactttgccgcctttcctcattcttccctagaggcggcggtctggcaggcagcgtggaaagagccctagatttgaaacaggactaacccaggctccaaggccttgcgtcagtgtgattacttaagccctttgagtcttagccttctaatttgtaagatagagaagcatatgttattcttgacgccatgatggtgaggatgaagtgaggttttccttcctttctcctgtttattaacactgcgtctcaggcacggtgctaagcttgtacggtatgggcatcaacaattctttattttccccttgcaggtcctcaggccagggcaatgttccgaactgctgtgatgatggcggccagcctggcgctgaccggggccgtagtggctcatgcctactacctcaagcaccagttctaccccacggtggtgtacctgaccaagtccagtcccagcatggcagtgagttcagggctcagggagggaggaactccctgggaggcaaggaggagtctgcttcagacaggggtggggctaaaagtcaggtaggtaggacaaaagtgaagtagctgccagacctaatttggaaccagttgtgatggggatgtggagaggttcttgaatgatgagccccggacagaacaaggcagaaagtgacctcaaaacatagcctgtcttcactcctaggtcctgtatatccaggcctttgtccttgtcttcctcttgggcaaggtgatgggcaaggtgtttttcggacagctgagggcagcagagatggaggtaagatgttcatggctccgaaggtgaggggcagggagctgggcaaacagaatgtctgagttccatatccttccttgttcaacctccagcaccttctggaacgttcctggtatgctgtcactgaga

SEQ ID NO: 46118 - DNA, 1014 bp, Bovine  19866880743302
  misc_feature (1)..(1): n is a, c, g, or t
ncttcctcccgccacatcaggcgtcatgagggcagggcgctgttgctgtccccacccacaccatcattcaccctgctctgggcatcgtgggcttcctccagctgggagttcagggcttgggtctggttggccatggccgcctctctctcctgggcctcctgcagcttccggagcagctcctcctgccgccccttggcctcacgaagttcccgcgcctgtgcctgctgccccgcccgagcctcggccagctcctggggtccaggtgggcgaggggaaggccagccagaagttagggcatggtcctccttagcacccagccctgggccactcacccatctcaccacaccccaccttggaggagctggtctctctcctgccgcaggtcactgtcctggcccaggctgccagccggacacccgtctgccttgctgtcccccagcgtctctgccaggaattgtcactgagacctgcacgtacagcctcagccaggagctctacctgcagtgtctcacggaaccctcaccccagcttggttcggggcaggggggcagggggtggatcttctcagcccattttctacacacagactcagagattttaagatatttccttaagatcacacagcacgtacagacccagggacaggactggaacccaggttggactcaggtgtgctgggaaaccagctcagcccccaaggtgaggggagaggggaagagacgaggtgctgggggcagggtacctgacagcctgtcctgtagagtctgcatttccttccgcagctgctccagctcccgatggtccgagggggtctgcagagcctctgcagtgtggggacacccgtaacattgaggagcttgtcctgtggcagggcaaacccaccctgcccaggccctgatggcacctgtaccttggagcttccagctcagctccagcttctcctgctccagacagcggagcttccgctccaggggagccaactgctcagagctgctctcagggccaggactgggg

SEQ ID NO: 46119 - DNA, 1899 bp, Bovine  19866880757846
  misc_feature (1)..(1): n is a, c, g, or t
ngtgatgagatgtgggtgtcagagccctacagggaagatatggccagggaggtggctgtagttgcagccccagtgggcaaggtggttgcttaaactaaggaatggccgtgggggtggggataaccgggcacagctgccaggaccaagtgaggaagtgaactcaagttgctaggggagaaggtgcagaatccacggtggtggccaggtttccgacaggagccctggaggctggtaaggccatgactgcggggaaagggcaggccagggatggctagggtcccttggagcaccgagattttgaaagacctgagggatgtcagggtgagatgtccagagtgcgggcgcacaggagagagaagtctgagctggagacaaggattttggactggtgagccatggtcatgatgaggtcactcagggagtgtgggaagggccaggagagggctttcgggggagcgcgggaggtcacttcaggacactggggaagccgagaagagcgaggcacagcctgaggtggaggacccaaactcactaattccctccggggctcaggttggcgacactgcggacagtttcggccatcagtttactccggtgaggagttttaccaccccgccaggtccttcccggcgctcgccctggccccgcccgcagcgcagcagctgcaaacctcacctccgcacgcactccggctggggtcctgacccggccacggctcttgggtcccgcccctcgggcgttagtacggctgggccaggccccagggtggcacacctgcttcagaccccgccccccgacagaaacgccgcagagcagcacgagtcgctagatgctttccggttccccaacattccgccgccagctggcatcttttctcgtagacgccatcggaacctgcaccctgggcctcctgtgttcccaggggactcgctagatttgcagcaacgtctcactgatacctgagtgctcctgccttcaccctccctgcaaccctgcaacgccattggcctcaggatgggctttttccgaagcgcactgcctggccgccccgttgtagaaagctatctgtgcgcttgcgcactcgggaaggcaggccctcgcttatctagggccggtggctgactgctttactgcgcgtgcgtcgggacaaaacggaaggatgtccggctctagcccttgggccatggcttggtttttgttcaggactcctgggccgtgcgcggtggtggagaggaggcggcttcggatttaagatttccttggtcctcccagggcagggtatgaaaggacagaccttcacctggcacctccctccccaaccacttaagagatgaaatccaaacctcttagccgagcctcttcatcttttacagactgacccatcgaatctttccaacatcgtctcttaccccgcttacctataaatgctggctagcccctctgtatagacctgaagctagcatggcctttgtgaagcccttcctgaaaatgctccatccccacaactcctgggtacaaccgggcactcgctaggctaggacttcctctcgccaggctaggacttcctctcgcccccacacagccgcctgctttcattcactggctggtagctaggagtgtccacaggtgtccgtggactgcaagctccccagtggcaatgtattctcaaacgtgtccctccaactctgtatcaccaacatccagcctgaaatgaccaggaaagagtgtgctcaaagaagacaaatctctagccagcatggcaacaaatttattagttcagagtagaaaaagcaatagtctataaatggtttgattcttcagtaaaaactgagcctcttgactggagagcagccagcctgctctccccgactctgaacagcttgccctaccattaaggca

SEQ ID NO: 46120 - DNA, 844 bp, Bovine  19866880828942
  misc_feature (1)..(1): n is a, c, g, or t
ngctcagccttcagccctgcctcctcccgccgcaggagaccccttgcccccttcctcaccagggtccaaaaatttgtccacgtaatcaaaggtgtcaaaggctgtgtggtaggtggggtagatcccgggctgaggtcttgctctgaggaaacaagacccacggtgacaggcttgggatgagaagtggaaggaggagttcagtgtagagccattatctcaagtcagttgtcaccacacctgtgaagcaggttctaggtgttcccaccttacagaggaggaaatgggctcagagaggttaagtaaccttcctgatgtcacacaactaagtccagagctgggtcaggtgccagcttcctgtttcgcatgaaggagaagaacctgaggctttgcagtcaaacaggaggattcacatcccagctccaccactcaggagcagagtggccatggaggggagaaagggtattttggagcatcaaacagggaaacagtctggcactctgcagcccttatctcattttaccctcaaatcacccattttatactgtttcttaatgtactctgagacaaactttttttcacattttaagatctctgaaatcaggatgcttcttacagtcagtgtcatcctgcaatcaactgaccgtgtattttttcccttctgaataatgcatatcacaacagtgcatcttatactcagtggtgtcttaaatttgataaaataatatagatgaggatgaacatgctcaagagaggtaaagaaacttggtcgaggtagcacaactactgagtgatggatgcagtttgcacaggagcagccccgagagaggagggggctagtggagca

SEQ ID NO: 46121 - DNA, 1202 bp, Bovine  19866880838902
  misc_feature (1)..(1): n is a, c, g, or t
ncttccttggccccagaccttactgctgcaaaaaatccttgagcccttcttctaggtcagatctggcttggtagaggctagagaacccaggatgacttagacacagatcctggaggtcttcatttccaagtgccatgcacgtcagaccctgggctcattccttttacccatggagaggtaaaaagtggcctccttctcattctgtatcagagttggacctgactgggtttctagctccaggaatctaagtgattagctggcctgcagggctccctgagagttcctggcgcagcccacggccatccctcccaggttgctgacctggtatcaaggctggacaatactcaggcaggaagatactgaccttttgtccctatcgtcctatcctgccccagccaaggaaccttcacacttgcctcaccttgggagtcctaaaggcaggagacctgagatccacccccacctcggcatcaggctgcctcaagacagggttcaaagcatggctcccctacttgctctgacctcaggcaaggtagttaccctctctggggttcagttttttcatatgtaaaatgggtttatcttccgaagaccttaataattcaacactgcccagggacagtactgctttgtataaataaacccgcagattccaggccactcttaagtctacaacctgagtttagaaaaagggagtgtggcacaccaatcctatcacaccagttccaccagtcattaatgcaagtttttatttggctgtatatacaatttaagctattaaaatttgtacaatatttacaaattaaataatcatctgaaactgtctccagcaactcttgtaacataaaaccaaggggaaaaagacaggggcaggcaaggccttggctcctgtgggccctacctggcccagagccttttctaaactggaaagatgaggaactcagcactcctgcttccctttcttgggggtcaggcattccaattcaaaatgtaagccagaagacagcaaggaaataactcccactcttctaaactcaagaaaaattctgcaagttaagaagtggcctttccgtaggttctgaggcttgcagtggttcagaatcagacacacgagctctcagcctagagtgaggctgcccggtgcctgctgggtgagaccagagtctcaccttaaactacagggagaaaagggcccggggggg

SEQ ID NO: 46122 - DNA, 2277 bp, Bovine  19866880841143
  misc_feature (1)..(1): n is a, c, g, or t
ntgatggaggccgccctgcacaatgggaccactctgggccccctgagcgtaggcgggatctccctcagttgtgggcttatacgtcagacctgggttctagcaatggcctgccttgccatagtacccataggagtgcagcaacagttggctgggggcagacaaggccactcaccattgagcattgggggtgtggaaggagatcctaggggggatgagtcatctgaatccaggtaccacgtggcttcatccatgcgggaccttctcctagtgagggaatgagaaggagtcgtgcttcgtgaatctcaggactgctgggaggcaggagctgctgggtaggtggcagtcaggcactcacctcccgttctgggcttctccaggcttggggggagctgggaccccaggcccagcatgctcggcgctctccattgcttgagtcctctagacgtcttggggactgtcggccccatgcctgccctggctctgcaggctccactgtggtgggtagggtgagggggggaaccgaaggagtctgagtcaagatcaaggaccctgatccttgtcctcccatcgtaagaactgggctccaggggcaacttcttggaggatggggagcggatagtcaggctgggccccattccattcccatggtaagctttgggcttacagagaaattgcacaaactggggtggggtaggtgagtgtgggtcctgagactggcagtggggcatctcttctagtccttcagctggcatttgctgcttagcacagacactgcagcaaactgggtctgaattctgaccctgccacttatcagctatgcagtattaggagttacttctttcacttttctcatcagtaaaacctaggtaataataaagacatctacctcacagggtcattgtgaggaattaatattagcaactgttagtcactcagtcgtgtctgactctttgtgaccccatggtagcctatcaggctcctctgtccatgggattcttcaagtgagaatactggagtgggttgccattcccttcttgctgctgctgctgctaagtccctttagtcgtgttcgactctgtgcaaccccatagacggcagcccaccaggctcccccgtccctgggattctccaggcaagaacactggagtgggttgccatttccttctccaatgcatgaaagtgaaaagtgaaagtgaagtcactcagtcgtgtccaactcttagcgaccccatggactgcagcctactaggctcctctgccatgggatttcttagataggtataaaatacatgaacagttaagaaaaataatgcacttcataaaactaaagcacaaatgccccacaagtgttcattgacacatattgataacactaaattgtttttaacgtgtaaattaagcatatgaactctttaggaaattaattaataaaactaacctaccaacaatagaaatctatagcaaactatgaaacaaactggaataatgaatgtaaaaattttaagtaataccttaaatattctgagaaaactcttttaggaatcatacagttttcagcttataagcaaaatgttctgtatcactaaaaatgttggaaaccttcctagttcattaaggaataccagaataaccttgatatcaaaaactgacagaatgaacaatgaaactccagatatatctcacaacccgaatatagttgccaacattttaatttaattctaacaaatcaaattcagctgtatattaaaattatgacaaagtaaaatttattctaggaaccaatgcttgattccacattatattttttgtgatttacagttgcgcctttcagcactttctaaagttcttgtactcacaaaagaattttatataagtgagatgtatatactgactaactttacttatgtttttaaaaacccttgaagtaaaggaggcctaagaataagaactaaatagaaaagccttttcatttcttccaggttttcctgcgtctttcttgcaggtacaactatatcctcttcttttggatttccaagtaaacatcaccttataatctttgctgcacaaattctccatttccagagttcttccaattaaacaaatagctgtagttcccctagttaaactacaataaaaaccatctattaccacatttcctttaatctattctgtacaaattctaatggcttcactgtgtaatgctctcatttatgtccccagcaaggagaagaacactgctgtttaaattattcaatatttcccaataagtatattctc

SEQ ID NO: 46123 - DNA, 854 bp, Bovine  19866880892137
  misc_feature (1)..(1): n is a, c, g, or t
ncacctgttgattcgtgcatcctacctgtaggcacacccaaaagtgtcagggttctcagtgtctttttatcctgcccctgcacaaggcctgtctggatctgcggaggagtggggtttatcaaagagctgacctgaatcttgtccctttatactttcctaaagtcagattactcataattcctggtacttcagttttatcatgtacaccctcttgacacagggtggcactttgggaatcacggcccttgatctgagacagcagataaagtcacctggagctagcctggcccaagttcaagtcccaatcctatcactcactcactttgtgaccttcgttaccttatttgaatagaggtgttctaattcctattcgcagggaacgtgtacaaagtgcttggtacccagcaatgtcagtacagacttggaggggagcttgagtctgagactcgtgtgctttgtgggttactcagtggactgtcttagttggtctggaaggtgcctggcaccttagatggggactcagcagtgtaactgaacgcggcccgcagtccctgcctgtacgtggtttacaggtctgtggtacagaatttcaaggagtcacgcaacacgtgttcactggcgtccactggtgacgtcggtgctggccttcaccctgcgaggtgcaccgagtgcagagtctgtccagtcaggccaggacgccacgccctcctctcatcccttctcttcctaggcccccccggcctgccaccgcagctaaccccactgaggagactgcccctagcgctgttgctgccacctcttccaccatcatccccagctctgaggccaccaccccatccccgggagcctcccca

SEQ ID NO: 46124 - DNA, 1560 bp, Bovine  19866880899729
  misc_feature (1)..(1): n is a, c, g, or t
ncgcacggggagaggggaggccgagggggagagggcagccccagggtgctggtggccggacctgaatgcgccgggaggcacagtactggatccactccaggtgcacggcgcagaaggagggcagcgagaggccggacaggcgaaggtcatagtcctcatccacgctcagagagaaggtggggtcggagtcagcatagccaggtgcccgcacaggacgcagggccgtcgcaatgccttcgtggctcagccaggcctccagctttggagagcggctcacgtagtagatgatactctgtgaggagagggcaggggtcactgggggcgcgccctcaccctggccactaggagagatagtgtcagggtacagagacttctcccggtgagttccctggtggtctagtggttaggactctgcactttcactgcagaggtcctgggttcgatctctggttggggaactaagatctctcaagctatgtggcctaaccaaaaaaaaaaagaagcttctgccttagattgcgctgaagtcagcttcccaggacacccatcccctctcccatttcagctccctgaagccacacaggcctgtctgctccttctctcagtcagggaagaggaaggggaaggggaaagctgacaggaagcacccctccttacggagcatccactagagagtgctgcctgtggcaggtgctcaggtcacgggtccttcaagatagcatgagtgtgatcacaggacttcccctcaaaaaaaagaggcacagcatctgtacccaagccaggggctcctcgaccccttaagagaatctgctggggacttcagtggttaagactccgccttgcagtacaggggacgtgggttccatctttggctggggaactaagatcccacacgccgcagggcaagtaagcccacgtgccacaacttctgagcccgtgtacagccagagaagctgcatgccacgacgagggtccctcgagccgcaactaagacctgactcggccaagaaagtaataaaatacgtatttaaaaatgagagattctgctggtttctaagcaggggcgtgggtgaatggagaagagcctttggacagtatgcggctggtacagacacgatggatgggcggtctgaggccgacagttggcagccagtcaggttgctgccctggatggagccaacgcacggtggccttctgcctgggggagggatggggaacccagagctgcagaggctggtccagctggctatgaacaggggcctctcggcaacaggagcccagcagcatggtaggacgtggggccaagagcctgggcaaagtggccatggtataagccctcctaggagcgagtgcgggcacggggcatctgagaaggcagttgctctgacaagtgacgcagaggggccacccactggcagcaagggtcagctgggggacacaggaccgtccaagagagaacctcaggggagcaggctccgtggactccaacaagccgcccaccccttctgggcccacgacacgccgcagggcagatgctgagagagcatgaggggacctgat

SEQ ID NO: 46125 - DNA, 1421 bp, Bovine  19866880920167
  misc_feature (1)..(1): n is a, c, g, or t
ncagggagccctccagcccccactggcaaggccaggagcaggtgtgtatctctctgggcccctgggcaggagggagggtggagggactgatagctctgggtttagctcctccccttctggggatctttagctctgacctccaccggtgacctggggtgtaagccgctgcagcggggcctctttggccccctgggtcccctgtaaccggcgtagccgtagctcctccaggccttgccacagctcctgacgttcccgggccttctgctgctccctggggagagagggagaggcagtccccttcctggagctccaactgcaatctaactccctcaccactaccccacctgcaaagagactcagtgggaatcttccacttggggagaaaacaccaaggagagatgggtcccacccatggtcatggagtaggtggatcagcctggccctgagaggccccgcctgaggggctgttgttatgttgtttagttgctaagtcatgtccaactcttttgcaaccccatgtactgtagcccaccaggcttccctagccatgggattttccaggcaagaatactagagtgggtagctatttccttctccaggggatctctccgacccagggatcaaacctgcatctcctgcattggcaggtggattctttactactgagcccaagtacttcctacatgtgtactttaatacttaagcttctcaggcggtgctagtggtaaagaacccagctgccagtgcaggagggacaggttcaatccctgggtcaggaagatcccctggagaagggcacagcaacccactccagtattcttgcctggagaattccatggactgaggagcctggtgggctaaagtccatgtggtcgcaaagagacagacataacttaagcaacttagcacacacacacacatacctgcaaaactgaggtattacagaatacagaaacttcaaaggctgtctttggcttcaagaaaattatagacttggaaaaacaaagcataaatagatgaaaaggcagataaccccagaagaaattaatattaattatttctaaagtactgaagcactctgaaaacacaagacccatgtttcagtacatggcagcctggccatgaatacagcaatctggttcctagacccagttctgcagcaatcttagattggtctttccttacttagacaagttagaattagaataaaaaatctctcatcatttccacctcaaaatccatgtcattcaaatgagtgtagcatagggaaaaccacaagtgttgagctgagacaagacactagatcagagggaataggaggccttcctgaaagacagcaaagacctaagcatggttgggatggatataaataagattagcatgtattacaaggtctcatgcaagagcagtggtaagggagg

SEQ ID NO: 46126 - DNA, 749 bp, Bovine  19866880942145
  misc_feature (1)..(1): n is a, c, g, or t
nctccctcatccttgatctcggcctcaccgccaccatcactgcattctccattctaaccccgctgccgcgctcttccccagccctacccgactctagtctctgctcacccctcttctctgcctccctgagtccctccacatgaggtcctctgaggacctcgtggctcctgggtgaggggagaggctttgcatggctgtatgtttgtgttcacgcatgtgtgcccagggtctggccagctctggccagaagcagtgtcagtggggtgcacaccccccctcaccagcagtatcattggtggagtagccagcagctcccccttccagggactgagatggggtcaggggtcctgcccatcactcccagtaactgtgggtgtatgcaagggaaagccaggactcggggctcatctcctgaatgggggtggggacagcggctgcagcccatgtgtctttctgcagatctccagcattctggacatggaggctgtcaccttcaagaagctggtgaagggccacgcctactctgtgaccggggccaaacaggtactgccccaggtggaggtcttccccaaagggtggttccagcctccttgcctctctggcctgtggccaaggctgtgggagaggccgactctccctgtgaccttcagcagcaccttcctatctcccagggactctcgcccaaagatggttatcttgtccctccctgatttactgtacttttgtgtgtagagctgcttctctcagca

SEQ ID NO: 46127 - DNA, 967 bp, Bovine  19866880943086
  misc_feature (1)..(1): n is a, c, g, or t
ngaaatgatgaaacagctggtccgggggatgattccccggtatgaagtgcctcgagtcaaactcacagaaagaggaatggtgggggccaggggctggagatggggaggggagctgtactttaatgaagacagagtttccccttgggaagaggaagaaacttatggaggagaaagatggtggtggtatttgtacaacaatgggaacgtacttaaagccactgacctgtgcatttaaaatatggttgaaatggtaaaccgtatgctatgcatgtttcagacttcctatagctcagacagtaaagaatgtgcctgcagtgcgggagatcagggtctgatccctgggtcaggaagatcccctggagaagggaatggcaacccactccagtattcttgcctggagaattccatggacagacaatcgggtggcagagtcagacacgactgagtgactgacactttcatgcatattttacatgggtcatatagacaggaggccccagcctgcccctctggccttggccccgtccccagcgagcctcctgcaggtcccagctgctccaggggttctgcccctgtggcgctgcctccctcctgatggggtctgccttccagtcaagagtctcgctccccaccctctagcacagagaagagggaagagttgggattcagcctcgccccagcccagcatcctccaaacacaggtagttccagtagctggggggggggaagctgcttcagctattccagaagtttctagaacgcaaacaatagagggtttgtctccagtcgatttttgtttcctgccattcaagctgcgtgggcctcggcgtttcttgccacagctcccatcacacatgcttaacccgcgctggggcccggagcaaggggtgcaggaggacacgagagattaaagagcaaagagtacacaccgtgaggacttgttcagagttccctggggctacagatc

SEQ ID NO: 46128 - DNA, 1184 bp, Bovine  19866880955239
  misc_feature (1)..(1): n is a, c, g, or t
ngaaatattaggaatggtaggaaagaaaattggaagtttgaagtggaaaattcggaagacagaagtacaggaaggtgaagaaaaaactagagaagatagagacacacgttttagaagacaaaaaacctgagcctagtaagtaggcagaaaaaaagacaaatctaggagaaaattgaaaatacgggcgagtgcttaagatagaatgaaaagaaagctattggacgcaaacatacaagatagacgtctaaaaatttagatagttcaaaatcaataatgttggataaattacaggaacaaaaactaaggaaatttttatagccaataagaatttattgtaaaagcccatcaacttatttctggtggtgcaaaagttagatctcagaagatgagggtttttttttttaaaactactgtagaccaggaccaacttagaagaaaatccggaaactaggagagtcaatttaaaatctcagcaaaaagttactgaaggggactgaagtaacttaaaagttaagaatgtatttgggagagttaaaaatctgaaaggccttaaatgcggtagcgtagtttcctttggaaaatgtaaaggactttataagtgaattaaattgaagagcaagaataaccatcgagttattggactttgagctaagatgaatgtttaaatcctgaggactaggcgctaaataacagctgacgcaggtgctacgcagaagtggattcagtgaagctaggaagacaggagcggcagacaggattcggagccagtgttggtgaaaactaggactgaggagccagcggcagttcgtgaagataggaaagagaagcccgggagccagtgcgacttggtgaaggaagctaggaagaaggagcgagtcctaacgatttggaggtgaagctaggagaggattccaggaaggaggaagccagtgcggtgtggtgaagctagcgtgcggcttggcttggcaaccacgcggaggcggcgagcaggcggagtggaggatagatagaggatcctagagcagcagaccagtgtacgagccccgcagggagagccagtggtgtggtaaaaatccgtgaagtcggcactatcgtgggttttttttcctcctgtaactcagtatggtaatatctcttattaaattttcctaatagtaatgggggagttgtgtacttaagcataa

SEQ ID NO: 46129 - DNA, 662 bp, Bovine  19866881011578
  misc_feature (1)..(1): n is a, c, g, or t
ncgacgggggctgacgaaggacagcggctcagatcctgaccacctgggcggcagcacacggactctgccgcccctcaccgcctgtggtctgcctcctgaggtagagtcggccgaaggtgccccccacctggcctttggtgaggcgccccgggttcacacagacgcagccgaggatgtcctggaggggaggaaagagtgactgtgggtctggaaaggctgaaaccatgggcatggatgtgaagaagctggactcatctaggggttcagccccagaggatgttatagaaactggaaacaaaggcagacgaaaaccatctttgggccaatgtgttaatttattacagaaaactctgagtccctcttgtgtctccaaaacaaaataaagaaggtgactcagccaattcccaaacgtggagacaaacttgctctattggtttcacagcgtgaaaggtttacctcctgaggttggactggctctgctttggcaagaggaggttgatggggtacattcccccacgagagcccgaacctgaacgtgcccaagagctgctgggagctcatctcagaattcagggaggggacaggcaagcccaggtcaccccaggtggccatgggtgagaaccgggttcgagggccttccagctgcctccggggcttccagg

SEQ ID NO: 46130 - DNA, 1710 bp, Bovine  19866881023966
  misc_feature (1)..(1): n is a, c, g, or t
ncttgcgccaccgcatggccctgccggagcagagctggcactcccaggtgagccaagagggtgcagcgggcaggtctccaggcctgggtgaggcaggtgcgaggggcagaggctgcgccagagctgcccttggactggagatggctcatgggtggagcccctgggccaggctgcggtggacagctggtgggcagcacatagggggctgggctggggcggggggttgggaagaaagaagctccctcaccctcacatacctctcctctggccaccaaagctattggagttcttagatgtcctggatgacccagtgctgggctacctgcctccaacggtcatcaccatcctacacgtccacctgttctcctgtgccgtggactacaggtacccaggctcagggacctgggggcctggggctggggccaggctctcatgggcaaggaacctgccccagcccaaatgtgaccccttccctcccaggcccctctacctccccgtacgtgtccttgtcactgctgagaccttcaccctctccagcaacatcgtcatggacacctctaccttcctgctcaggtatgcaacccctcctacccaagctccccatccatcccaccccaagtcggctgtagctaccccttccccagggtcccacatgcctgctgtgtgtcctcaggcctcaggcctttctgtgcatctgagtgatccctctctgaggaagtcaaggaggtttcccctacctagaggcagtcagacctctgaggcagagcgtttgagctcttgcctgataatctcacttctggaggtcgtcctcaggataaaagaaaggataagaagggtaaaatataaagcctccatagtataatttaaaatagttaaaacttgtaagcagtttatatgacctcagattacgacctcagtcagcaaacgtggccttgtgctcagtcacttcattcgtgtccaactctttgcgaccccatggactgtggcccgtccggctcctctgtccatgggattctccaggcaaaaacactggattgggttgccatgcccaccaccagtggattttcctgacccaaagacggcctacccaaccattaaagtcaaatttaagagtaacattgaaaaacgccatcaaataatatttactgaaaaaaataagatataaagccatacatacatatatttttaaagattcttgggggtgtgtttgtatacgtctccgtgtcttcacagaaaagactggaaggagatggatagctatccctcagtatctgcaggggattgcttccaggacctctcgtgacaccaaaattcagggctgaagtcatttatataaaagggtgcaacatttgcatgtatcccatgtacatcctcccatattctttaagtcatctctagattacttttaacacccaacacagtgtaaatgctacataagtagtcaatgctgctgctgctaagtcgctccagttgtgtccgactctgtgcaaccccatggactgcagcccaccaggctcccccgtccctgggattctccaggaagaacactggagtgggctgccatttccttctccagtgcatgaaagtggaaagtgaaagtagttgctagcatgcaacaaatacaagttttgctttttggaactttctagatttttgttggtttgtttggtttggttctctgaccaagaatggattttttaaaaaatattt

SEQ ID NO: 46131 - DNA, 686 bp, Bovine  19866881044471
  misc_feature (1)..(1): n is a, c, g, or t
ntgatgctcttggaacggactttcctgaactcacaagccttcccagaagaacgctactacaggtgagcctgtccaaagctcttgggaggtgcagtgagatgaggctgggcagtgggtacccatccaagggaggagaatgtcacttttgctggcctttagagcacaacccagtcccttgagatggctggggagtgaggctcaaagagggggaggcaaatcagttaaggtcaccctgggactacagcctacatctcctcccactaccagcagagaggtgcatttgtccctagctgtatacaggagctgttgcaggctgaagctctgctcattcttggcccctgcatgaccttgatcctcccccatttctcccttcagccatgtgctctgggcaccccgcaccggctctgtggccacgttccctggcctgtccaatgcctattcccaggccaagaacacaggccatgaacctgcagcctgggctgaggtgcagagacagctcagcatcgtggtggcagccctggagggcgcggcagccaccctgaggcctgtggctgacctctgaccccgccctcattcttcagctcccacctactctctatcctactcactccccctccaggtttctttgactatgtccccatctccctttatgctaggaaagggcacgaccacaggaccctctcaaa

SEQ ID NO: 46132 - DNA, 1878 bp, Bovine  19866881170726
  misc_feature (1)..(1): n is a, c, g, or t
ngccagatggagagataagagcagtttcagcatgttctgatgcaatcctatatcgacaggggcccacaagccaggaaaaaagagcagcagcaggctttctcggcactgaaaacagggcccccaaccccctcacagacacactgcctcccaaatctcaggctgctggcttctgctgtgaagctcactaatgccaggtggcctactggggaagggggagagacaggagaggtctgcgagttaatgataaacaaatctggccacttgtcctcaaccccctctgaggctgattctgtttcacttttacatttgcagctgcaggctctgctccgagctggcccccatgctcctcccagaaagcattcaaacccagaggctcccctcccttccacagaaaaaggcagcagcagaaatataacccaggtcaggcacatcctgaaccagatgtttagaaaagcttggtgaagttgagacaggagtttagacaactaaaatgggcctggtacactaatattcagcatgcaaaccttaccaccatgcacggcacccagggaggctgctgatgaacagtatttaagcaaatttaaacatgtttccacagcccaaaatgtttaacagatccctgccagcttctccttttggctcgctctttcaagtcaaactgttctctcacagtcctgctggactcgctaggaatttatccacctctgggaggcaaagctttcaaactaaggtgaacgagccccaggggaaccagaggctcattgagagcagcaatgctgaccagggtacctggacctcacagccagccaggatcctgccctcctttccagaaggccccagaggctgggaaacttgaaaaaccacatacagttggctgtcgtcttaccctgacaacgcctataacctcagcagagggagccgccatgcagatagcaaggctgatgggaaaagcgttctcactcaggctgggagagccttgggcagcctctgggctgtgtccctggcatcagatggaagttgtctgatgacaccgggcgccccaggctgtgccagagcttgcttacctctgctgatgcgctgcttctctccagacaggatccccggcgtgtcaatgatgcttatgctgtccaggaccgggttgggcagctgggcgcacatgaacctgcacgagagcaagagcccggaagagcgcggtcaagattcggtatcgctgctccgggtgaaacagcagtgatttctgtactcccctcatctctgcctctggcttccctttcagaagcaaggaacctaaaggaggtttctctaatgtcttaagtttccaggggtgggaacccctgacggttcagtgtggaggatgctgcacttccactgcaggaggcacaggttcaacccctggtaggggaactaagatcctgcataccgtgtggccagaaaaaaagtttccgggatggccaacagattgcttgtattaactgggaatccaaccagcaggctccaactgacccacatcagcacttccctcactgagctcttccccccacagttcgagagttcaacttccaagttgctgatgtgttagcgaaaactgcacacacaagcttcagtcaccattcaaacccagaaagaaggcaaagagtgacaactgggaccttggaattgcatattaagattttcagccacctggctaaacttccacacgccgagagagatggtcctttcctatacctgctggggccagccctcccttccacccagctgcttgggtgaaaggactgcggtgggcagccagtgacagccggggaccacacaggctggtggatggtggggcagggaagcacagacaccaaattctctaaagtcgaagcagatcagggaaga

SEQ ID NO: 46133 - DNA, 712 bp, Bovine  19866881200581
  misc_feature (1)..(1): n is a, c, g, or t
nctgtcctgggagtcctgcccagggcccgtgaaagataccaggttacagaagacaactcaagcagcacactctacagctcacagcccttccgcaggcttccgtgtccacctaacagtggcccccttaggaggggcactgtaatccccatttgccaactgaggaaaccaagacttggatggttttcacctggaaggtgaaaaagagcgcctagcgcgggacctcaatcggtgccgcctcactcctaattccagcaccctttctgcccagtaccccttgttcatttttaaagcagtcactaaaccccgtgccctccttatgtccccttcatttcacccagcttccctcctcccccagacctacctcatcagtgcccaagcaattcgatttccgcttccgccccggctgagctgccactgccctccgggctgatccattctgcaaatgatacgggagggacagaaggggtggctgtgaggtgagcccaaaaggggctaccagagggtaggagggcagaagagatggcttgggggactcacctgggggaaaactgaggccggggcagtctcgctgggcactggagttgctggtgaaaccacctccaccttccgtttctgcagagagaaaccaggacaggtgggtcagaaggtagagaaggcgggacctgagaggaaagcaaggtccctggaattgctgagggtaccgttgagcggt

SEQ ID NO: 46134 - DNA, 897 bp, Bovine  19866881205697
  misc_feature (1)..(1): n is a, c, g, or t
natgggaacccgggctgagagacgggcccgttgtgtttgcagggctgcccacttcgggcacttggtttcactggcttcctttgaggccctgctagctgacctgggggcgggaggagatgggtgcgggaaccctgcccttcctgatgagggtgcaaggccgcctgacagccagggctgtgctgacgcttggggctccctctgccccgattcagggctgagctgagccccgacccgctcccaggtcggcgcagccccagcctctgggaggcggaggctgggtgtcctcacacctccttcagctgctctgcccagagagcctggccctggcctgaggccttggatggggaggacccagcaccctgtctggtatttgggccaggagcttgagggacttgctgaaggccgaggagcagggagaaggccttttgggggggtagagggagctgctctgaacccctcatccaggtggaggcaagctgggcagacagaaggaaagccctcaaacccctgaggctgcggggagagggcccagctggcgcggcctggccacgctcctcagccgtgggcgggcgaagagtagccacagcggccgccaccttgccggaaatgtctaattaagggacagagagcagcaccggcaggacccaaccagttctgcttcctgcgactcggtgacacccagccagaggagcggcacgcgggcgagcactccctgtgcgtgcggcggtggcggggacacgctcctggaggtggcaggaagacaggtttggcggggcgggtgggaggaggtgagcaccccaccctgatggcctcacctgcccctggcgcggggtagaagcagcgtggaagcaggccaggtgtccctggctccccagcactgtcatttcgggggtttct

SEQ ID NO: 46135 - DNA, 1583 bp, Bovine  19866881221347
  misc_feature (1)..(1): n is a, c, g, or t
ncagcaggaggccgaatctgtgttggctcagcgggatgactggagtactgggaaccaagccagccgggctgggcaggtgagctgggcgggacagagcgtgtgtacgggggagcggggtgcccctgctcctccctccccttctctagcactgtctccgctgcctcttctacaggccagcaaccctggccacagatcccaggagtcagactggagcagttgggaagctgagggctcgtgggagcaagactggcaggagccaagccccccggcgccaccccctgagggcacacggctggccagcgagtataactggggtggaccggagcctagtgacaaaggcgacccttttgctgccctgtcagtgcatcgggaggctggggcgcaggtactggtgcctttccagtgggagggtgcagacctggggtggacctcagctgagagtaggtctccactccagcccacacctcccttttcagtcgaggcgagactcatggggtgatgacaactgggaaggcctggagaccgagagcagtaagtgtttctccccagccagctggttgatggcctgggcctaccttccaccggggcaggcatgggaagggaagccgagacccaggttgtcctgacaccttcagccctccctttcttgtttccaggacaggcgaaggcggagctagcccggaagaagcgcgaggagcgaaggagggagatggaggcaaaacgcgctgagaaaaaggcagccaagggtcccatgaagctgggaacccggaagctggactgaactgcaggtgtgggcccttcccagtctcggaggccccacagatgtatttattgtacaaaccatgcgagcccggtcagcctggccaggcacatctcacatgtacataatcagagccacaataaattctatttcacacctgttgtgctgggctcagtccagcgcctccaaggaggctagagtctggcgctgccctttggagtctgcgcccatcacggacatgaacatcaatttacttcgaaaaccaagagtaaagagaaacgatctgatttatcagtttctggggaaatgccctctggaaggaaggccggcagcgccagacagacccaacatctgcctgtgagccaggcggaaccggcaggggcgcccttggaacatggggcgcggggaaggggtctacgggcccgaagggtccctgggtccgagccccgagtcggggcaccagcgagaggccgagctcgccccaattgctgggcagaaacccctcggtgattgcgaaggtccagaccgagggtggtgtcagcggcgtcgctggggcacgcaggctccatgcgtgcggctgcgcgcgaagccagctttgcagacgcagcggtaggaaccgctcgtgttcacgcagcgctcggtcttacatagtaacccgcgctggttcagctctcggcactcatcgatgtctggaagtgggggtgacaagtgaggactttaagagggcgccaaagctgtgcgaccccttggtttctggtccgagccgagcttctgcagggcctgaccccgccccgccacgcccacatgccctctggccccgccc

SEQ ID NO: 46136 - DNA, 1418 bp, Bovine  19866881230359
  misc_feature (1)..(1): n is a, c, g, or t
nccggggcacgctctgcggagggggacccggcgtcagggaggagcccaaagcaggggccgccccttcccccgctcaatccaccctcgtgggaacgacggccccgggcctccacggggcacacagtgttctggagagcccaagatgaccctcgcccttaccggccgggctctcggggcgctggcagtcgcggcctgagggtccgggtacccagggcgggcggcactcgcagcggtaggagccgggcaggttgacacaccggccagggcggcaggctgtggggtcctggcactcgtccacgtctgcgggcagcaagtggatgggtcggggtggaaatcacagcttggctcggctagcctctctcccgtttccccagaggaccgacccgggcctcacccatctcttctgggctcagacactggcgctgcaccgggctgtactcggccgggggagtgcaggcacagcggtaaccaccgcgcgtattctcacacactccgttccggcaattagactcgtccaaacactcgtccacgtctgaggggaggaaaagcgcgagtggtaggaaccggcctgcagtcgggtggttttgcgtgtctcctggctgctttcccacggccacgggggcagctgcactcacccacgcattccagcaggttcgagtcgtagtagaatccgtgctggcaatagcactcgtagccgggctgcgtgttcacgcacttgccctccttgcatatctccgccccaaacaatatgcattcatcgatgtctgcagagcgacaggccgtgggcgaccgcaccctctacctgccgggcctctgaggccccgcagcagaggacgtgggggtggcgcttaccgtggaaaggcgaaaagtctgctatggccttttcccaacgcctacttaaggcgatagggcggggcttgggagaggggcggggcagtcggtgagagagtgggcgggccttatcccagtacccgcaattgacaagcaagcactggagggatcggggtggtccaaaccggagggcagagcgggcgagccaagtgggcggagccatgttggggcttaccacggtgggctgggatgccatagttgacaatgttgttgtcctgggtatagcccttcccgtctgggcagaggctgtggaactcagctacagggagacagtggccatggggaaggaaaagagcaggattgagcacgtacgtcctggccatagggccagagctctggcctcatttcccaccaactcaggaaggggccctcttccccagtccggtcccaaatgaagaaactgaggttctggaaaggggaaaggcctgcccggctcctgacctgagctgtagactgggcagggatagatctcgcagtggtctccccagccagcccccagcgagcagcagcactcctgctgggtgacg

SEQ ID NO: 46137 - DNA, 977 bp, Bovine  19866881259930
  misc_feature (1)..(1): n is a, c, g, or t
nattctggagcagtgtaggccttaagcatggggttggccaataagttcatcaggtttttttgtaacatctgtggcgaaaccgaagggactttttggccaacagtacatttttattttttgtatttggctgtgctgggtcttcgttgccgcacaggcttttctctagttgtggtgagtgggggctactctctagctgtggtgtgcaggcttctcctggtggcggcttctcttgtgaagcaggggctctagggcctgcttctacgagttttaggagttgcggctcctggtctagagcacaggcttagtggttgtgcacgggcttagttgcttcttggcatgtggaatcttcccagacccgggatcgaactcgagtttccggcattggcaggtggaatctttaccactgagcaaccagggtagcctagccaacagtatatgttgtgggatgaattatgagcatctggttagaagatgatacattttcacatttatcatgtaggtcaggcaggtactcaacatactttgatatgtggtcagagaggggccctgggatggtgtcaccagcccgcagagcctggggacttctccttaacctggcgcacccccaggggcctggacaatgccggcaagacgaccatcctcaagaagttcaacggtgaagacatcgacaccatctcccccacactgggcttcaacatcaagaccttggagcaccgagggtaagcggggtccccgagggcgggcctgcccagcacagggcagggagggcgggcgggggccggactgaccctgcagcccccactgccctgtccagattcaagctgaacatttgggatgtgggcggccagaagtccctgcggtcctactggcggaactactttgagagcaccgacggcctcatctgggtggtggacagcgccgaccgccagcgcatgcaggactgccagcgggagctccagaacctgttggtggaggag

SEQ ID NO: 46138 - DNA, 1669 bp, Bovine  19866881298558
  misc_feature (1)..(1): n is a, c, g, or t
ntcgtcctgcagggctgcaggtgcgccgagtgcccctggagatcccggaggtgagaagccagcattggggaaggacctgcaggaaggggtgggggatgcagagcaccaagcgcttgtgcgggccccaggagggccaggtggttccgagtgagggctccaggggccctaaggtggctgtcctgacctttgatggccagcacggtgcacagaacatgaaggactcaagttgcttatttatttactcagtaagcttgtctggagtagcttcgttaccctggcagggtccgcagttaggtgggagggtgcagtggcacccgcgaaggggacagctgagatcactggacagtggcgacgggtcgcttgaggcatgctggtcgagcttgtctgtttcagtagggttagtaagagcaccttttcttgttcctgaaagtgtcttggtgtggacaacaacttatgtaatcggtcaggaagtgacaaaaacactaggattgtgtaaggcacagattcagagcttaaagaacaatcatgagagtagtgcccacgcagccagggccactgagagaccaagggcagcacccagaagccgtgcgtgccccttccctacgtgcttgttctccttccctgtcccgtgggagagcagtgcggtcctcacatgggcgagggctcctccagaggcagaggctgtgctgtggtggctctccttgtgtccctggagtctggcacaggacaggctcatgaatgcgtcccgtaaacacttgttgacttaaagacccacaagcccagagaggttaatgtaggcagcccagggcctcacagcatgtggcattggcacccaggcctgccctcagggccaggcctccttgtgctccagggtagagtggtcaaagtgaccctgatggccacatctgggcaaagggtggcatttttactggctcccgaattgtaaggtggatttcgctgaccccagaaaggggccagagatgcctcctgagtggggaagacagacacaggagctggtaaccctggcccttggcagctcccgcagccgttgagccatatcttgggaagctggagaaaggagcaggccctggggtggagggtcagggcaggctgtggggctgctagatggtagggactttctgtatagaccagctcgtgtgtgccgggggtggcatggacgggagtggatcagagctaatggccaatgtgtgccgggggtggcgtggaccgcggtggtgggggatggggctgatggccagtgtgtgccagggggtggcgtggaccactgtggtgggagggcggggctgatgggccgcggccgtggggaccgcagtttgacctactggaccaggactccctgcacgaatcccaggagcagacgctgatggaggaggcgccaccccgggcccagcacagttacaagtactggcttcttcctggccgctggacctctgtgcgctacgagcggctcgccctgctggcgctgctggaccggtgagcactcagcccctcggctcccaggcctctgtcattcctggccccagggcttccagactctgggaacgtgtggaggccgtcatggccacagagagcctaaccgctgggtcactgcgggtgcgtggagggctggaatttgcagtgggattgcttcaggttcttctaggggcaa

SEQ ID NO: 46139 - DNA, 1125 bp, Bovine  19866881302147
  misc_feature (1)..(1): n is a, c, g, or t
nactcgagggacatggtttcctccctggggtgggaagatcccttggagaaggaaatggcaacctactctagtcttcttgcctaggatattccacggacagaggagcacagggggcaacagtccatggggtcgcgaagagccggacacgactgagcgtgtgagcacagacacacagggaacatgctctgctcctcgatgcctgaagggcccactggcagcattaaccttccctttccagacactggaggcttgtgcagcgctcggccaggcgctgaggctccgaactcgagcaattcagatgctgtgcgcagacaccagcaggccctgagcttccatggagggcagggatggtttgcaaggcctctagggcggaggccacccagtggcttccctgggcccgcaggcctgcgccccaattctccacgaactacctcctgttccagctgaagcatcacttccggcccgggtccccccagtctggtccaccctcctcaggacagctccccagccacctgcttggtagcaaccaagacgatacaaataaaccatgctttcttttcatcctctgctttcccctgtgcggcggacagatgctgggaggctgggaacctggcagttcccactgcatccccgcacgtgctgcaggccctcagtgcttggcaggcctggggggccagccgatgaggcctcgagcggctccccacccatgctccgctccccacccatgctccactccccaggccgcccctcggtagagtggcatcttcttgttttgatgtttatgtgttaaaaggaatctcagtgaggaagaggttgtacccatgggtgcacaagaggacagattcagacgaggcatggcacagtgtggccaacgagtgcagggctgggtctggggcacccagtcccagggccccgaactgacaccccagagcgccctggcccgcggccgcccgccccacagtctaccttggccagccgcgccctcttgattaggtcattgagcttcctgagggcagcgtttcggggcagagactggatgtctttgaagaggtcctgctcctcagcctcgaagagcttgcggttgtcggggatgaggagcgggtgggaccagaaggagccgatgta

SEQ ID NO: 46140 - DNA, 1232 bp, Bovine  19866881312657
  misc_feature (1)..(1): n is a, c, g, or t
ngatggcgttgaggacagtgctccgggcaggtcttgcttgttggcaaagatgaggagggtcgctccggccaggcgctagagaagagaaacagagagtaaggggaggcggggtggaggctcagagggcagcccagcccctgcgctaatcacccagagcagctggggtcagagagcagtctggaagattagagcaaggtcccatggtggttgcaaagacaccattagtgtgggcagtgtgaacacagccttcctgtccagccattatgggctggagggagctgtgggctggcctgagaccctgcttccagcacagtcacacccagtgggcacctctcttctctgtgcatcagattcctcttctataaatgggaggggatgatggacaaggggagggggtgatggacaaaggggaggggttatggacaaggggagggggtgatggacaaggggagggggtgatggacaagatgatcctcaagcctctgcttctagattgctgtgacctgatgacctgacatcaaaaagaacgcgactatcccaggggctgtgggggctgagggcaatgagcttcccctcctccaagttcacacagtcccctaactgtcccattaccctgacagaccttcctctctgcctgtgattccagttacttccctctgtgtgtttgtgaccgggagtccctccatgtggatggcggctctaccctttaacaagggccttgaggtgccaggccagggctgaacattcaacagccaggatctcactggacctgcttgactgctgtttaggcctattgtccctaaataattattaacaactccctctttaactctcaaaagtgtcctgaatttcagctaaatgcagtggagtaacctggattaaaccctggaacacagaaaggacattaatggaaaaactggtgcaatccaaacaaaacctgtagttcagttaacagtaacttgttaatttcttattaaatagttttaacaagtgtttggcagttctgtaagatgttcatattaagggaaaccaggtgaaagatacatgggtaacttttcactatctttgcaacttttctataaatctaaaattttatttaaagaagagcattttggctcagacagtacattttaagatcaccgtaattattaatataatgcccatctgagagatgcagtggcaattcagagaaactaagtgccttgcctaaggtcacaaagcaaacagtccaa

SEQ ID NO: 46141 - DNA, 660 bp, Bovine  19866881343873
  misc_feature (1)..(1): n is a, c, g, or t
ncctgtaatgcatgtgctgctatgtctcagaggaggaggaagaggcactgctccctgctggctgctcgggcacaaggttgtgcccgttctgaaagcatcctttcctctgaaggctgtgagagctttgtgggccggggtagacaggcagggctccacggaggtgagcctggaactgggccctacaggggaggccagattggctaagaagagggagtaggttgccggcggtgacaccacagggaagggctgagcctcagcactcaaggcagcggctggggcacagaggatggggggcgaggctttctctgacccctgcctctctgtttctcttctccagctccccagccctattcctttacgccatctctcagcaccatcaactttgaggagttttcccccatggtctttccttctgggcagatcccaagccagacctcggccttggcaccagcccccaccccggtcctgacccagacccaagtcctggccccagccccggccccagccccaggcatggcatcaaccctggcccaggccctagccccaggcctggctcaggctgtgaccccgcctgcccccaggaccaaccagaccggggaagggacactgacagaggccctgctgcagctgcagtttgataccgatgaagacctgggggct

SEQ ID NO: 46142 - DNA, 3353 bp, Bovine  19866881360268
  misc_feature (1)..(1): n is a, c, g, or t
ntccgagacttcatgcgtgaattcacccgcctggagatctgcaacctgacacccgacgcgctcaagagccagaggttccgcaactggaacaccaccctgtatgagggcacctggcggcgggggagcaccgcggggggctgccgcaactacccaggtgacctggggagtggggtcctgggccctgctgccctggacaagacatatcttctctctgagcctgtttcctcacctgtaagataggggtagttgtacttgttttgcaaatttgctttgaggatgaaaaagtgtgaattcccaagagccacctttgactgccttgctggagcctgagctcagggtgcggacagaggagacttccttgctgtccggccacctcctgtcactcctccttccgggccttcctcctggcccgttgtctccctccttggtccttctgtcgcctttccctggggtccatgggcatccttcctctcccaccctgccttctcttcttaacaggtttagcatcctcatcctccccaggttggagtcagcattttaatgctgtccctgcaaacactcaagtttcttggctcctagctccctctggtcctcttacctggcacaaccataatcctaattgaaccctctcgaccggcttcagagccgctgactgggcctggagagagaacacacacttcgggcagtattcggaggaggcaatggcaccccactgcagtactcttgcctggaaaatcccatggacggaggagcctggaaggctgcagtccatggggtcactgagggtcggagacgactgagcgacttcactttcgcttttcactttcatgcattggagaaggaaatggcaacccactccagtgttcttgcctggagaatcccagggacggggaagcctggtgggctgctgtctatggggtcgcacagagtcggacatgactgaagcgacttagcagcagcagcagcagtctctcctcagacctgccgccactgtcactgttttccgacctcacaggacacccatcgtagtcccacctccaaggcccccagcctgtctggacctgtgcccgtctttgctgccttcctgcctgagacagtggcggaactgtccccactcaggggcaccgcgccccccacctctgctctagaccccgttctccctcgggctccttcacccgtcgcctctcgctccggggcacaagggagaattgcctgcctctggaacccacttccccgctcatttctctgctccccttcaaagtcaagtttctcaagatggccagcctccccctttccttcctcactaagttcagtgcttaacccgctccagtccaccttgcgtccccaccatgctgctgcggctgctccttgtccgctttggttttgccaaatccaccaccgctgctctcttcgcatgtcctgcctcctccagcagttctcagcctggctcccagccctctgtgttcaagcattcttctccctcgcaggaatctcatttcagttcttccccagatgaccactgttcgcggtaccgttttctgagaagcctgtcctttccctgcaggtccagccctgtcatagagttcccacgtagctgggtccgtttctgagttgcctttccgtccctcggcctatctctttgctactgccgcgttggtttagttgctatggatttgtacgtcctgcagactttgctgtggtccagtggttaagactctgcttccagtgtagggagtgcatgtttgattcctggctgtggaactgagatttataaatcctgcaattggacgggatgaattccttcttcaagcgtctcttagctcctcttgctctttgcttctggttttctttttttggttttgttttatctgtgtgaattttaggatcagtttaccaagtcctacaaaaagcccttttgagattttaatttggaattgcatagactatatagaccaatttggggagaattgacatctttccaattttattcttcttatccaagaatgtgctatgtctctttattttggtctttagtgtctttcaataaaattttataattttcattgtaaagggcttatacctctgttgagatttgttcctagatactcttatcatcttgttgctgttgtaaatggtatctctttttaaatgacatctgccaggtcattgctgatactgtagtatgcagctgaccttttaaagtttattctacatctggcaagcttgttaaactgtaatgaattttactcatttttctgtattctttttggttttctaactgacagtatagcatctgccaataatgatacatttgtttcttttccaatgcttataacttttgttgcatattcattcttgtttaatgtgctggccaggcttgctgcatgcccactagcactcactatgttctggtcttacccttctctcaaaaggaaaagtttttactattaaacgttgactgtagatttcatcactaaaaccttttctactttaagttttttgtgtgtgtgtgtatgcaccttttatccgagtaatgaaacttaatgttatgaaataactttattattagaattagctgttttaaattacctgttaaaacaataagttacattgatcacttttctcatattaaattaaccttacattcctgagataaaacaacagagtaatgatataaattttttatacaataattttacatccatgttcatgagtgaggtctgccagtagttttcttttttcatgcttactttatctaattttgatatgggtgctatatttggctggcaaagtgaactgggaaatgttctgtcttttcctgtttttctggaagagtttgcataagatggggatgatttcttgcttgaatgttcggtggaacaggtctagaaaactaccaggcctgcttttttatttaaagattaacttttgatattgagtatcttttatggtcattaaagttttcaggtcttctacttcctcttgaaaatattttgaggagttttattttctaggagttcatcctttgcatctggttttctctattattaacatgaagttatccttaatatactatacctcatctgtaatgataacatctcttttattcattgtctcttttgtctttattaatcctgtgaggggtttgtcaatataagtctttaaaataaaatgattttttactttattctttatagtatttttttttccatattatgaatctttcttgcttgttgtttcattcatctgctttctttggatttatttttagaatttattttatgacgttttttccttccagttttattgtgatatattgacattcagcattgtataagatgtacagcataaat

SEQ ID NO: 46143 - DNA, 978 bp, Bovine  19866881371630
  misc_feature (1)..(1): n is a, c, g, or t
naagtttcaggtattacatgaggtcagaataatacaggtttcaggggtcaaatgaattcagggtcagggacaacacgagaatcaaggcctcctgtgccaaagaggtgaggtctggggcagctgggaagaggggcgtgggcagcgttcaggcccagatgcccatgcccatcactggcccctgcagcggacaagccggaggagaagagcctgtgtttccgcctggtgagccctgaacaccagtgccagcaccccctgaccacacgcctcacccgccaactctgctgctgcagtgtcggcaaggcctggggtgccaggtgccagcgctgcccagctgatggcactggtgagccaggggcctttgaggctggggggctgtctgtgagcctgcttctccaggaagggctcacttgcctgcctcttgctctggccacagctgccttcaaggagatctgcccagctgggaaggggtaccacatcctcacctcccaccagacgctcaccattcagggcgaaagtgacttttcccttttcctgcaccccgatgggccacccaagccccagcagctgcccgagagccccagccgggcaccaccacctgaggacacagaggaagagagaggtctggcccgatccctcctgtttcctgacagttgcagaacccctaggtctgacaccttgacctttgacccacaggacccaagtctaacctctagctcctaatcccagactagcattggcccccggagctgacactcttgacccctaaccagtgttgtaactaagcccaggatgtcacccctgagccacgggatttgatcatttattgccccccaggttcaatcctctgacaccaagacacttttgatttccagatcaggacactaatgcagctcaaatgctgcctctagatctgaccctctgaccccgactcagggattgacccggctataagctcccaagctaggacctgtccagcca

SEQ ID NO: 46144 - DNA, 1245 bp, Bovine  19866881390852
  misc_feature (1)..(1): n is a, c, g, or t
ntcctgccccagaccagacacagggtcctcacctccgcctttagccgggccacaaaggacccatttgcaccatcccgggtcgcgggcgttttgggttttgccgctacccacaacctctactcgatgaacgactgcgcccacaagatcctgcctgtgctctgtggcctcactgtggatcctgagaaatccgtgcgagaccaggtgaggcgttactggggctgggccctggggctgggggtccgggggtacctgggccccagctggcctggcgggctcacaggaaccttggaggctccagctctaccccttgctgccccacaggccttcaaggccattcgaagcttcctgtccaaactggagtctgtgtcagaggaccccacacagctggccgaagtgggtgagtggcccacgctcacgttccctgttcctcttgccactttcttgactggcctgttgtggcccccgtctgcctcgctggagtgtctgcagagccccaggggacagattgttgcgcactcttcaacctcccatttcacagctgggagagcgcaggcctggggaggagggcgcccactctaggttgctctgcttcagttagtgccgtcctgtcgccctccccacggaggcctgaggtgtctgtacttgtcgctcctgtccctgcccagagaaggatgtccacgcagcctccagccccgggatgggaggagccgcagccagctgggcaggctgggccgtgacgggggtctcctcgctcacatctaagctgatccgggcacatcccacggctgccctggccgagaccaacgtcccccagagacctgcgcctgagggtgagagtcctggactgagagggcttggagtcccccccaggatggtgatggggacacccccagccccagcaacctctgccctgtgctgaggccttcctggggcttagtgggcggaaactcagtgagcctctgctccccaggacttcctgccccagcccctacccctgtgcctgccacgcctacgacctcaggcccctgggagacccaggaggagagcaaggacacggaagaggacagcagtgctgctgacagatgggatgatgaggactggggaagcctggaggtgaggggccaaggactcccgcggggacccagctgcagggccacagactgccattcggggagctctcgtgggcttggccggagtcagatctttcctcatctgcaagtatcctaagcaggagtcgtggagcag

SEQ ID NO: 46145 - DNA, 2058 bp, Bovine  19866881396594
  misc_feature (1)..(1): n is a, c, g, or t
nctgggtatagggtccgtcctggggtccagaactgccacaacagaggccaaccacagggcctccagagtctaacaagtgtgagttaatcactaacgacaactctggatcttggcttgtccttccagatcactggcccacggctcagagtgacaggggccagagcagaagctgccctggggccgggccacgcctccctgcctgcctgccctgctgacccattcaatcattcctgctaagtgcccgggggctgcagtgtctgcgttcacagaccctgagggggcaggcagacctaggttcggttccagcagccaccacctactggctgtgtgacctgacacaacttactctgtccctcagacatggggactggagcacccagggcctgggtctgtgtgtgtgtgtatgtgtggggtgacagacccccacacaaggggacctgaccctgggggatgtggctgtgatgctgacagaactcctgccacgtgtgcggggcactcacactggcactgaggtaggagccgatcttgcccaggcacacggtggtgttgcaacggatggggccctgctcgtccttggcctgcagccgcgcgaagtgcttcatcagctccacattgaggttggtctcattcagctttggggccagaagcagcatggactgcagggcgggagaccggacagtgtgggccggagtgggcagggtaccacacatgggaggggcctcctgggagggcaccagtgaccctgagtgctgaggagacccgccagagccctccaacctgctcctgggccttacccagaaggctttggaaggggaacccccgtctgcactccagtctcatgaatgtctgttgcactcaggactattagccatacccacccttcccccgaccacctgcagtgctatacccacagccaggacccacgtgcagaacagcctgcctgcccctcccataccctgtttgagccacagaccaaaaccaaggcctctgtgtcctctgatgagccgcctctgagccttagaaaaccaggggtggcccctttgggcctggccacacccaccttgactgtctgctcccggatggcagggttggtgtccaggaaaccgtgcacaacgtggggaaagatctgggtgttgactgttggctcatcaaggtactggatgaactgctccatctgcggcccgggttggggcatgagaacacggtgaggccttccacccctcaccagagccagggggccacccttggcatggtttctctacccagcaggcactggctggccagggagtctcctgagccccgcaccgtgcctctggcctcaggcccacatggaatgaagagggtactgggggcgagggaggggactgagaagaaccagggactgggtgctggagagctggaatggtcacaacccctctcggagcctcccaaccttttctataaaaagcgtataacctctgcctagaggagtgctgggaggaggctggagtgtttggagttggagaaggactgatacctggatacctaacgcagcggccccccatccccgatcccatcaaccctgtctgatgctcccaactgcctgggggttggcaagagagacgctatcccccctcaagaggaaatcaaccctgaatagtcattggaaggactgatcctgaagctccaatactttggccacctaatgtgaagcaccgactctttggaaaagaccctgatgctgggaaagattgagggcaggaggaaaagtgggtggcagaggatgaggtggttgaatggcatcactgactcaatggacatgagtttgagaaaactctgtgagatagtgaaagacagagaagtctggcatgctgcagtccatggggtcagcgttggatgtgacttagcgactgaacaacagaacaacaggctcaacccgggagactgggcggcacagggagaagcgtttgagccatgcggcctgggtggggggcgttccctaagcctccaatgagcccagtgattatcttgacttcctgagagcacagcctcactggtccctcacctgtgtgtatgttt

SEQ ID NO: 46146 - DNA, 961 bp, Bovine  19866881426271
  misc_feature (1)..(1): n is a, c, g, or t
nttcctcccaccacacccttgctgccccaacccccgttgactggcccctctctctccccaccctctgcagagagctggatgaccaggtccaggccaatctccccgacgaggtacgtgccctgcccccaccctgggtgcacgacggggacccgggtgtcctgtgtcttggtctctagccagcaaggcagagcccctcctggcaggagccatacacatccctcacttgccaagcactttacagtttgcaaaggactttgcgatagtaatggcgcagggcccctgggttcttgctctctgcagggtctgtgctgagctgtttacctggatcacccggtttcctccataacaaccgtgtcagggtgctgtcaccgtctctcctctcagagggaaactcaggttcagagaggttaaggaatttacccaaggtcacgcagcagggatccaggctcacccctcatcattgggctgtatttccacctccatatttagaccacaagagttctagacaggaatacagtagggactgggttcccattttacaaatgaggagagtgaggctctgaagtgaagtgacacctagctgatgagtgctcccagccccgcctgctgctgctggccacgcagaggccaggctggggcgcccctgacctgctctccccaccttccctctccagcaagtgctctcagaagaggagattgatgagaacttcaagtccctcttcagacaactggcaggggaggtaggctgggcctggtggcgggtgtctggggcactgaggggtttccccagggcaggtgccatcctccatctccccccaggacatggagatcagcgtcaaggagctgcggaccatcctcaacaggatcatcagcaaacgtgagcgtccctgggtagctgttctccaccccgtgtctgcctccacgcccccagcccccattcctccagactccaggatctagg

SEQ ID NO: 46147 - DNA, 1374 bp, Bovine  19866881674802
  misc_feature (1)..(1): n is a, c, g, or t
ngagatattccaggaggacttagacttccagaatatgaaagctgaaaaatttccccaattcctttatttcccaaggctcagggatgttgggggaggcacccatggttacatagcacagaagtattctttgggcctacccatggactagaacctgggtgggcggagtcccacagcagccatcgtgggtggaaggaggaatcacccccttcttctgccccaagcccagggcttggtgccccactcagcactgctcatccccttcccctcactcctcctgcctgctgccggcccctctccccacccagccccttgcactgagggctgctgcttaccttagccccgcgccctacacccccatagcgggtcaagacgatgctatcttggagtttgactcccttgttctgcagttccttgaagtcttcttccgagccctggttggcatagacgagcgggccctactcccaagagaaggtgacttgaagccaggcccaggaaagagagagaaaggctgaatggcaggatgaagggtttagatcccgcccccctaccctacccagagcttctcagctccccaagaccaagtcacacctggttttctctgtgctctgtgtccaggtaccctgtatcaggccaggcctggagcagggcccgttagtgtttgttgaatgactaagcgatgggcaaaaggagtagtaatggagtgtggaagcgagtacattctgggtgggggctgcgccccagttgaggcatttctcaacagcccctggggtcaggatgggagcagctgaggtgggaacaagggggaattgggccagcagtggggagggggcatcccaggcccacctgcggggttccggggggagcataggcagcatagggcggcaccacgttggggcccccctgctccccagtcaggttctcttcactgtgtcggcaggagaagaggatggccccagtggagttcactgttgagagagggctgtgtcggagccgggcccggcggctgccccagcccacaggcatcccggagccagggccggaactcacccacagccacacggttgggctgctccccgctggggaaggacagcagcacctcatactcagtggtcctggctgagtccaggcctgactccgggtcctgccagcgctgcagcagcagctgcaccagcgcctcatcccgggggggtggtggccagatgtggctccttggagagttctctgcagggtgggcgagagaggggtgggtccagggtcagggaggggcctctggcacacgggagaggtgcaaaggcaggcctctcacctaaggttctcccggatcctgttggcatctagctgttctatgacggtctcgaggatcttcaggtccag

SEQ ID NO: 46148 - DNA, 541 bp, Bovine  19866881706167
  misc_feature (1)..(1): n is a, c, g, or t
ncgtcttgtgctctcctgcattgcaggtggattctttaccctgagcccccagggtaagccctcaagtacctctggtgggggaggcaacctggcgtcctggcagtccaccctggggccaaccctggcaggcctgactcctttctgcctcaactcccacaggtgatccgggggctgctcaaatactggccaaaaacctgtacccagaaagaggtatgaagaaggactctggtgtccactgcagggaggctgggaaggcttggcttccggaaggcagttgggtgtatgtcgggggagatgggaaccatcgcccctgtgtccctgcccccaccccaggtgatgtttctgggggagatggaggagattatggatgttatcgagccctcgcagttcgtgaagatccaggaacccctcttcaagcaggtggcccgctgtgtgtccagcccccacttccaggtacaggtggggacaggtggggtaagagccagggtacggacggaaggtggcaggttacctcacacagcttcctctgccctcagtttct

SEQ ID NO: 46149 - DNA, 590 bp, Bovine  19866881713931
  misc_feature (1)..(1): n is a, c, g, or t
ncagaaggtgacacggcggccgcgggtcgcggggactcacgggtgccctgggagcggggctgggggcccagccaccctgactcccgcctccccccactctcgcccccgcaggagaaggcagacagggcggccctggaggaggaggtgcggagcctgcggcacaacaaccggcggctgcaggccgagtcggagagtgcggccacccgcctgctcttggcctccaagcagctgggctccctggccaccgacctggcctgagctgtcaggcgggcctcagcctggctgcccatttgctggaactgcccggctgctcagggcccctgggctgcacaaactcctcaggaactctccctgcgcgaggcgcgtcttagcactgccccactccccggcccattattcggtgacacagttgccctcaccccacccatttgtaaatattctgtggagaaaaggggacttcagggaataaagaagccactgctctttgtgtctacacaggtgtgcacgacgtgatgggggaaggggttttgctcccataggctccggccaagctcccgggactggttagggaagccctggggacattggtt

SEQ ID NO: 46150 - DNA, 696 bp, Bovine  19866882123933
  misc_feature (1)..(1): n is a, c, g, or t
nacccctaggcctacaggactactattgtaaggggccagagcctgtttggtggggatgcgaacacactgcaggagagagggctgttccccaggggccctgggccagatcagggaccccaaccaacacccgcttcctctcccaactggggggacagacccaaagctggaaggggaggtagctccgcagcagcgctggccagggtgacctcacacaccctggtatgagaacagcagcactcagagaggttaagccacttgctcaatgtcacccagctcctaggaccctgctggctgtcgggccactgaggtgctgagtgctctcccagaaggcagcggctgatagccctgttcttagcattctgtgggggggtgatgtctcaagcaccttctcccacgctccccgccccccagctctgtctccttcccattctctgcctgcccctctcatcgccctctcttggcgcccctgcctcagtcttccgctttctctgtctccccttccctgtccccccaccattctctccatctcatctccagcttcgtgtctggtgccctcctcagggttctgggcattcagaggcccctggagatcgcaggtgcccagtggtccctcgctgtgtctctgccctgtggctgcagcaggaagggtgggcaaagggcagagagtggaggccgcagtggcaaacctgaacctgg

SEQ ID NO: 46151 - DNA, 825 bp, Bovine  19866880417075
  misc_feature (1)..(1): n is a, c, g, or t
nacacacatgtatatatatgtatctatacatttatgctagttgaatttctattttaaagcatttatttacagatgataggagagggtatttgtctgcatttctcatttatatatatatatatatatatatatatatatatatataaaatcatatcatataagaacaaaagataaaatcaaataaaatggcttgaatatctactatccaaatagggtgcactttcccttccatgagccatcccaagacagatataaactgagtgttcgggatgctgacagatgtgctgtattatgcagggagacattttacgactgaggctactgccctctggagatgcagcggactccatggaccacttcacctgagaccacagatcacactcaagtcgccggccccagaggccttatcatcccagggaaccactaaagtccatttttggcaagatctcaattcttttcctttccttgaggtcaatagagtcaagggcacggaggtggcccacccagacctacgcacattcacttttggggggaattcaccttagtaaaatctatctaccttaggtcaatttaaattccaccatggaacatgaaatatcagtaagtatccattacttacagaatctttgaatccttagagaattctctacctttaaaataataataaaaatgataagataaaaacactatgaattttccctaaagagcatcttaagcagagttcctgccactgcttttttttttttttaaatctgtgttttgattcctggggatttctattcagtcactcctgcttttatcactaggcttccatgcgggtttatg

SEQ ID NO: 46152 - DNA, 881 bp, Bovine  19866880435750
  misc_feature (1)..(1): n is a, c, g, or t
nctttcttgagtatagaaactctgtcaatttagtccttttatctacaaaacacctcacgtatttctgagcatgcaatagatgcttaaaatatgcttatatttaacttatataacattccagtcctaacctctgagaatcaaaagtatttgcctcatactttacagtttacaaatcacttttataaatggtacaattaggaggattatcttcaatgtaaataagccatagaagctagaactgagaaaaatgtaaagagtttcccaagatgacatggtttttaaaacctgtgtgttgatgaacccaacttatatcatttgacttgagcgcctacaatcttggtttgtatgtaagggaagactttgctgaattaatggatacctcaatcaataatgaaatcattgaaaagtaagcactgaaatcagattgtgaagcaacaagctagttgatgataagtaccaaggttattatttatgtgatcttcattattttttctaaagaagagtgaggtagatgaaacacagaacaaacaaaatgatacctcgcacaacaatagtcccacagtcatcaaggggcatgtatgtttctttacactcagagaagtacccaagagcttgcttgatggaaaagactcacaaagaaccgaatagtttggcgtcacagaccaagtggttcctcgctggcgatgaccactgtcacaagactggatttagcttcagacgtattgcgtgccatctggctccaaagagcaaacctatttttataatatcatatttgcaataagagaaaacgacacacatgctcagagttggatgggcttccatttttaacacgactgactttcatcttcctgggggccccaaactgggtgggctctctttct

SEQ ID NO: 46153 - DNA, 736 bp, Bovine  19866880566250
  misc_feature (1)..(1): n is a, c, g, or t
ntagtttcttgttttaatttttaaatttatttattatttaaattggagggtaattcctttacaatattgtgatggtttctgccatacatcagtatgaatgggccacaggtatacatgtgtccccccatactgaaccccctcccacctccctccttcccctatccttccagcttgtcccagagcaccagttctgggtgccctgcatcatacatcaaactggcactggttatctattttacatacggtaatgtatatgtttcaaggcagataatttcttattgtcagtttctgcttttagaggcaaagatcatacacaatgtgtttctcttctgcttaccaaagactccaaaaccacttgccaagtttctccaggttgcaaactgaaatcacgtttaacttctctgcataattttggagggatacacacccaaagactaatatatgtaacgaaaaccttgagaggaataaccatggttactgatatagaggctgatggcagaataaattgggtcattgacctcgaacctctaaaggcctgaggttagatctggattaaatcacgagtgaaatgatcacagaggttttgcttcaaaaattagcactcaggttgattcactttgacaggagggggtgaggattccagtgaataaattaaatagaattagattgttatgccaaagtggggcatctgttgaggataaagctttattcttatccatcttaacctaatgaatgc

SEQ ID NO: 46154 - DNA, 1564 bp, Bovine  19866880584579
  misc_feature (1)..(1): n is a, c, g, or t
ncttttctggtctggggtaacacagcatgccacatgttttcctaacaaattgcattcggacactttccgacaccttcattattttaactcaggtaataattagtcactgtcagaggaaggacttaggttgtgcaaatcagaataaatttaccttgccttagcagcagtcacaaatgaagcaataaattagaaatagcaaattgttacagacttaagagatcacaaatcaaaaattttccctgaaatccaggaaaaggcagagtacggccaagatttctttgagaccttaatttttccagataacttctgtgttgaatcagtttgtgacaaatcgcagagatgaggcagacactgatcacaaagatgactttctgggacttcgctcctgtaacacaagctatttcataaggcttcttattaaaaagaagtgctttttcttcttatgctattcaggagctcctaaatcttttcgtacacacacatacacagaaacacagacccatagagaaatacacagacatatacagaaacccacaaagacgtgcagagagaattaagaactcttctgcaaagtccgtctgagtatacagagcctttcctgatatactagtagtccaaatagtaaaatttgaggtcatgaaggagtcttggacttggctgaacaagttcccagaggtgagtaattaagtgaattaatgtcactgagggacaatgtttctaggagcatgtcatgaccacccagcactcagcctcatcttgttccacatttttatttgggatcagaaagatgatgtagatggcatgctcatcaaattttcttacacaaacccagcaaggatcttgaacacagtgaatgaaagaatgtgaatggatgtgaatgatgagccaaaatatacagtcatgtcacgggaacaaatgtaaagtcttgcactttcatccaaagaaaacaaaaggcctggaataactggatgtgaaaactgtggcttaatcaaagcctctctggaaaagattggtggcttcaattgtgaaatagagcccatgagtgtcaactgtatgatgtgatacccagtaagctagtacagtgttgctttggttatcaaaatagaggtactgtatttaagaagggatcatcttactcgagatcagataacaaccagagtggtgtccttatctatcatgctacatcttaagaaataagtagaaacactaagacatgacagtcacggtgaaaaaataccagtccgtccataggaaaagcagaagtctgtattactcagagaacagaacctcctggtcagagtggatattcctgaaaactgttgtccattactgatagaatcaccatgtagagtgaataatagacacgttcagtttggaacaaagataaggactttggtcccaaaggatggaactctaatcgatgggagtatttctattaaaatgacccctggataatgagcacgtaatttttcccattccagctgccccgccccccaggttatcagtaaacttatcaaagatttgctaactagggaaaagcctgtatcatccaggcaggcagaga

SEQ ID NO: 46155 - DNA, 1388 bp, Bovine  19866880588522
  misc_feature (1)..(1): n is a, c, g, or t
ncatatggaaggatgaataatcttcctttttgtttccatctttcctaaatattctttcgctttgggttttgcaataccttttgcactcgctttggtcaaaattgttgttggccatttgccagtttggaatgtcctacaaaatgaattgcttcttctgtaaataagaaaacctttgggaaacagtgctttgaaatactgtgctggagttacagctagctggtagcactttctgtgggggcaaagaaggcagggagtttattgtctgtgcatcatgtataaatcatgatccaggtaatattttgtgcttgccttcatatctactagtggctatagtttggagcatcacaaatattctttcaggaaaaaactgcatatttcctgtgtcatgatggcatttcaatttggtcacttttcaatgacactagtatccgatagaaacagacacattttagccaccagtttcttggctgacacttaataaagacaccatgattttcaagtgaatgagtttacccatttttattggcttccttttcatactttctactttaagaagttaatttattcctcttacaatttaaatgccaagttcttctaatattattcttgcaaggtaactgaatttggccagtcttcatcttccttctttcccatattaccttatgcttttcagaaaaaaaaatctttaaatggcacaacaagaacaaatatcagagttgaagatcattttgaaactaaagtgattgtcaaaattaatccaataatgcactgcagctcagttcacttataagatacattatcatataaataataatgtttttaatttcttgcaaacttagaaatgacagtgagagcacactcgaaggaaattttaaagctcacatttaaaagagaaatagttttctatttttgcccattgaaatgcagtgaaattatatatgtatatatactacgaatcactacataggattattaaaataactttcctttccatgattttcttccgaaatacaattcttgaatcatatatcttaatttaatattcaaaataatgagaacagagtgaaaaagtttactgaaaaaatggtctgtttaagacagaactggagtgatggtcaattaaaactgtgtctccacactccagagaaggaagccttcctacactgctggtcggaatgtaaattggtatagccactatggagaatagtaggaggttcctttaagaactgaaaatagagctaccatattaccctgcaatcccgctcctaggcatatatccagagaaaaacatgatctaaaaggatacatataccctaatattcattgcgggattgttttcaatagccaaggcatggaagcaacctaaatgtccatcaacagaggaatgg

SEQ ID NO: 46156 - DNA, 889 bp, Bovine  19866880590122
  misc_feature (1)..(1): n is a, c, g, or t
naatgatttcctgagagactgagtgtttgcatttcttcatacactcatgcaagtctgtacacgagaaactattgtccccataacagtcctttactcttttctagaaagtgtccctgtgcttgtgacttgtacagagaatgacaagtaaaatcctcaagtctatcaccaagaggtgatagactggaaaatttaaattctagatggcaaggcacaagttgaaggaaaacatgtcctaagtttaaaactcactgaaagcatgggtgggggaaggtggatttaacacacagtaaaataagctagaattgggtgttttcattgggatttaagaaactatgttatcacaccttaaaaaaaaatattactatgcattgtgatggatacagagcacattcatcctttacttacatttttgtacttttagaacattctccccctttaaatacgaagccatatttcaagacccactagcagtttctagaattcacctattcctgttcccacctgcagtgatctctccctccattgaactaatataacagacgctttacttatcaaaattctgtcataatatacatgagcatctatggactacgaactgtctctgacgagattgtgagttcttcgatgttgtacatcaggagtgacacattgaatgcaatgtgcacgcggcttctcaccaaatggcaacatttccctgaagtcctgggataagaataatgctgaaagtgtgtaatattctcccaatcgtacttagaatgagaaaatgtcattacttatacaagatgtgatattgtctgtaaattttgaattcctaaaaactggtagggcaaaatttgtagcagagaaggaccaacaatatgtaaaagaagaaattaaaaagaatgtaaca

SEQ ID NO: 46157 - DNA, 1663 bp, Bovine  19866880594532
  misc_feature (1)..(1): n is a, c, g, or t
naaaatgaacatttttctgcttagaccccgagcatgatatgccatgattattatcattttattaaaatgcacatttctttctcccgtactcctcaatagtaccctcctgggaattcatctgtgataaaacagaagcattgagactggacccctgaatattcgggctttattagaagagtgtaagacattgatagtccattgtgcaaggggatcaaggacaggcggcattgatttatttccagtcaaggttattatggactggatttcagatagtgctacgacttaaatttgccattgatacgacatgatattagaaactggtgacttattctccattctctgagtccgaatgtactgaaggagatcacccctgtgctaattccccagattctctccttctatattgggtctgaaatgtatctacaagcacaaatggttctactgctttgatgggaattgaccagtcggtcagtccaacagctgtcaattcagtcacagaatttttgacatttttgactgaattggccaggtgttagactaaacccactggtcaatttcatcaagaattgtcaaaccggttttcatgattggagaaagccagaatctatatgtccttatgggtattcctctatgtatcttgttaacaacatactgattttcttatttttttctggatctagatacagaaacatcatagtttacacatatattcatgtatgcatatagatgtaaagatctgtgccaatgagcagtcttcctgtttttaattcccaaatggtatggcacagagcatccatccatgtagctgcatttccaaataaaatcatttaatcacctatcaatttatttcactagttctttttatttctagccataatatagcagcatgtggcaacggcaggatcattactgcctggcagatcagccaaataattccagctcagtaacttctggagaaagtttgtcttttttcttctccagaagacttaccaagattagaaaaagtttattatgattgttggtcattgcctatacccaaccctcacctcccacaggaatttaaaacccatgagagcaaaaatccacatctattttattacctgatgattcccaaatgcctagaattagtacattacatctagatccttgaaaatggtgctttgaggtttctgaaccagcaatactcatcgtaatgagtttggtcaagaacattcattctgggacttctttttcctgtcaactttctaagaactttgcatttaccgaatttgaattacttagcttattctgcattatatttatgatgttgttttatttttttccctagactatgaatacccagaatatggatactgccctagtgtggtccatactaagccaaccacaggacctaataaatagtggacaggaagaaacacgcatggaattaagaacataatcacttatgaatgaaacagcagtattcactactactgatccatgctctttagaagaattccatgaacattaataaacaacacctaccattctcaggcagttcaatctggatgggtggatggagaaatggaagtgaccaatgagtgattagaaatgaggatatgataattcatggatggtcttgattagagcccttcactgacattaagcctaaatgttcttaaaa

SEQ ID NO: 46158 - DNA, 870 bp, Bovine  19866880596704
  misc_feature (1)..(1): n is a, c, g, or t
ntcagtgatggttttatatctctggcaacactcatatccagcccaagttggcacacactttggggtgtttaaaaattgccttaagtgtttgcctgggcgggggaaacgacagacctgagtcttgaaccccctgcagacattctgaagagtgatgatggcccctttcttcctcctgccccttcctgacagctctttcccctctctggacagtctgcattgttttaagaaaaaatatgcttttgaaaattgctgccctcaggttggccgggcctggagctccaacttgcactgagttagcaggcaaacttttccccctcccgccaggggcaaaccttcccctgaggggctgataccaggactgttccagcgcctacaggcatctcccggaggctcagcccgggtgacaggagagccatgggggtagaggagattcccgctcagctggcccagagtgcctgaggtgagggagggaacaggagcgtgcatcctggtctggcggaagggcaacaggcctgcgaggcgtccccatggcccattttgagacagtcaagtctgaagcatccttcccgtggcccagccttcctctcctctccccagaacaagcctgccggagccccaccgctaggcagagttcccattccaagtttccctcgacagtgtggctctgggggctcccaagagttttaggccctaactctcagctaggagcccccaggcacgagagagcagggttccttcctacctgaggtgaacaggactatggccttgaggcagctgtactcggcggagtcgacgtgcagcgcttttagcttctccacttgctcttggaagatccgtatgtggtccataaaggcgaccacccggtcggcg

SEQ ID NO: 46159 - DNA, 840 bp, Bovine  19866880610877
  misc_feature (1)..(1): n is a, c, g, or t
ntatgatgttttacactgtaattactaatagtaaggctggatgtatacggtttgaagaagagttaaaaaaaccatttttcaaaagtcataccttcttaataataataacaatcctactaatcacaaactagcaaagttcaactaccatttccacccaagttcaacttaacatttatcatatttcagttcttataaaggattctgtggcaatagctgaacaatgggaaagtttgaagtcagatgcttcctcaagtgtttccaaaataaacagttacaggaagctcactcccctctgccctaaagctcagggtaggggggtggatgagcaggggtgggtctgttactgtactcccgaccggagttggggagccgatcagtgcatggttaagtgtttctgctgcacttttattatgtttgacagtgatgacaatgtagtacgcactgcacaaaatgacaaatgcacacatttcttcctctcgtacacactgtttctatttttctctccagcctcctgagtgaaagccagtcatacaaaaagcatgcagagtgggagttcagattggccagggccaaaattacccacgaattccagatttccagagttgcagagggggagctaactactcaaggcagaaagaacaagaaaggctacatgttcaggagttaatagatgaacagggataggcttggtcacgtggttgcgtttcttttatcacaaaaccaggtccctttcccatgatatgggcagtgctcatggatgaaggtgtcagaaaaaaaataaacaagcatctctaaatagaccgtcgatttacattatacagggcaacactttttttaatg

SEQ ID NO: 46160 - DNA, 1268 bp, Bovine  19866880646388
  misc_feature (1)..(1): n is a, c, g, or t
ncacattaacaaagactttgtgagcaggaagaataccagttattcaaccaactttaagaaaacagctgagtgctagcccagcttagcagggtgttaagcatccattaataatggcaaggcaacaaacttgaaggttttgattttagttcagataagcactccagattcgggacttggcttactgtatctctgggtttctcttagggaaaaggtggcctattctgacaggggagcttagctctttgaatgttggaaagcagacattttttatagtactttgtgtaatcattattatgatatgatgcacattaaaattgttatcaatgttgaactttgtaggatagcccagatttcaaatgcttgactctgtttttccccataactatgtttctcaggtcacatgtattgattttttgttcagcaagtaccatcactatagtctaaagcttttattcccatttagaaactgtcttcaaactaattccactctcagtagaaaaaaatcactattctcattcaattttcattgactatcacataatactgtacacacatctgtcccctccactaagctatatgttccttgaaaaatgtggaccccactgtgtatattctatcaacacctctcagtttttggtgcccaacttcatgttactaagaatctgttttgcaaaaaaggaaattatttacctgctaatatgaggacagtttctcatggtttatgggaaatttcatcacctttgaaatggttagtttttctctcatttcacaaaagcagtttgtttttctggtaagtgttgagcgatgactctgtcagtcactctgatgtcattttacacagattttcttattttgtacccacaactcttctgtgaagtaagtgctattattactgctcttttatgcataagaatactgaacacagttcagtgacttttccatgattaagcaggccaagagtctgtggaaagtctattcagagacagattctcaactcttaaaaccagaagttccatttcattgttcttctatgaagaaatctaaaacagaagttttgttttcattgggcttggtttcttatgcctcattttttccccgaagaaaaatgaagtcttttgatagttcgctgaaatgaaaatcccagtgttttctttgtgtcttttcttctgttgatttccaaattctggtccatcagcaagctttgtcatctttcaaaatctgtccagaacctcaccagctctcatcacctccaccgttggcactctgta

SEQ ID NO: 46161 - DNA, 3271 bp, Bovine  19866880659291
  misc_feature (1)..(1): n is a, c, g, or t
nttttgtaagaaattcttcaaaagatgaatgttccagcatctcacatggattgcattctacagtgagaaaataactacattttaagagacgtatagaaatggtaccacacatttctcctaagaatacacaggtattcatgtatgaatatattaaataatacattcagcacatatcccctggcctcctgtggataactgtagattgtgcatgtgtgtgtttgtgcacacatcacacaggcacatgcagtttgggcaatcacaagtccatgatctttgtttttcttactgttcattgtgtcactgattttatgcatgtgctcatttatgttgcttagggggagaaaaagctgtacataaaaacagattatcttttagagcaccccagggttagtttcattttaccctcatctttttatgaagaaaatgataggaaacataaaccggtgcccttaaagcagaaaatgcatgaaatgaaacaagtaaggtttcagaaaatacgcgaaacacgacaggcggacctccagcttagcgggagggcgaggggtaaaatatgcactgtgtacacacagccagtatatcttcagcccttaaaaaagataaaagtgatcttgaaagtgaatgaagttgactctcaaaaagtgggttttagatgttgaatatttaattcactgataaaagggacctgatttcctgcacacgggtgccataaaaaaaaaattaaaaaaaaaagcacatcttaaaagagaagcaatgagcagaaactgacctttctgtgagcaagcagatgagagaaggtatttggctaatcccagctgtctctgattggccagacagcaccgtgttgaaaatgtctccatctgggctaatctgctctcagttggatgagctgaggccttcagagttaacctgacatttaacaataattaccctttcgaatgaccctggcccaatcgtctgctctcttagaaatctctttttttgtgcgtgctcccaaaccccttgacttttgtgttagagatagggaaaaataaaaaagatgagacgatagagcttgtgtgcaaacatccagaagtgtgtggctgtgtgtagttatatacctatacattatatataaagacatataataccatagatgataactagggatctccacctggttacagggcctcatttaatggctctattttactgctctgcattctacagtttagcaatgccttgtaatattaaaaagaaaacacaggaataacaccaccaattaaagtggggcagaatttgtttaccggctcttttatgaaagtccaagttccaatcttgccttgctcaagcccttgtgtgtcccttatcagacactgcgagaaatggtgcatgaaaagaggttcagatagaaaaaccaggttcaggggtcatgaaggctaactgtggatgaaatgtggccatttctttttacctgaggctggcttcatcttttcttagaaaggtcattgtgatgaaacaaacaaacaaaaaaaaaacatctcggaaagaaaatccattttggggttttatttgattaaaaaaataagaaaaagcctttcccagtttagctttgcattttcccagagcatccttaatgaaagccagtataagacaagatggtttctaacactaatatttagtaaggaacttcccacaggctgaagattggaactgaatagccacccacaagtttaagtacttgccctaactttgtcaaagtatcagacctggttggcttggaaaaaaatggtctggacctccaataagcacaatttctttaaaactctatgtttgtgcttctttcgtacactttaaataccaaaagaataattgtttatgaacattccttttcacctccttgataactaacatagaagatacaaaatgtgaaaatatagatagtcacaacacgtgtatgtaaggagccctgtcagtgtatttccttttgagctggtccttcagatgcatagctcagctaataaagaatccgcctgcaatgcaggagacctgcgtttgatccctgggttgggaaggtcccctggagaggggaatggctccccactccaagtattctagcctggagaattccatggtctgtgtagtccatggggtctcaacaagttggacacaactgagcgacttgcactttcactgtctttcaggtatatacaagacaggtggggagagcaggcacccagcttggcctactgcactcttgttccgtgtttacgctccaaggctctcaagcccacttatttataatttggagtattctttccttgaaataaccctcagcccctcctatccctctgcctacctactttaatttcccttcctggatttgtgtgtgagggggtagctcaaatcctaactatgttcaactatcaactaacctcatggggctgttaccatggcctgaacttcatcagaagcctaactaactgaacagagatctcttaggaaacaaatgagtaactcaaagaatgacttggcattcagaattaaacaggatcttgctaggaaagagggaggtcccttaggggagagtaatgcttttcagaaaagatgaatgagttcttagaagactagacagggggtaggatagatagaggagaaggcaatggcaccccactccagtactcttgcctggaaaatcctatggatggacgagcctggtaggctgtagtctatggggtctctgagggtcggacacaactgagcgacttcgctgtcacttttcactttcatgcattggagaaggaaatggcaacccactccagtgttcttgcctggagaatcccagggacgggggagcctggtgggctgctgtctatggggttgcaagagttggacatgactgaagttggacagcagcagcagcaggatagatagaaccagaggttaaattgccaacatctgctggatcatggaaaaagcaagagagtttcagaaaaacatctatttctgctttattgactctgccaaaacctttgtgtggatcacaataaactgtggaaaattctgaaagagatgggaataccagaccacctgacctgtctcttgagaaacctatatgcatgtcaggaagcaacagttagaactggacatagaataacagactggatccaaatagggaaaggagtatgtcaaggctgtacattgtcaccctgcttatttaacttatatgcagagtacatcatgagaaatgctgggctggaagaagcacaagctggaatcaagattgccgggagaa

SEQ ID NO: 46162 - DNA, 1336 bp, Bovine  19866880672519
  misc_feature (1)..(1): n is a, c, g, or t
ngctctccctgtgactctgtggtctatcccgggctatttcccccccttcctttctcattcacctactcaaaaccctcaggagctgccctagttcaaattccctctccccatcatactatcagcttgtttggccttaccttcaaggacctgccgcttgccctcctacaactgaggaccagccacgtttgcttggcttgagaaaattagagttggaaaaacagagaagcattttttaagggaagggaagagatgatgaaaaggatgaagaagcagaagacagccatgagcgtgggctgggttttgaacctgggtctatcatggaacctcttcaggcctcctgtttggaaaatgaaaggactacaaaatatactctaagatttctgacaaccctcgctgaactgacaaaccagtgattctagaacagtgaaaaaaatagctgttgctcatgaattgtgtattacagagcaaataacaaccgtgtctagatttcggatatgaccaaattaactttgcaaaactgcctaactaaatcacaaattaaatgagctaagaaatggaaaagttacatgagtacgtgtttttaagacctaaaaatcacacaatagttttaagattcagaatcatttagcaggaatcaatatcgaatatggaaccaaattagcaataattgctacttttaaggaataataattctggtaaccagaaaggatatatgaaattaatactaaaaattactgaggaattatttaattatctgacttatcaagagaatacaaccagatgttagtaaatagaattgaaccttatattactttactcttacgtcagtcaaattggatgtttcggaacaaagaagcaacgttgaatcgatatattgtgtgtatgatacataatgtggacactaattatctgtgctaattaatttaatttattgtgtcctaggttcacagaggtacataaatggcaaaatatttgggaatattatgcaatgaggcaaatgttaaggaaattgagaccctttcatgaactttaaagcaaacatgtcaataagaagatttatgaaataatagctgttatacagaactccacatgctagtgaacagttctcaaatcctttggaaaaaaataatttttacttaaacactgaaaatcctttcaagagcattaagtacaagcacatagtaaaataacttataatcaggactatgtgcctgacactcttctttttttaaagcagtgaattttaattttacagttacatatagtattgcaaaaagtcagacatgacttagtggctgaacaacagcacagtatgtcccatagtcttttttttttt

SEQ ID NO: 46163 - DNA, 1378 bp, Bovine  19866880700548
  misc_feature (1)..(1): n is a, c, g, or t
ntatggatgtgagagttggactgcgaagaaagctgagcaccgaacaattgatgcttttgacctgtggtgttggagaacactcttgagactcttggactgcaaggaggtccaacaagtccatcctaaaggagaccagtcctgggtgttcactagaaggactgatgctgaagctgaaactccagtactttggccacctcatgcgaagaattgactcattggaaaagactctgatgctgggagggattgggggcaggaggagaaggggacgacagaggatgagatggctggatggcatcaccgacttgatggacatgagtttgagtgaactccgggagttggtgatggacagggaggcctggtgtgctgcgattcatggggtcccaaagagttgaacatgactgagtgactgaactgaactgaactgaaccaggtcctgggaaaagattgcccaaagctagtctcttatctagcatgtggcctgaggacagaaggagctaagaagcagcagggagaaacattctactttaatataagccacaaggggctttctactttcaagtggtgtttgcccacttgtcagaactaagtagaatataatacaccatattttgctcagatctgatgtttatactcctttaatgttggaaaacctacttataattattatttagtatgcaataaaggaattattctgtgatatgcttataatattctatttaatctgctttttagaatgaatagtgttgctactactcaaatgccactctagtctttgagccaaactgctttctaaaattgagtaaaaaataatgtatccagtaaattccttagataaccaataggcacacactaaagaaaaattcatagttaaaaataacttttctcttagacttttatagttcacagactacctcatttatatcttcccacttgacattaaaattaaatacccccaaaaaattaatgagaagcatagccttgattttgaatgtgtgcagtagtggacagaactctctgatgaaaatgataagaacaaaatgtagacacacaagtacacactgcatttgcaggcgagtgcacatgccagccactcactgcacttccttcctttgacaaggaagtctgtattaaggtcttagtctctacatttgttcagtggggtctatcgcaccttctaccttgtagggtgtctatgtcaatcatctataaaaaatacaagccaagttgtgtccctctccttgcactgaagctttctctgtctccttatggctttccattggtttctgagcaaaaatcgtatccttatgatgacctcaggacttggcatgatctggccctgttactcttgtcagcctcatcccttcttccttcagcccca

SEQ ID NO: 46164 - DNA, 855 bp, Bovine  19866880753715
  misc_feature (1)..(1): n is a, c, g, or t
ntaatttttacagggtgtctttaatttccctaggattccttcccttgatcttgggaattcaattttgtacatttcctgctcatcacctgaatttccaaagcccatttttctcttcctctatcacattgtatgtgattatcttgttctaattagcaggttgaacctctagaaccgtaagccaagtttgatattgtaaatgggctgaaatacaagacatcatttcctatacaaaatgggatagcaaagctattgtttgaatgaacgtttcctatggaacttatgtattgttctagtttgtgctgtaaattttataatctagagtcaagcatatgatctagggattgaaaagtttttcagaggctcaagtatcctgcctgaggtcttttcacttctttttaacaggtataaataaaggaagacatttttgaggcatgaaacactgtctctaatgctcatttatcctcttatcatctctttcatttcttcctgctcaggattccaaaaaaacaacctctattcctggagttggcagaagatgagaagcagagaaaaatgaaatggaaagattggtcagacggtacttgtctttattatattattttttcctaaaactaattatgttggcttgagaaggaaaagaaaagctaatcaaaccctctgtgaatctttactcagtgtcaagctttgcttagagccaaaatataaggcagggcttaaatgaaaaccctattagttttctttctgttagttacaagttcaaaccttattatgtggtcatttttctagtagattatttccatggaattcattcccattttcaaataaacataaatattcgatttagaagcaataagt

SEQ ID NO: 46165 - DNA, 3256 bp, Bovine  19866880779461
  misc_feature (1)..(1): n is a, c, g, or t
naaataattgtagggatattctcttaggtaacgaaatagactaatcctagatcccattgatttggtctctactacaatagggcactcctgccgatttagaaccgtattcttgacccactgttgcacttaactttgatggactcactgaccctcctggctaatgcaaagactcaaacatctgcatacagtaattttgtgggctgctaaatattcaaacagacctcatggtttctatcaagggagatggcttttacgattttgtgctattagcaaaatgtgcatcctaaaaaattgtcatcgaagaataggtcaaccttcctgctacaatataagagggtttctaagtgagaaatcagctcatgcatttgtaaacctctaaacactaaaaacctttcaagcattctaatcttagacttttttgtcatgactccaagattttggaaaaaaaaacaaaaacctcaaaatgtttgagttctacttttaaaatatggaaggttcttgaagtaaagaaagggaagaaaataaatgcaaggaagacaaacctggttaattttaataaaaaaaaaaatccacagtgtcagaacaccacagtacaaaaaagctcccatgttaagaaatttctttcaaagttgagtgcaactttttttctcaatatgtgaccgtagaggagatggaatgaggaaccgggttttagctcctcaactttctgaagtcacagacctctcatcagcatatagctctgtgtgatgaacacttgctgtgaagaaccagaaatcagtgcaaaaggaaacaataataataaaagggacgctttccaccatcagaaccgggaaaggtgtgtgagctggaagaaagtacagtactgaaacccatgacaagtcatgataaatgggtcgttataaaattcatgtttaggcagcaccaggccggggataatgccattcgtcatggtaacactcggccgctaatgagccctcattgcatattcatgtccgtggcgtttcttctctccctcccaccccgaactagtgcctggaaatatctccacctcaaactgcagctcaggccttcttcttcttcttcttcttctttcttttttttttttttttatttgttatgttgcagcaattacagtgtaaaagtgctgcccaagattgattgctctgatctgtagttcaattgtaaattagaatacacatccccccagggacacacggcccctatttgtgattaagaaaaaagccccataatagactaataggtaaagttctctctcttttactttcaggcaattagcttgatgaaatggcctctttttgtgtaccctggaagtgtaaagcgatatcataatgaagtatatgatgtttattctatgattttcaccttcctgggtatgcaggaatgcataagtaatggctgctttgtctggtgcatttactgattcacaagtgaactatttcttaaagatgcagtgtgtgcattctgaggcttgaggtaagcaaccccctgactttgggctaccctccacagaaagaactctactaaagaggagagaaattcccaggtagtggtgagagcaggactctgatagtcaagagccatctaactgcctgctggctccgaggtggatgaagtggtaacacattggaagcactcagaatcagtgaagaccccgggagagtctggcaaagtgtccagaggtgactttgagtccagtgagcatccaggtggccaaaatgtgtgtttcatctcccgtgcttggttttggaacactagctcagtctacactcctgggttagaggagttaaagctagggttaaagctagccctacaccatgtatttcattatacaaccatctttaagtgaattgcagccccccctcaacaaaaagccttgtcttttcaagttgctaaactgtcataagttgtcaagaaaacattcttcaacttcctacacaggctggctaacaaaggttttgaccagtgagccaatgaatgcagctggtgcatttccaaagctgtttgtgctctccatatgcaatattttaatatctattttatttcattcatgagagtctcaggagtcaaggaagaaacaagtgtcccaactggcaagatagaaagagaaaaaaaggaaaaacagaacaagacaaaaatctatcttggttgaaaatagtttatggtgggttacttaccaagaggttgatttctatttcaattccatattccaacctcctgccactcatcaataacccagtttgtataacccaccaaacacttcctgggcttgtgtagtctgggtcaatccaaccctctcctctttaatgtgaaccttatttgcttttctcaaaaaaatcactcttatagcaaaaagatctcactgacttcttaatgctgaaatggacatgcatgtttagatttgttatattttaaaattaatgtttgcgatagtcttttgttacatataaaatgtgtttgcatttcctccaagttcctggttaaataaaaccttttgggaaagtttattactatatcctgtaaagtgatactaatgttacataattctgaatagtaccacaaaatgagctacacagaaatatttcagaaaaatttacttgataacccttcttgctaaaaatctaaagttcatatcagtccttatttgggggtttttgccttaatttttataatattgaactctgtgtaaaatatagacctgaaatataataaatgcatattttcattgctccttgaaatgtttgactgtgtagctgccacatcggtgctgtgtttggaaatatactattgtaaacttccaacctagacagcatattaaaaagcagagacattactttgccaacaaaggtccatctagtcaaggctatggtttttccagtggtcatgtatggatgtgagaattggactgtgaaaaaagcttagcgcagaagaattgatgcttttgaagtgtggtgttggagaagactcttgagagtcccttggactgcaaggagatccaaccagtccattctaaaggagatcagttctgggtgttcattggaaggactgatgctaaagctgaaactccaatactctggccacctcatgtgaagagttgactcattggaaaagactctgatgctgggaggaattgggggcaggaggagaaggggatgacagaggatgagatggctggatggcatcaccgactcgatggacatgagtttgagtaaactccgggagtggtaggacagggagg

SEQ ID NO: 46166 - DNA, 955 bp, Bovine  19866880795285
  misc_feature (1)..(1): n is a, c, g, or t
nactggggaggtgacaaagtcggagaagcttatagatctgacaaggagagcaatgctttgtctgtaaggccacaacacatttatgaagacacattctttgccatgaagtcccacagaaacctggaaatgcatgtctttattatgatgtgtttgtatttcagttttgaaattcaggggcagttgctcaaaaaagaaaaggaaagatgtgaccgaagtgattgcacattcaacccagacaggtttcttgtcaagagcttaagtttatcaagataaacttctgtctctcttagagatgaaaagtatttgggagagaagaggatgtacagagttcttgaataaagcttattgtttccagctgctgctgcttatatacttcagtcacgtccaactctgtgcgaccctatggactctagttcaccaggttcctctgtccatgggattctctaggcaagagtactggagtaggtaaacatgccctcctccaggggatcttccctccccagggatcaaaccctagtctcccatactgcaggcagattctttaccaattgtttccagtgacatagaatttacagaaatgtaaaagaaacttattaactattgactgaaatgtttatgtaaaaggacattgtatttcaaagaatttctaagatacaagaaataaaaaagattaatttgatcaccaaagcaataattttggagcaaattttaaataaaggcatagtaaaaaagcagatatatgataatttttcatagacaatacaatttttaagcgagagtagaaatatgatgagactaaaattgccggacaaaacttttttcttccctcttaatagaccctgaatcaaagggtgaaaggctgaactgaagtacataggaataaaactaataataactgagtgtgactgtgaaataaagggaccctgagaaatgagaagacacaaacatccagaat

SEQ ID NO: 46167 - DNA, 2595 bp, Bovine  19866880855610
  misc_feature (1)..(1): n is a, c, g, or t
nttctgggtattcatcggaaggactgatgctgaaactgaaactccaatactttggccacctcatgtgaagagttgactcattggaaaagaccctgatgctgggagggattgggggcaggaggagaaggggacaacagaggatgagatggctggatggcatcatcgacttgatggacatgagtctgagtgaactctgggagttggtgatggacagggaggcctggcgtgctgggattcatcaggtcgcaaagagtcggacacgactgagcaactgaactgaactgaactggagacattttaacctgtcaaactggatgagggcatctagtgagtaggagccagagatattgccaaatatcctgaaaggtacaggacaacccccatgacaaagaatcattcagcttaaaatgttaatagtgcccaggttgagaaatctgagttaggatgactgcagactttttcagtgaaatctagacattttgaaagagaaagacagccctctttatgcatccagacaaaactacaattcaaaatgatacattctcctctgtactcatagcagtaccattcgtaatagccaagacatggaaacaaccgaaatgtccatcaacagatgagtggataaagatgaggtgatatacacagtggaccactactcagccatagaaagagtgaaataatgctgactgctgcaacagggatgaacctagagatgatcatactaactgaagtaagtcagaaagagaaaaacaaataccatacgctgcctcttatatgtgaatctaaaatacaacacaaatggacttttctacaaagcggaaacaggctcacagacttagaaaaaacagacttatgcttgccaagggggagaggggtaggagagagatgaattgggagtttgggattagtagatgcaaactattacatatagaaatggataaacaacacggtcctactacagagcccaggaagctatagtcaataccctgtgataaaccataatggaaaagagtgaaaaagaaggtatatatatgtgtgtgtgtacataacacaccacatatatatgtgtataacagagtcactttgttatacagcagaaattaactcagcattattaatcaaccatacttcaataaaataaatttaaaacaattttaaaaagaaagatagcccttttagcatttaagtttagatagcaggtataaagcgggactagctttgcaggtatacaagatctatggtcctctatgctgagcttgttttcttttagaatgatgagatattttttgtaggtataattttaatgtactttcttattttcctacggtctttttcaccaattagattcttagctacccaaagataggaggttgtaacctctatattttcctctctctgtctaggactttatacaaagcacttacttgataaaccttcttgactaactgtgcttatttataatctgtgttcacaacattgtccttgagaaaacctactataaacttttcaacattcaattagattacacatcaaaaatgtgggcaaaatgatggagaagaattcaacaagtaccattgctcataatgtagagaagattctaccttctatgatatgtaatttaatgaaatatgctaagcaaggtacaaaccctttaattggtactcagttaaattactcatgtttactgtaaatgttcttactgcacaaaatgtgcttctatcgaattagataaaattttattttgaaagcatggttatacatgtaaaatgaacaaaatagatttgatcccagaatcctaccctggatgtagtagatgtataataagcattagttctctttgtatttcctttacatagaagagcttaaaaataatttaaagccattaaaatttattttgtagtttttgaaatattgattccaggggatatttaaagttaatgaaatggttaaaattaattgatatactagttttctagggctcggtaaccaagtaccaaaggctaagtggcttaaatagtagaaatttattgtctcatagttctggagactgaaagttcaaaatcaaggtgctggcagctttagttctcttccaggcccctctccttggccatatggatacatctttctccctcttcccttcttccctctatgtggatctctgtatccaaatttcctctttgtacaaggacagcagtcacactggattatgccccaccctgatgacctcatcttcacttgattacctctgcaaataaagaccctgtccccatattaggtcccattgggaggtactgggcattagaacttttaacgtattcctttagggggatacaactgataattaagaaaatgccataaagagattctaatctaaatttaaattttggagaaagaaaagttttatcatttgctttaaagggaaaattagagtcaatacaatttggaaatataagatgagcttcatgttactgtagaccactgtatcgtaggagagtagtttatctttcggagaaggcaatggcagcccactccagtacttttgcctggaaaatcccatggacggaggagcctggtgtgctgcagtccatggggttg

SEQ ID NO: 46168 - DNA, 1356 bp, Bovine  19866880912256
  misc_feature (1)..(1): n is a, c, g, or t
ncgcaagagggttggatacgactgagcaactaaacgacaaacaaaaacaaaaatcctggtttctaccaccctttgacttcttggttatgtttatacctataataaaattaggagaatgatgtttttggcttctcacatcgctccttggaaaacttctacactgataaaactcaataatatagcccagtcctgggggtttgtctttagtagtttctccaattgaagtgggcagggagctaattttctttcagctggaatcaattttttctactcaagtccattcactagaattaatcgtttcggaagaagctcaattttgctggaaaatccagaaaagattttagttacagctccacataataaagcaattgtgtaattaataatacatttgtcactcctttagagagtgggaaaaaaagtaacacatgtatggctttagtgtaaatcctgacagtggagatttttttttccagggaattatactattataccataaaaatgtcaaggtgcaagtttactgttcctactaatattctaaaatattctcttcagctgacatctctgtcaattaaaattaaacaaaattgcattctgccatccacacttcaaggaggaagctttcagttttatggctgttctttgaattgatttttaagatggcatctgtaaaacttgtctgaaacaagatgaggtgggatgaatctaaggaccagtcaatgtaaaaaatgtttttaaagatcgtgaattgacagccagaatagactgcacatgtctccaggtttctcaactattaaaatacatccagcaattcttttgaatggaatgtttgtcctgatataattcagtgccaacatgcttctggcttgttttgggtttccaatatttttacagagagtaacataaacaaggaagctggtgagtgttgcttccagttactcaatttgcacagatttgggaagagtcctcctcctggtgtttcccacagagcagcactgtgaacgtgctttctcacgggactgtggttctctgggaggacaggcaagagccatgtggacagtggatgcttttggcaggatgaggctgccaataaaatcttcagggagatcatcctctgtgataggaagaggagcaaaataaaattacaattcccctaaaagaaattgaagaagccatctttgggcttagccctctgattgccaaactttaatgcgaaatgttttatgagtgcatttaaggcaagtattatttaatgatccagagtttcttagggccaaagtacccccttcattcttggttaagcaccttttggaagctcagtgttccttttcaggtcacctggttaccacttaagggaaa

SEQ ID NO: 46169 - DNA, 644 bp, Bovine  19866880915786
  misc_feature (1)..(1): n is a, c, g, or t
natgcctctctctaaaagcatttaataaatgtctattaaagcgctacaaatgtaagatgaatttagtggcgcggctgcctccctgaatctgaacggtaatgatggatttatcaacggggattcgccttcaactcagcaagggaggtttactcagcaaatacgtctgcgagcacccacccaaatacaatcatttgaccccctgcgggcattagccacctcacctcttccgcagcctgcttggggcggggatggcaggggggcggttagggtcgcccggggccagcgccaccggaggaccagaggggcaccgcccctctcctggccttttgcctctcctctgggccttcgggtctctgtctcaccttttggacgagtgggggacccggcttgcaggtttgggcatggggagtggatgatggcagtgttagagcacacgatgaactgtgggctgtcttggttttgccaggtgacatcaatgagcggcctttcgctcctcagttttgaagagagagcaattgttcctgcgattaggttctcgagtacccagctgtcaagcacatcttaggtcctcggatcctcgctgggccctgggcaccattctaggagaggcggctccaggacagaggcctgggctgccaggtcct

SEQ ID NO: 46170 - DNA, 1143 bp, Bovine  19866880935559
  misc_feature (1)..(1): n is a, c, g, or t
naaatatgcaaagctgacataaataccaaattaaacccagccaggtataacactttggtcacttggatgtgaggcagataccaattccagggaacaagagcctgttgatttgtaagaaaaacccggtcttaccctctttgtttgctgcccattagttttgcatctgggggtcactctgctccttcctgctgagacaaaacctaataaaaatgattctgctgtgttctctgccagcgcctccatgctacagctcatgtgttgttggtacggtacattggactaataatgtagtgtgtttttatgaaggaatgaagggccttgagtgcgactgacataggtgttttgggattttaaagccatttctaaataaaggaggctgggtgttctccaggaaggcctgggctctgggataactgtgtaatcaacactcgggagagtgggatgattttcaattcaacccaatataggaaaggggatcagcaaatgtgaagaagccaaacaaaacccatatattttgtatttattttcacctgtttttatatatgaagagtattgagggaactcagaagctagggacttgaaagaggaaaagagaaaacaattttgaatactgtccataatttatgctagaaagtattaataccagtgtaccaaccatcagtgtgaaagaccagcatttttgtttgctgaatacatccttttgcttaatgagtaatgaatgtaggagtttccaggaccaatagcttaatagctccaatgttgtcatcctgcattgttctaattaaggattatacattttgacagatataatctgtaatgtatttaattacgcaaacacagtctatcaaactcaataagttggaggttggattcaagactttttctttgaggtttttgttgtggggtgctgactctttctataaccacagttggtgtgataccaaggcctgttaatgtaaaatagcccttttgaaaaatactgttgaaaaaattgctctttggtcttccatactagaaatggctcaagacaatgattttcttttgaagtcaactttgttctttgccagcagggaacaacataaggatgatactggattctttcttcaggcagaaaccatttgactacatgatggaggacgaaag

SEQ ID NO: 46171 - DNA, 1450 bp, Bovine  19866880950612
  misc_feature (1)..(1): n is a, c, g, or t
ntttggtcaccttgaggaagaaaattttcatttcgacgttgtcaatccctcagctctcacatgcagtaactcgccaccaaaggccagagtattctctttcttttctttcctctccttccacaaacccagctattatttagtctctagcaaagctgcacaaaccaactgttcctcctcagattattcctttcaaggctcaagtgatatgcctccttgggttacaccttccaggttttgtggtcagatggggctgtcagtctccagtattccaccttgcaagaaaatatttatatatgagtctcaccaggtcccatttcctctgggaatggtcctgcatgccgtgccttcatgctagtggtgacagttggatcgctggttttcatgggaccactggacagctggcgggaaaaccaggaaactgccttcccctctgtgacttcactcagcctgaaaactacaaggtgtgtgactgtgagctggaaagtttctgagcggttatatgcaacactttgagaaaacacttggaaggaaactcactgatgctgaagcaatggaaacttgtaccattcacagaatatttattttcctagatctggaaacaccagagcttgcttgtacagagtcttttcattattattttgttactggtaaatagtaattcccgttattcaccaaagggtcgtgaaactgacacttctatatggctgagaggggggtacatttgcaaaacccttttggaacctcaattgaccacatgtgtcaagagccactggcttttttttaacaacgcttgactaaataattttacttctaggagtctgttctcagaattaaaaagataatgcttgaagatgttcatcaaactattgcttacaatagttagaacctaatataaacctaccaatatggaaaatggaagtataaaatattttctttatatttactgttatgcagctgatataataacattgaaataggatatgcattcttaatgattacaaatatgtaggcaaaatatccacagttataaagtagatgaaatttattgtctgcttaatatatgataggcaatgtggcacatgctttatagtcgtgtttcctttaatctgttcatcagattaagccaaatttattatagctccaatttacagaggaggaaagagagtcataggaattggtttatctaaagtaatacttctggagtgaaatttgaaccccatcctagttggcaacagaccttctacaacatacaattccttgtgctatgtgattaatttcaagtaaaaaacaagcattagccaccaaaaatagagaaaaaaacaccccaaatcaaaaacaacccaacaccaataaataaaaatctgacgagccctaatcttaatggtaaccacagaaaaagtaagtaggaaaacttaaaccaagagaaaacattcaaactgaaaagattcat

SEQ ID NO: 46172 - DNA, 806 bp, Bovine  19866880954775
  misc_feature (1)..(1): n is a, c, g, or t
ntaaagaatagaattttgtctttgtctggaaaccactgtattactgtggttattaaacaagccggcttcccttcttagtgtcaaggcaaggagagagggataaagagaaagggtgagcagacaattcattttcaaataatacaaattaaaagtaaatgtgttttaaaaaaattaaacctgactgataaaggcagatgtgagatggcagtaagagagaaatgggaggaaaaaacacagaaaagagtctgaatttttaaaaaagatcaatctgtgcagagtaatcaggaaaaacagcctgggatggaaaaaaataactgccatttcctatggggtagctccatgaccttaggaaaaatggagaagcagctctaccttggggtggtagttttacactttgattttagcaacaagtatcaaaatatctgaactaattgattgtcgagttccttggcccttctccaaacagcaatatagatttaattgtatgttgtttaaaactccatttctcgaacagtgtgaaacatgtaataaaagtcataaaccgtatcggagattcccccccacctccagtagcataaatacccgactgacacttggaaatcttagctaatacttttaataggctaaaaaaaaaaaaaaaaaaaaaggcatctgagaagggtagccacataataaaatctaaactgttaatccattttaactcattcaaaaagaacctgtggtttttgcagaggaggggtcggggtgaggagaccccacgtcagagatctgatttgttcgaactcggttcagctaaaccacactcc

SEQ ID NO: 46173 - DNA, 1165 bp, Bovine  19866880992602
  misc_feature (1)..(1): n is a, c, g, or t
ngcataatgaatgtaaaaacactgaagccgagattcaggtagaattttgtgagaagcaaaggagggccgggaaaaactgagcagagagggtaaggacgagttagaaaaatcatttactagcagagaaagagaatataacttctcatttcattctatgcattttttattacataatttattttgtgtcttgataatgtggagttgtttttattgtcaaaaacttttttattgtgaaatgatctgagagtaatagaagaattcaaagatagtgcagagaattcctgtacaacttccagtttgccataatgctaacctatgatcctaagaaattaactacaattaagtacaataatattaacggaagtcaagaccgtcagatttcaccagtttttctttgaatgctctttcaatttctgtcccaggctccaatccaggatccagaattgcctttaatctctaacttcccaaatcttccgtagctagcttcagaacacagggcgttcacataccatctctccagtccatctgaagtcaacaagtttgggatgggagccccgaagcgccagttccaggcccgaatcagtcattaatgaaacactaggactgtcaagtggatggtcggggggctcaaacctgaaagcgtcctgctaatgatggagaaatattctccagtgagatcggttattcattcatccatcacccagaaaatttttcctgagcagcagccacacctgagacacagggctgcacagcccatgagtcccattcatcgcttgccagcagttctaatcctgtaaagctgatcattaagtatttatcgaatgcctaccatgggccctatgacacgcattatgaactttccattagcctgtactccatgaatattccattacaggcctgaaagggttaaggtgccgcaatgcctccccggggcctggggagtcccgcaccactcagggaaggttgcagacgcattaggatccaagtatgtattttcttttcccctctgtttatgtctctgttttctgtaaagtctcctaaactgcagccgtatctcccaacgtctctgacaatgctataaatttcattaagaagatgaagcctgtggggcaattaactccaaaagcggtacaaagcaatagcgaggacatcctggcctgtagta

SEQ ID NO: 46174 - DNA, 1529 bp, Bovine  19866880993569
  misc_feature (1)..(1): n is a, c, g, or t
ngtcagactaactctagccaacttgggactgaaaaagcctggcagatggattttcggtcaccactccgtgaagctggttgacagagctccacagaatccttctggagggaggcaggcttttaacttgattgatgaaattatatctaaatctcgtagatttggaacttcaaaggcatttttccctacttagggcatcctggatgaagggcgtatgctatttgtaccaaactcccaggctcaagtggtttgcaaattgacccctttgtaataggttaaaggtttcttgctagataacggtggttcattttgattaattatgtcagggaattaatgtatgattactaacttttagcagaccctgctccttctgaccccgagctgcttgtttgtgtggctggttgtaattttcgaccgatgggttaggaggggtcactgcgtggtcagcatattttaaacaaagggagaaaaagagaagcagaagcttccaaatggagtggacactgcagttcaaggccttgacagaggagatctgttaagtgttttaacagtaggcttttctatatttactcttgctaataaaagagggttcgctggagtggagagtaacctgggaagagtcggagaacaatttaacagttaaatgttcacccataaatttcactttgtactggtttcaatggcctaggaccttgttaaagattaaatggcaaagtgtggcgtttcagcttttgatagatccagagaatccaaatgaagggatcttgttaataatgaggttttccagtagatggtgtgtagtttcaacagtttttctcagacgaagaattgcatatttagaataaaggtaacagagagtaagctgatgatgcctcatgtcaagttaattttacaccagttatttttgtcatttatgggatgacattcctcctatatggaaggattctgtgctttggcatgaactaggaacatcatggctcatgtttcactctacacggtcagttcaaaattcccaatgaccacaaaactagactggttttctcgatatttttgactcctggaaagttaaatgcatttaccacaagaattaggtcttcagggttttgagaaagacactacggatctattctaaaaatgaggactctcttcctgaaaccttgaggtgtactctctacaaatgcctatagatgtcatgttgtcagttgtcttccaactgtgatcttggtgaaatagagttattaggccaagaagaagaaaggcaggccaaggaagaagaggagagctttatggggaaagcagaagagcccacggagaaatgatgaaggaaatgcaaggaagcacaattacaaagagggttgaacacagcattagggtgaaggagggccagattgtctggttttggagcaaatctgtatgttaaagaacttgaaagcagagattaaaaataaaattcagaaagaaagagaaattgttatacatggaaggtgttacttagatactgtattaaacatttaaacattataaaacaccct

SEQ ID NO: 46175 - DNA, 1348 bp, Bovine  19866881011930
  misc_feature (1)..(1): n is a, c, g, or t
nccagtgaataaagaatgagcttccccaaactccattttggagtgtgactttgccaaaagtcactcattcattcactcattcacgcaggcgtggtgctgggaggtggcaatggaaaggtcagcaagacagatgctttgttgcctttggagggggagggcagcatgagagctcaagcaagcgcaataagcaatggatgctgaatcggattcatggcactggacaaaacctaactggaagataatgtgacggccaaatgagagaggaaagggtggactcggatacaagtgccaaaccaggcgtttctggggaggggatatttaaagtgaaatcagaagggtgcaaatgcaccagcagagccacgtgaaaggaagaacattccaggtagaggggacagcaagggataagccctgaggaggagacaggcttgattcatcttagaaatagaaaaagggccagcagggcttgaccctgtgagagcaaagtgggtttgaaaggttgctgttcaagctgaaaaaataaactaggtgggacatggaggagtgctgttcccctctttcttgttctgggtggtgagttatacttagaaaaatggaggggatgttctggctcattctttttatgcttcatctctacacaaacttttcttttttggccacttgttatttttataatttttaaaaatgtaaaaaaggatagatgccacagatgctgcatattataaagggagctggacatggtgggaatgggttagtttgaagacaaactggcctagatctgaatacctcttcagccacgtgctaatctgagtttttagttaacatatttaatctccctgggcctccctctcctcttcttgaaaacagattcaagacttagatggcaaggtgagtaatatagtgtctctgagtatctcttgatttggaagaagcacatgcattgttcagcttgccctgaacacaggtctagatgacgatgtttaccatattgaagaaccttctagcaaatgcctagggcccactggaatgatcaaattcactaaaatgtatgtttgacatgacagtgtggaaagtatttgtttcaataataggaaactaaaataaaacagaaatggatgaaaagctgtttgtaacggatagaaccttccgtccaggattgaggtacacgattacaaaagacattgacttcctactgggatgtttctcaggcgaccctgggtagagttctatcaatgctttgacagacataaattctgaaattgattatgtcacttttctctgaaatatgtgaccagggatactgatctattttctctttttaaagcatagatggtgactcaatgtgtcatgt

SEQ ID NO: 46176 - DNA, 1572 bp, Bovine  19866881029548
  misc_feature (1)..(1): n is a, c, g, or t
ncctattggacaaagctgtttaacttggtctctgttttccagaacacagaagacaagaacattagcgtgtttgtatggctttcatgttcatagacgggatttcttgttttcctgtgtctaacctctgaaactctgttcacactctactctaagacttgagacacatttgaatccagaaaatattgatttcatcactgccatgttgttgaaatcataaaacgacataatcagagtgcagaaagccaaattttataaacaccctaacgtatggcacatgactaagtgataaatcttgacacgtttaccaaacaaagtgaaaatcttcatttgtcttcagaaagagaagcgctcccatgtgttcggacatctgtacagtcaacatgtggcaattactgtgcgaaaaataggatcactgtaactgctgttgtaaattacggcctcattgattagtatcttccctctccgactccccacttcatcacaaataaggagacacacacactcgtggcctctgaagagattttccccaaactgatttaaatttaaatttagatttgctcccaataggctctcctacagcattacacattctctgctttttgcttaaggatatctggagtatttctcacacaccgttagtgcatgtttacttaagcactaaaattaaatacacataatgaagacatctgtggcaaacagaattaataagtggaataccatattgctgtgaagatgtatattcaacaagcacgggacgcacaccgttctctctggaacttggcattcctcatgtgttgctgagaatttttgaatgggtcccaagtgattttggtgtctagggattgcttactgaggctggaaacctccccaagaagctcatctcgttaaagcgtttccagttcctcgtacaagacttttggatcgtgaaactgtaatgtgatacaaacatgttatgatgtttgggaaattgatcaaatgaggatgagaaaatgccaattgttacttactctgaaaaagattcttcttagagttccattttaatgtgttttccctccacattaactagacctaatatagggttgattatttttcaggatatctctgaggtcatattcccaaattgccccactacatctatcagagttgcttggaaaagtaaagaaataaagtacaaagcaatcatccatgagctgtacctagattctacataaatatatgaaggattgattatttatgccatttctctcaagcctgtgtttgtctttatttcacaagcaaatttcatataatgctggagatgctacaaagcctgaatgaggtagagaaatggcatttagcctttgaacctgttgcagggggaaattaaactgaagctcagattcatttcctttatgccgcccctagaaaaaagagggtaccagctgatatgtgtatagtaatgcatctggccttaggaagtgaggatggttctgctgaagggaatacatcatacagaagggctctggataaacaaactcggtcttaaccagagctttcttcatgctgtcctagcagtatggctccaccagaagg

SEQ ID NO: 46177 - DNA, 619 bp, Bovine  19866881093092
  misc_feature (1)..(1): n is a, c, g, or t
nttactgtaaaattgcatttacagttgtagtttatttttaaatagttcttgagttagtgaaataccctgtgcactcaaggatttcaatgaagctcctgaccaatcagaactcattcactgttacactggaaaatgaaagaaagaaatcttatgcccatcttgaaaatgatagaaagtactaggactgagacaaaggaattttccattaaagatcagctagttctctagttctacacgacacaaagctgaagagtaaacattttctatcttagcacatgtagctaaatgagattacacaagtttgtaggtgcctggaatttcagttttgttccctataatgatcaaatgaaataaaaacacttgttttatacttcatttgtagagaggtacaaacatatttttttaaaaatcaactgaaagcagaagaagttaggaaggggaggcagggctcatatacttcataataccaacacaaaccctccaaagagtgtgaacagattgcatgctgttaggtctataatatttttaagttatatatattaataacacctagtactctacttacagggggtattcccaggtggcccagttggtaaagaacctgcctgccaatacagga

SEQ ID NO: 46178 - DNA, 1282 bp, Bovine  19866881219920
  misc_feature (1)..(1): n is a, c, g, or t
ncgaggtcctgtgagtgtgatgatttgctccctgcttcatgagtagagctgattttaagtgcggctaaaattattccaaaggacagaatattaatcaaatcaatcagagctgacaaatgagaaatatttgaaagtcaggggtaatttacaactttgttattagttaagaatcgcctgccttgtaacagtaattaataacacttaggaatgatttggaaatccccctcccatgctctttattttcctctgtctcttaaggaaggaaagagaaaaaggaagcaaatgagtgatcactagaaacaggaaaaacactgaatcgtttgtggggagaacaaaactggataatataaaagaaaaggaaaaaaaagattagccccatgggaggccatcaggaaataaagaaaatacaggaggagggatagtaaatcagaaaatgaattctgtaaccataccccatgagcaggctggctaaaggttgaatttcaaatggcccagaaaccccatcaaaatgaacagtgctgctaaaaaatcttgaaagtagctcagctctgaatcaaggcagagctcagggcattgtctgttttgttgttgttaacaatgtatttctttatagcccaggagcagacgtgtgcaggctctttcccaaattctatccctggagacccgactggctttcatgtttctgatgttaactctcctcttggtcattggcaatcccctccccccatcttaggttgattattagattgtctcaaccccacctaaacaacacaccaaaataatgacttgttgaaaaactataaatcatttcagtgtctgagcttggaaaaccacttcagtcaacaggcttgctgcgagaaggtaaagaaatccccaaccttctgctgaggaaaagctgctacttccctgaagttttatttgttagatggggggaatttttcaggctggtttaaaaaaaaaaaaaaatggagaggggggaggaaaaaaaaattttttggtaaactttatctggtctttattataagccccagtgttgtctcattgagctcaggctgggtctacacaaggtagctagagattgagatttattggtctctaaatgaaaagattcatttgatataagaggttaactcaaagttcctatactctgactagcttcagcaaatgtctctgtcgagtcagcacaaaagcagttcaaagaaatctgaaaaacacacacagatacagacacacaaacacacttgcccacttaagccgcaaatgcaattctcttttctttgtt

SEQ ID NO: 46179 - DNA, 1803 bp, Bovine  19866881300984
  misc_feature (1)..(1): n is a, c, g, or t
nctccaggcaagaacactggagtgttgccatttccttctcccaatgaaggaaaggaaggtttccttcctttagcaaactgtctaagaaatatgaattccctggtggctcagatggtaaagcgtctgcctacaatgcaggagaccggggttcaatccctgggttgggaagatctactggagaaggaaatagcaacccactcccaggattcttgcctggaaaatccccatggatggagaagcctggtaggctacagtccatggggtggcaaagaattggacacgactgagtgatttagtaaattactttcttttaatccaaaatcaattaagttgatttaaagctgagcttaggcctttttcagaactagtttatttccactttctctttaacactagaaattgtatattctgagttcccaactcagaaccctggctgtttatgacagcccctagactttatgggctctgaactccaatattgtcaaactgggtacaaaggactgcggcaagtattgctcagtctttcagattctcagttgctcagtggacactttctgcagtgcatatcaattggtcttgggaataaaaaattgcctcaaggagaaaaatgatgtcaaatgagaggttaatttctctgtgcttcccttgtctctggaatcttggcttccttatctttgttgcctaagtagcacttggatacttagattggatgtgtgatatacgtgtgtctgtggctcatataattgttatacatatttatatataatgccatttgtgtatctatatctatacctatatctatatatcttccagatttttgaactgttttcatcaagagttagcctgctataccatctttccttatatccaggagcatattctggatctttctaatcaacaccattgataccatgttttcattgacaattttaaaataaaaacttggttttatctaaaataaatgaacagatgggatatgataaataatgtagtacactcagaaattatattacgtgatttgttggcactctaatatttaaacttaatttctactttaaatttgtggattatggctctgaaaggtaataacgttcagatgttatatcccttgttataggacacttctagcaaaattctgggaaattgtacttccaatgataatattaatgagtagtaattattaatattaaggaggcatcaacagttttctaagtactttacacatttaattcaaccttttatcattaaaacactataatagaattgtaagatgcatttcacagagaaagacaggtagagtattcccagtgttatttaccatatggtgaggagacgtgattcacattcaagttgttcagtttttgaacacaaattcttcacctaaagttaaagaaatcattgacttggtatatgggcagtccttttctcttatatgggagctctatatttttcttttgacgtcagttaaaaatctaagttttaatttcatttcatagctaaccaagtgatatatacctattctaattttgtatgtctactgataatttttaaattttgccccaaaagaacacttcagaactatttctttcgaaaatgtaatttccaaagtgagaaatattagcaaggataatttcttagatgtttgaaaaataatctatttttagaaataattgtctgatttatagtgtacctgacaattaacttatactctattaagctggaaaataagtaggtattagttttgcaatttcatagcacatctatggatttattagtgctactattttaaaatagcctttgcta

SEQ ID NO: 46180 - DNA, 1612 bp, Bovine  19866881308128
  misc_feature (1)..(1): n is a, c, g, or t
natggaagatttagtatcctttcgcacactttaagtctgagaaacttctccttatggcttctgatgagtcctggagactgggaaagaaatcaagttgcttgagattggcggcaaagattcatattaagccgctcccatttgcagcagagacgctggtggcactttgcaaatattgtcaccattgacccgcagaggtggtacatctccacctctgagcaccgctttcatgtcagcaaatgagctgttttcaatccctgttccacatttttttttctgctattttgtcaggttccaagctgagactgtcaacattactataacttgtgatctcgcacagccatcagttgaaaacaatttccatgcacatttattcaggccaagccacaagcaggaggtcccaaggtggcaggttcttgcattactctaatccagttaccactgagttaaaatgctttcattacagtttcaaacccccgggagaaagtaggtatgacaagctgggctctgcttattatgttttaaaccaagattgactccaagaaatagtagcaagactgagctagtatatttttacctacttcccttcttctgtctttcgtggttcatgttttgaatgcttcttaatttgaactctcttcaagatcattgggcccaccttgctggagatttggagaacagaaatacaagcaataattataaatacattacttatttctgcaaagtccttcggaaaccttagatgtcttgggcaggctttaacctgcccctcaccccctctgctcaactcaaatattttgaaactgtctaaacttattcaccgaagcagtggtgaattattaaaaactaactactttcttaactacttccttaatcattacagatgaacactctaaatcaaatatttaaggtataatttgatgtaaagcaacttatttattcaattaatatttatgaaacagctacttaaatgtaagtactgtgctaaacctgatacctcaaaggaggagatgtgaccatcataccaaacttttctgggtttacaatcttcgtgggcaaactggacagataagcatttaatgcttataatttaagacatgtgctataacaggagaaggaaagaagctgggaagtaaaatctcaaggtgccttcatagatccacctcagagaaaagctatgaaggcttcctgcaggaaataacacctatgatatccctaaagggatacaatatgtgttagaggaagatcggaccactttcatgtgacagaatcagcaatgcttaacagagaaagactaggaaggattttgaaagagaaaacaagctaaagtaaacttcagcttatcaaatgcacattcctgcaacttcatatgcattggctgctaatgatgtccattttcaagtatctgaagcttatatcatttaagggtccaaactttattactctattttcgcttcagccaaagacctctctcttaaaggcgtcacctcattctttgcctttccaatcaggaaagccccaataacttctgtacttgcctagtgaaagaaatgagaaattattatgaaagtgacttctcttcccatccagtttttaagatctttgaaatttctgg

SEQ ID NO: 46181 - DNA, 810 bp, Bovine  19866881328798
  misc_feature (1)..(1): n is a, c, g, or t
ntataatattttagatgatatgaaatccactgtaatacagaagcaacttaagactcagagaacaatgcagaatgcagtgcactaaagagacaggggtcttgaagaaaaatcagcttaaggcatgaacctccaggttttgaaatatcagaaagatttacccatgcctgaaagccacagaaatgctttggtgacatgaatgttttcagatgtgactaactttgtaaatattatgattctaagtgagattaagaaaaatagaagtgtccagttaactagaaatacaattcttttaaaatttacaacaaaaaatgaatgatgacagactgtcctttaagatattaaattcaaagggatcttaagtttatttcatagttcaaggaaaacagagctcttctaagctgaagtttcataatttttctttaccaatgagcatgtatacactgtcagctatactttcgtaacttctctcccaaaatcttcaaacagccatatctttctgtttttactgcacagacaattatgcaaacttggctaaatgactctcctcaaaaatagaatctatttggagagaagactttatggaaaggcaaatggaatatctagtattattgcattagaactactgcagtcaaactctacatttaaactaatttctaagtcatcataggctttatcgtcaggtgaaataatgtattgcctgtctcttgtctctttttttcctttcttccccatttccacctctttctcagaaattccatattgtccacactcactccttcagacacacacacatgccattccacatacata

SEQ ID NO: 46182 - DNA, 1577 bp, Bovine  19866881333513
  misc_feature (1)..(1): n is a, c, g, or t
ntattgctatcgttactgttatcattgtcattatcccagtggtcagtcttgttcagtccaactgccttggctgctcttcctgaggacctctgtatgtcactcactgcgctgggtgatgaggaatcctcagcaccggaggtctggctgagaagagacacttgaggcatgtttcagtgcaatgtggtaagggctacaaatgggatattcccagtgtctcctggggccccagggcagaggccccataggagattgcagggtgggaaagagggcaggtttcctacagaagttaatggccccagtcatcacacacctctgcttcacagtgggaagtgatttcggagccccctcacacccccgtcctgcccccaggagaggttcctcagcctgagtacactcctgacactgctccagcagttcatctgagcgttttgagcaatgcataacttgcatcattctgggccatggaccaagccagcagaggagaagccaagacagctcagggctgccggcacattccgtaaacccaaatttccagagctgccttgaacagggtgtgtaaaggaacattttccatgtgtcaattaagcctactgaccacgttacacagagaggaaatgtaaatacgggactctgattggcactgttcagagcctttgatttccatacccggagatagatctgcaggcgatgaagagtacttgacttccaaactccagagtttggatgcctgctttgcacatcacaagggaaaaaagtacagccgtgaagagcagtcttgggaaaattctctgcttggttcccacagtaaaaggtacattcaatgagatcaagaatcaacgcggctgttctgcttacctatcatttcaaatttcccaatagacgtcccattttcgaataaaatgatgtgggttttttaccacatttcctccttagaagcacagaactgacatgaaattgggatactaaaccttgactttaaattgcttctcatctcatgccactggaaacttagcataaaactctggaccctgtgtttccttggaaagtctgtgttctgttgctggcaccatgattgaacccactcgtctattccaagactctagagtatctcactgagtcagaacaccccgtgtctcgcccatatatctatttattaccacactcactgggaaagacaagctgagttatcctttaacagagaaaacctgagcggcatttatgagtataaagtactgcatcaccgtcaacacagagccaggctgagaggaaagccgtcacatggtccacgccaatcccctcagtgtggcagccactgagccgaaggagtggcccaaggctctcgaaggcttatcttctccccagcccccagccctaccctcaccgattacaaatacaattgcttgtgacagattgcccccccatcttccgccttgaattctatatgataaattcaacacgaagtgacagtcacagcaagtgttcagggccgtatctaaaaacactcattttactggagttaggactcaatgaatgagaaaatgtgaatgtacacctagggcatatctcaacactttaat

SEQ ID NO: 46183 - DNA, 634 bp, Bovine  19866881346929
  misc_feature (1)..(1): n is a, c, g, or t
nctcgggtggaaatccagcgggaacccgggcttctccaacccggtggaaagagctggcaaggtcacccattcagtcaccaggtggtgcatttaatttaaaaggagtgttaaccttgtttatacaaaataacaccaatatgccgagaagcagtaaatctattgtcgttaaacagcggggagcccctggcgctggcagcctgcccacccgcgacgtgaacccggctggcaccaggcggcgagcgcgcgggccaaggccggcgctgcgagcccgcccgcctccccggagaaggccggagcggcgccctttccgccctccagatgactctttgcattcttgtcaaatatatttagaacaagaggtgtccacttaaagggaaacatttgttaatcacttaaatgcaggcgcttggcagccctccagtttcacctttataaatatgtaggatcgggttccagttaagtggggaactcccgggcaaattctctttgctctccgcgtcccctcgaattgacctaaggtgaatgtccctcgcaccttgttaattttctatcccagcgggctttccggagtcgatgccagccttctatctgctcgttgacggagataaataaatgatgcgcggcggagggagaa

SEQ ID NO: 46184 - DNA, 733 bp, Bovine  19866881387916
  misc_feature (1)..(1): n is a, c, g, or t
ncatcacctaaatatatgataactctgaaatcatatccccagcctgagtttcttcccttaactccaaatattatgtagcatcagttacacagtaggatattgactgggggacttttcctggatgggatggatcatggggatcaacttcctcaggacgagttgatgactgggattccccatcaggggatataaagaagctagagtcagcaaatcgagcagagttggaggataaaaaatgagtcgccagaagcaaagactcagaatcagatcaaggaagaaccacagctggcaccagattcctggcaaggtaacatttaagtcaaacatggagcagataagagggtggatcacttccaaaaaactcagtcagcaatatatgggagatttcctatatgacagagagtaggttctaggcctaggctctagtttcagcatttaagttttgagaaatacagagcatgactacatggtataccccagcttgaaatcttattcatccatcgcagactcaaagctttgcctagtataaccaattctgacctgctatgagtgtctgactggaagagagatgtttaacatcagttaaaaaaaaaaaaacaaactaaaaacaaaaacaaaaccaaaaaaaaaaaaaatccactctgcaatgccagggtcctgattggctaattctgcaaaggcctcatctgggaaacccaccatcaggtttcccaaaccattccactggaatcag

SEQ ID NO: 46185 - DNA, 2452 bp, Bovine  19866881420908
  misc_feature (1)..(1): n is a, c, g, or t
nacctatcataaatgtgaatctttgaaatacacatcagtaaattcagaaatggaataacttgaggtcataaaaatgagactaagtaagtcagtctagtaatgaggatatatctgatgatatattaaatggaaaaggctggttacaaagtgtatgtagtataagatgcaattttatttatttacaagaatatgtagtagtgcaatcacaatagctgatttgtggcgaaagggaaaattcactttgagggtgtcttagttttgctttgtatattctaatttttctttgtaatgagtatacattgctcttatagtatcaaaaaacaatagaagcaactacattttggtggaaaacacagtcggacacttatctccaccagctgaaactctcctcagttaagccttttaatctgctgtctcatcaggccatgcatttgtttgatagatggctcagttgcctctggcctgtcatgttgttatttgctttgaactctgaacatctgggtggcagggactctagctaatattgttttttagtgtttagatatacagaaaaatacattaaaattcttctgatcattaggatgaatcaagaaccactagttcaatatgttgaaggcaaatatcaacctcctaagcctggagcataaagagaaacgaaggatgacccatgtccccatcctctgtctccttccagccacatctacagagcaggtcatactcagcaacatttaaaacaaccacagacgcaggttccttgaccacggactgcattttcttcctgggggtaactgcgttttatcttaaactatgcttttgcttcagtacaaatgttaaccatgttcattaacaattttttaaagttttctttttttcttatcactcctaaagtatgctttatttagtaaaagatagtgaacacatgttctggaaatagtaaaagccaagcttagatatttattgaattcatattttatatttatattttctgattaaaatcagaagggtagctggcgtttccttcatttccacaggacagaaagacaggggctgtgtctgttcaaaaacaaaaatgtatctgaaaaaaataaaaatatatcctaaaaattcagatattacctttacaatgtcaaatacatgaataattggatagttgtcctgtattatttttttcatatggtcagttagcaatatatagaatgccacaatggaactgattaactttttttcaaaaattaagatactcaataaaaaccaattaaaaaaaacaacaaatggacataattaaacaaaaacaaaacccaggcatttaaaaagaatcctcacatctaaatgcaaaagaaattattctataataacttatgaatccaatgtaataccaataaatattcttagactatgtcttattttttattttttaaaagcataatgataaaaattaaccacacataaaagtgctttatactagacatggaggaagcataggtttttaattagacagcattgagctatttgggtactttttcatatcacatagcacaaacttaaaaaaaataaaactatgaatggaaaacaaaagaaaacaacagttaagataaaagtaatttaaatagtttcttgcatcttagaggcttttggaaaccatgaaaggcccaggtgaaggcaattaaaatatatttgttaacatatgacataactgaatattaagaaatatttaaaagcaaaaaacatttaagaaaaattagcctggaaaagagaggactagggtctactttctgaaatgttgactcatgtccaggagaaagaaatcatgtccaaaaaagaatacattctgaataaacaacagcgtgggaggaaaaaaaaaaagagtaactgctctgctgccaacctgacttaaaaaagacaatgactcttgagacctgcctttaaactctgtcctgtcttggaccaaacttagcttgtgctggacacgttgtgaaggtccttcaacacttccttcctcaacacatctgccacataaggcactggtggccacctgaagtaagacacagatctgagccatactgccatggagggcacctggaatattcccccagaaaggccactgataacccaggcaaacgtcagggaagagaagctgtcgacgaaaggcatcatctgtctgagatgagtttgataggtggagagaggttgcccaaggaaatagaagaaacaattccaagcattccaggcagaggaaattgcatgttcaaaggcactgaggtattcggatgtgctcagagaatacacttctgtgtaactagagagcaggataggtggccagaggtggtcctatagagtcaggtccagtgcacattagcaaaagtcttcctttctaccatgttaagtttgggttttgtctttaaggcagttgtagagttattactacaaggatgtttttacagggaaattacat

SEQ ID NO: 46186 - DNA, 1045 bp, Bovine  19866881430250
  misc_feature (1)..(1): n is a, c, g, or t
nggaaattgggagtaagaaagttgagtcaacatactttagtatatgcaacactgactcgatggacatgagtctgggtgaactccgggagttggtgatggacagggaggcctggcgtgctacgattcatggggtcacaaagagtctgacacgactgagcgactgaactgaactgaactgagacagaatatataactttttaatcactggaaagtaaacggaagagtaaaatgtgtaaagtgtttattaaaaaacttatttttccttaataaattttagggatttttctgactttaaatattttcctcagtaacaccacagaacattctatttaatactctcatggctttcctggtggctcagatggtaaagcgtctgcctgtaatgcaggagatccgtgttcgattcctgggtcgggaagatcccctggataaggaaatggcaacccactccagcactcttgcctggaaaatcccatggatggaggagcctgataggctccagtccatggggtggcaaagagccggacacgactgagcgacttcactttcactttagtattttaacttacatcttatatttaatgtactgaatgtgttgtcaaactttattccaaccagtttatatcattttacagtcccactaacaatgactaaaaaggcctgtcacctatatgctagctaacatgctgttacaagaaaaatgtaccaatactgtcgcattttagctcagccactaaatatttcattcatacaggagatttttcttgacttgaaataaaaatttaattttgcttaaaaatgagttagcaatatacttatatgctgagtgtatttttccccacaaataattcaaaatgtgtctttcaaaatagaccaaatgctaaacattttctcattttagcaaatgtggtttctggccaaaattactgtcaagtaccttcaaaatatttggtaataattaatataattttgtttgataagacaagagatctttggtgaaaatacttacaaaaataattgtgaatgtggttaaggtagataatca

SEQ ID NO: 46187 - DNA, 730 bp, Bovine  19866881595628
  misc_feature (1)..(1): n is a, c, g, or t
nacttgatactaaggcaaaaaaaacaaaaaaacataaaaacaatgacaactgtttgcaaaatctctcaaggaagaaaatgattcattaatttaccagccaacgttttctaaccattttcttactcgttaggcagcaaactcctagaggtcaggatggtccagaattaacttatcatatatttctggactcagacatctctctgccaaatgggggaggcagaatgtatgtgtaaggagcaattagagagcactaaatactaaatacccaaacgcaaccatagttccagtggtcataacaaaggggagatgtccatggggactgatatgtcccaagaaaacttcgcacaagaatcaggtcttgatacacttgagcaatgtcaaaagcatcttggtctactccaaactggacccaaaattgggtcaacttgtaagataaataagctagatcacatttatgtctcaaaattagcctggccatacaaaattataccaaaattctttgtttctttctttcttctggcatgtaccactctcacatgtcttcaactctattcaatgctacatcactacgtgtataagataaaacacttaatcatagtccattacaaagattttaacaagatgataaaaaatctatagattcctttgtgggagacagtcaaccttcaagaaggaaactttcaagaaggaaagaggtcttgttgggggggtagggaattcaatagcccat

SEQ ID NO: 46188 - DNA, 948 bp, Bovine  19866881770114
  misc_feature (1)..(1): n is a, c, g, or t
nctcatctccagggttgtagttaggactttgtaatacgttccccactttgcatagagaggcagaagctagagatgaggccaccagataaaatccaagacgatctgtggtgcggaaatcaggatacgtagcgcctttcagaagacatccgggtacttggaatcaggtttttgcctttggcagtcgggggcataatggggttgatacctgttgtatgactccagagcattctgccacttggctggttaaaaaggtgggaggggagggtggcgggagggaggaagctgtttcttgatccttatggaagccagttaaaattaattggaaaaagcttttaaagacctaagacgcagaccaaatgtatcgccaacccgcggcctcatcccgcacggaacatgaaggtcaccgcgaagctgcagatttatgcagaagggttgggtgatggaaaatgagacaaaagcatttggattttattattccatttactctgaccctgggccataaagggtttggagagcctgttttatgtattcagctggttgccacactgacaggcatttggagccacttaaataaaccaccttggtcccacagctgcaacaacaccgtatcaaatataggttaggctggaaacctggagcctgcaacacagcgtctccagcaggtgcacggggaggattttttgtttgttttttgtagcctcttgtttttggaatagcttccttatccatcaattgattttgatttaaaattgacccggatatggaaactaatttggttttttgcataaaggatgtgcacacttgaggtcgagcccgactttcaaggaatgctcttttcactgagtttgagctgggtttcggagacattgactagtggtagaaagctggtgaggtttattttatgtttctggagatttgtactgattcatatttactttttttaagttg

SEQ ID NO: 46189 - DNA, 749 bp, Bovine  19866881935139
  misc_feature (1)..(1): n is a, c, g, or t
nggagttttgtccttggagctaatgaaatggttataaatgatcaccgttttggctttagctgcatcccaaagtgacagaatataaccacatctatgaaattatgctgaaccttaaggagcatggtcgccattcctgaaccaagctctctagggacagtttcacaattcctatatttaggagcatcagaaagatagattcagtcctcagtccttcttcggaaacagcacagagggcccagagcctccatatcacatggtccgtgtagaatgaatcaccaggacaaaagttctttgaaataagaacctgaggccaaatgccctggtagaagcaggagccgctaaagtgacagtgaaaacagtgtgtatctgacttcgctaggctttcagacctctgttctgcatagaacttggagccttcccaggaactgctagtgatggagtggggcattttccatttggagtggtgatttttattattattacaggcttttgtcagtattacagaaattgaggagagaaaaagaaaagggactaatcacaaatgctatttaccaaaccacattagtcaaaatactgcattttaaaaccccttaagttgttatacatcatcatataagtcatcgccaagtagtaatacaaattcttgagagttatgttgacatggaatttgtcagccgaagtgctggaaaatttacctctgctcatatatctgtagtcatatcctccaaagaaattaacatatcataacg

SEQ ID NO: 46190 - DNA, 813 bp, Bovine  19866880423285
  misc_feature (1)..(1): n is a, c, g, or t
naaaaatgactttgacactcattaactctgtctgcacgtttatgtctccaaaaaccaagcaaaataagatcagcttcagagatatttcaccaccgaaacagctctttctcagaatcctgatggagataagaagctggcccagatgaactgcaggattagtttagactgctctgtgctactgctgagaaatcagcgctgtttaaagagaacatcagttccgcgtgggccgcctacctgcggatggtgaaggtgcctgggggagctggctgttactctgcactgctctgctcgggagctggagcagggttctcagatggtgcttcacctgccttggtctgaaacacacgataaaaccacaaaccagaaatgaaccaatttccgcagcagtggagagtccaagactgaaaggtctcacaagtagggatcttcctgcctgcggaggtaaaccactgtgcaaaatcttaaacactcttaaagttggagtcaaaaattagaaccaccgaagaatggcctccaaacggcaactaaacaccatcattcttcacagctgagagtcataaaaaatatacagtcactttcaacacatgctgaaaggcaggttcctctctataaatgctgtcctttgtttggagagctctaaccattctgactagagtgttaattggttgaatgcaaatatttggtttgcgatatgggcaaggcattctctctctcaccctgtgtatatacataccttcatgaaaatgttattatatatacagatgcatatatgatacatatttttggcctcagttttcagactatgaaaccact

SEQ ID NO: 46191 - DNA, 2747 bp, Bovine  19866880445163
  misc_feature (1)..(1): n is a, c, g, or t
nagggttggctccggagttggggcatcgacttcattagcatttaaaggcgcccgatgccctttttcccacctccttgccactcggaccgggatggggagcagggaaggaaagcaagggtgcgccggggcttggccggctgctccggagttttccgcgcagcgcgcgctgccgccccgcttggttggagcaggggccgcagggctcccctgcctctccaagtcttccaggaggggcacactggggcatccaggagacgcggcgcttctctctccccaaatgcacgcttttaagtcttttctagtgaaaccgttcagcatttctgaagcaccataaactgtttctgatacagcaatgaagaactggaataataccgtcttcaggctatttggctacttcttcctgaaagagaagttatggatgacttgtctatgagcctcaggtgaggaaattgaagtccagccctcggcgaattcatgtaaacgtcagtttacagcaatgtaaggtcttacctggtggctcaggcggtaaagaatctaccagcagtgcgggagacctgggttctctccctgggttgggaagataactctggaggagggcatggtaacctactccagtattcttgcctggagaatccccatggacagaggagcctggtctcaaagagtcggacacgactgagagactaagcacacacagggcagcacacagcgagctgttaatatgcatagaataataaacttggaggaagaagactaaattcacaccccactttctgctcgaattgcctctgccagccagtgaaaacttaagcagtcgagccctcttagcctcgagggctaagaggagggtcacagagaagcagatcactcaataaacggtattttcagtttaaggagtccacctgattttaagagaatggaactggattatgcgaaacacaggccaaagggcctctactcaagaaccatgggaatacagggctgttaggtgttctttgcctccagggtctagacagccctaggtatacactcgagtgctgcccttaattaatggagtcaacttggactagacattcaatgttccagagtcaatttcctcctttatgagggtttctccaaggtaccctggaaagtagatgggattatcatatgtaactccagtgtctggtccaacaaaatctccttttcgttctccattctcctgaactatttaccttcccccttcccctgggaattgtgtatcatgtggctacataaggagggtagcaaccaagtgtaattccttattgcaatttccactggttagcagagtacctagcagcgaagtagaacacaggaaatgtttactaaatgaaaacaaaagaccacactttccaaactcagttgcttatcagcacattcattgtcaataattataaaactatcctgccttattactttcttactccatccatgaaaaaacataaaaagctaaacttgacagggaaaaaaagcaaaatatggaatatttgacttttcgatgtaactcacctgtatttttaaaattataaagatgtaaattctagattcatattttagttggactacaatatggactatacagtgatgttatctatatgcaggtgtgtttaaaaaatttctgatccaattctaagtgtgattaaattatttcttaattttaaagagtgagtcttaattacaattagataatatgtatgattttattctggtgaggactggccattgactttcttaacaagacaattataactggtatgcagaactgaattgcaagggggggaaatgatctaatagccaaatccttaaaatattatatatatatatatgtatacatatatatctacccttggaaaataattcataactaacaggtgtggtctccaacctctggaagaccctaaaataattacagatgcatcctgggatttcctagaattttgtgctggaatggctcccaaaactactcatcattttcatccaaaaaaagtagtgagcagcctgggagttcttggtactgtgctaaataaatctagagagaattaattagagcaaacatgatctgtgttgttttaataatcataacaagagagcaactttgatgtagacgcacatggagtcttccatttcttcatttactcatgaactcatgcgcttgctcattagcacataattactgaactgcacactatgtgtcaaagtgctacactatgagtatctgatgttgatcaatatgaagcttacactgtgttttttttcatgtgagatcattttttttcactgtcatttacactgaaagaaaacatcatgtctgaaatttgagattaagtggaacaatgaaaaagaatcataatctatttgtttgacagcaatcatttttaagctatgactggtttggtcatgaagacaaaaggcactctgtttcagtatgaaaggagttagcgcgtccacaactgctggaagggctgtgggagagaaagtcggagggttccatggcggatctcaagactccagccccaccaatgcggtgcttctcaaaaggtttcctgacaccaccagagtcacaggatctctgggaggcccccaacctctctggactagagccaggtttcatgagacttaaagtttacatgatttagagagctatctctgagactaaataaacgaaagtatgaacacaaaattgccagccactttcagagtcttagaaagagcccatgcaagaaaag

SEQ ID NO: 46192 - DNA, 1374 bp, Bovine  19866880779659
  misc_feature (1)..(1): n is a, c, g, or t
nctgggttcgcaagttgggggtcttaactgggggtaccctaggagggcgctgtcgctcagtcccgtggcgacgcatccccgggtgcggaggggaaagaagcggcagtcgggagagaggatccagggtgggatggaagtggatgtagggatgggacaggcacccacgtggcacgggaactttggagtcctcgcttaggatctgggcgaggagagcatttccttggagggaagaggaaggcgctcggaggagacagggcaggggtgggggagttgatggtggtggaaaggcttcttgctgggaaggctcaggtgtccgtcccagacgcccttctcacgggggcgcgggaacgaggccaggcttctgtcggccacatgctggcggaggggtgttgcaatccctctccggggaaacttgggtcttggtcccgcgtcctcctccctcgctctgcccgctgctgcaagaactacttggtgtttaccaatcactcttgtcttcccggattgtgggaaagcgcttggtgcagcagctgaaaaaacttggtcggaagtgaggggatgacgttagttcgcagcctcgttatcttggggacttgtaacttaggaaggggaatcggaagaggagatgttcaggtcccgggggcagaacgttacaaaggatgtctgtagtcattgttggttttgtcacggatctcagtgtcctctcattcagtaacgttaacgccctgtgtgaggcctaggcagtgggtggggaataaggtctctaaagggtgtgtgctgtatatctcattctctctctcttttttttttttttaaaccagggaaagttaagagatggtgtaagatgcttctgagaaattttcagtattttgcatggggcatgtttggtttctgtgagccttgcctgcccaagtttctaggaagaaaattttataggcagaaacttggaggaatcatgtgaagaaagtttaataggatcccatttttcctgccttgagaggcctgtgttcatttttttttttttttttagattttactcagttactgtcaaacgagctgctaaatgtaacatgtgcaggttaagaaacaaaatagccttcatttctctaggctaaaagttgctccagtctagtccgggttgtactgtgatattgttttcaacaagtgtttcttggaacacttcccatgccaaatgtcgagagacaaccttggtttatctgaagcagtgttaggatatgttcttaatttatcttcttataaaggaaatttctcagtttttcactggatccctgtatctttcttgaatctaaactgaattttaaactgcagtagatatctttaaagatgaaggaactagataaattactcagccaccaa

SEQ ID NO: 46193 - DNA, 1787 bp, Bovine  19866880993575
  misc_feature (1)..(1): n is a, c, g, or t
ngaagaccctaaagttgtcttactcgtctcactctttcctaccaacaggggcacctccatatcctgaagtccctcctaccaatatcctacagcatctccaaagagggcaagtcatggagagacccagtagttgcacacacaccatgtaagtggcttttaaaatcttttttgctctttatcagtcatgctgtttgtaaagtggctcagatgatcctcagctgtcctctatgtgctaaggtacaaccttaaaccaaacctatgcagaaaatacatctgcttatatatatgtgtatatgtgtctttacatttgtgtgtgtgtatgtgtgcgacacaaacacacacatacacaatatggaggcagccactgaatgctatattagaaatttagatttgctaacattgttaaatcttagttcctctggaatcttttaaaacagatgaaatccaatgcaggtacagcactgttttagttatataaatgtcagtctcagagactaccagcttcagttctaatatagttgtcataaaatccacagttattcactggttcttatttgatatttaacttaaaaaattttttcctggttctaagcatgttggaagcccatcagaagaaagacagtgagaagaaattagacagcagaaggaagatatcaaattgccagcagaaagggacagttggtgaactaacatagaagcagaaaagtaaaaattacatgcagaatttcataaacaataaagtacaaagcaggttatgatagactataagaaaggcttcaattatttttaagaaagcaggagataatatattgatatacgtttctgtttaaattgctgttattttgtaaattcttcagtactgaaaaagtaactttctagcacctgagtttcccacaaatacaaacagtaattgtatcaagcatattaaaaatgctaaaaataataattgtatatacttatacacacatagtatagtgatgatactgctgggtatactagaatgaaattattgacaaatatttcttgaaggccatatatatatatatatatatgtatatatatggctgtccttgatactggggataggtagagacatttaactgaaaaagtacctgatcttgaaccatgtaatatttggatgaggaatacctgacagaacatgaaaatcaacagaaagtgtgaagcaatgagtagactggttaaaagctcagattcatgtcatagtcaaaaagacacatgttcagtcttagtcctatatgttacattgtttacttaacttaaaataggtaaaatgatagtcctgcctcaaagtaattgtgaggctgcaatgaaataatgcatgttaagtttcctttccatgccttttgggcttctctgatggctcagtgggtaaagaatctgcctgcaatgcaggagacacaggacttcaggttgggtccttgggttgaaaagatcccctggaggaggcaatggcaacccactctagcattcttgcctagaaaatcccatggacagaggagcttggtgggctacaatctgtggggttgcaaagtcagacatgactgaatagtcgactaggcacaccatgccttttataataagtatgttcttggtaaatggtatcagtattagtagagtaacataacatcttatacaaagtctaatggtacaacattaaagagtattggggaaacacagtgtgtttcccatataacacaggttataagggaaggaattgaaaattcctacttatactaataggaaagaataaccagggagaggatatt

SEQ ID NO: 46194 - DNA, 1119 bp, Bovine  19866881011934
  misc_feature (1)..(1): n is a, c, g, or t
natcccaatttttttaaaaaaggaaaagaaaaagaataaggtgataaatagatgaaataggattagaagattttagtattatgctgaataaaggaactcatgtgaattcacattcatgtaaaaaaagtttgcattcatgtaaaaaaaaatgattctttgttgactgagccactagggaagcccatagtataactattgactagtattaactagtatactattcgtgtgactagtataactattctctacacttatgtgtgttcaatgttttccataataaaagttacagtagaaaaaaatcatcagtcattcttattataaaaaagattaagatattaagagatttagtatttaggaaggtgagaaggaatagtattctctgggaagagtgtgggacagggtgatgaatagattacagaattgtagggttcttttgttaagatttgtaagcgaagaagcatgtttttcaaacatttgccttgtcaaggaagtcagtttctcttgctcccctttcaggtatggtctcatgaagtcctgctggcgttggagtgaggacagccgcccctcacttagaaagctacactcgtgtctcgaaactgctgctcaaagtgcaaatgacaaggctgtgttgcaagtaccggagttggtggtacctgaactgtacgcagctgtggcaggtgtcagcgtggagagtgtctcctactgctacagcatcttctgaaggtcctgggacaacacccactttggggagatcgtatactcttgaaagcagtttctccaagaacaaagacttttctagtgggagttaaaaggagaaatgggacatgaatcttgaatcttcccctacacatttcactagaaacctgaaatgatgctgggtgagactgccctcaccatgtacccttgagacggagaaatgcagttcatttctgctgtcccaattctgaagacacagggtagatgggttggacagtgtccgttcaagggaggttttacaaatttgcaatctttgttgcaacatggcatggataagttggtccctcctaccacaggcttgtttcctttgtttccaaactctgactatagtaaggtccagaaaatggaatcaaatgagggaag

SEQ ID NO: 46195 - DNA, 1891 bp, Bovine  19866881139096
  misc_feature (1)..(1): n is a, c, g, or t
nattaatttcttttctaaagtcctgaatgggaaaaaaaaaaaatacctgcaggtcttacttctgcccaagatcatccttctacccaagttacaaagagtacttaggaacgccccttaaagggagatgatttaatgggttctattcctagcccagtgctgcctgttaagcaagttgtttgtgacaaagtttaatttcaaggaaatgaatagaagatgcctgagtaaggtcaccaggaaatattaagtgggagaccaccagaagtatcactcacttgggaggagaaaaccgtgtaattgggaaactaaactagttaagacagaaaagatctgagttcctagttcatatgtcaaacaggagggactcagcagagacacgaagggagaagagttaagggccagcaatgaaactgtatgatagaggggaaaaaaagagagagagaaaccactgtggtttcagatgcactttccatgggattttccaggcaagaatactgaagtgggttgtcattcctttctccaagggatcttcccagtccaaggatggaactccagtttcttgcattgcaaacagtttctttaccatctgagccaccagggaagcccagatgcactttagtaggggccaaaataaaatcttaagggaatttaagtaggcattacaagcccaatactggcagtgaagagacaaaatcagaagtgtgagctctgaaattcttctaggaaagggagtgtgaagatgagaacgtctgtggtgtaaagacacaaaagatatatccattagtgtgctaatgggtctcactactcctcaaagctgtgtacccaaaataaacagaaaacctggaaaacaatgagaatggacctataagaaaagtgagttttttattagaaaataaggtttgctattaaagttcttgtataaaaccaagattttacatcatgcaggctgttttcccacatctcagcgtcctgacagatgccagcctcagcttgttatttccaacaataaaaaacagtgagtgacctaagggattaagaatttctataatctctccagacatcatagctaacttgctttctttcataaagtcgctaaatgttgccaaaagacaggccaggtagtatacaaaaaggaagaaaagaaatgaggtcactgttttcctggcctccacgtgggcctctgtgctggagtctctggagcctgtaacactggatttcatttgtttactgtatctccacagggatgtaattaaaaagaaaaatgagatcaatgacacagtaaatggaataatagcaaacaggttaaacaatgtcaatgggtcgaagtattgaattttactcacatggaacaattcggtgacgtttcttttatgttttgcaattttaagaaaatcataatcagaatttgttaacgttgcttgtataaggctgatcaacatggaaatggccagggaccccagtaggctccagtgaaccaccctctcaattctccacttcagccagagaaaaagtcggtgggagaaattggctatctcgaagagacagaagacattgaggcaggtggcaaaccacatacttaagtagttggtgaatgtccagaagatattaagaactacctttattttctcattttcataaacacctgggtagagtgccagtatggtgccgttgagtgtcattacacaaagcaaatacattctggagagagctaaactggtgaggatgtagtcagctatggagatctttttcttcttaatccaatcaacacatattactagtccaatgcatccattcacaaacattcctatgatgaattatgcagtcattatggtcagaaagatgtggtcttctatactgaacatgttgggagagaacaccctaatctcaaatatta

SEQ ID NO: 46196 - DNA, 1022 bp, Bovine  19866881830572
  misc_feature (1)..(1): n is a, c, g, or t
naaactgcactttgagttttgatcttctctcagactaatgacatgtggtacaatactctcttgtgatactgggcagaggcaactacagttcccagcaacccatgcatcactagaggaatcaacgatgcatagacaaccattctgtatccctacaaccattctgctttccactttcggtataacatttgataaatattgaaatatttgatatttgataaatatctcatgaaaacatgagacattcaattaaatggcctccctggtggctcagatggtaaaggactggcctccaatgaaggagatccaggttcgatccctgggttgggaagatcccctggcgaagggaatggctacctattccagaactcttgcctgagaaatcccatggacagaggagcctggtgggctacagtccatggggtcgcaaagagtcagactactgacacgcacacacatgcacgtgtgtgcacgcacgcacacacacacacagacatacacacagagattctagggcgcgagggcttcagtagttgtagcacacaggctccgtagttgtggtgcatgggcttagttgccccacagcatgtggaatcttcctggaccagggattgaacttgtatcccctgcattgcaaggcagattctaaaccactggaccaccagggtagttcctgaaaatttttagagaagattgtttctgtttcaaatggtgtccaggttgagatgagtagtgggtcaggctctgtcctcaacgatcactttcttccttctttatttaaagagtcttcagtgccctggcatggcattgcagtgactcttgggatcctctgtttacttctcttgatgacaatcaccgtgctgggtataaagagtaagtaactgaaatacatccaagtctgagtactagaaataaccactcattgtgtaggtaccaaccacgctctatcaattgttccatggtataatcagagaatgttccagggagttttttcttagtattttttccccagatataatcatggt

SEQ ID NO: 46197 - DNA, 1657 bp, Bovine  19866880180813
  misc_feature (1)..(1): n is a, c, g, or t
naacttgactcttcggaagagaaaaaccccaagcagtctaaaaagtacgactgctgtaaacccagaaaattccttttaatctcatttcatgggcaacactgataccctgtaaggcatgaaatttttatttcatgtcaatttcactgggatttcacatgcagattaatttgttcatccacataaacatatactgctctgactccttgcctccacagccactctcacttagtgttatagaaatcccgcatctcatgaaagacacttaagataacagtgagatctgcaattccctgaccctgccatattttgaattgctgagcacataattaaattctagtgtcctaggaggagaaggcaatggcaccccactccagtactcttgcctggaaaatcccatggacagaggagcctggtaggctgcagtccatggggttgctgagggtcggacacgactgagcgacttcactttcacttttcactctcatgcattggagaaggaaatggcaacccactccagtgttcttgcctggagaatcccagggacgggggagcctggtgggctgccgtctaagggatcgcacagagtcggacacgactgaagcgacttagcagcagcagcggcagcagtgtcctgggaaggaggtaaatgggcatttgtggacggaacctcgtgtcttgcttctaagggacagactacaattaaagtgatgggatgtcacttttgtgatcaggtcacaaaagacggtgacttcctcttttgggctagtatgctttgctgaagcacgctgccatgatggggagcctcacatggcaaggaactgagagtgggcttctggtccatagcctgtgatggaacgaattctgccaacaaccatgtcagtgaacttggaagagggcccccaacccgaaatgtgccccaagatgtgctttgagatacctgcagccccagataacaccttgaacactgcctgtgagagacccacctaggccatgcctgaattcctgagccacagaaactctgaaatgataagcattgtttttttttttttttggctgcaccttattatttttttggcagcaagtgggatcttatttccctgaccagggatcgaacccacggaccctgcagtggaagtgcagagtcttaaccactggaccaccagggaaatcccaataaacattattttaaggcactaaattttgtggtaatttgttatgtagcaacagacaatgaatatgggtacccttagctcctgaaaaaccaacttcaccagggtttctcactccctgcggagtcaaaggtaaatctcctggggtacttagtggaagagctatgcaaaggcatcacaattctcccagcatggaactccagaacctccactggatcctctgttcatgctctgctggcatcaagatgttgtcaggtatggattcctagggccccagtatacagagggaagttcttaaggggtacctgtgggggctgttccaatattcacagttcagctcttttgctgttgtttggtcgctcagtcatgtctgactctttgcgaccccatgcactgaagcacaccaggcttccctgtcctttaccatctcctggagcttgctcaaactgatgtccattgagtcagtgatgccatccaaccatctcatc

SEQ ID NO: 46198 - DNA, 1738 bp, Bovine  19866880445726
  misc_feature (1)..(1): n is a, c, g, or t
ncaagctagtgatataagactagaaaacaaactacatctacttgcagatacatgataagtgaaagtgaagtcgctcagtcctgtccgactctttgcgaccccatggactgtagcctatcaggctcctccgtccatgggattctccaggcaggagtactggagtgggttgccatttccttctccaggggatcttcccaaccctgggatcgaacccgggtctcccgcattccaggcagacgctttaacctctgagccaccagggaagcctgatgacatgataggatacctggaaaaccctagaaaaccaatgctaaaactaactcgaccaaggttcagaaaggtagcagaatatcaatataacacaccgaaatcagcttggcatcaaaacggtggcctctaggacagctcacatcaatgagaactccctagtacctctgccaccagtgcccttatcctcacagagagccacagccaccccccaccccccaggagatcctccaagaccagtagggcatttgcttactcactgctcactacagggaggccttttccagatgtattccttttcagaggctttgtcttctgcatgggaaatggactcctccaaggctactatctcgtttactgtgctgaataccctgctgagtggtacacagacatacagtttagccctggtgtcttcttatctattttgataatgggaatcaacattcatagtgactataatgcccccagctcaggaagcctggagaaatcatctacaagattccacaaagtggcttgttcatgtacatttctggaatcaatttcctttctgagatcattgaatggatcagctatgccctggccacctggtctcttctcagcacttatatttgcattttttctcactttctttccttgggctatgaacctttcaccaccataggttctacctcaagattttgaggactaccccaagtttcggaaagcctccattcatcttttaaggaaaccaaacaaaaaggtaacacagctcccatgaccctgtggaaaaccataaagctgctgagcctgtaacttttacagtcccactgcgtttatgtgagagctggcctctggagttctggcagctaacctaagaattctgcaggggcccccttcatgtttcctcctaccctcccagggggcctctgtcctgatctgttgaagcttcacaaagccctttttcacacagagacatctgcttcttagcctttcctcctgaaaagtaaaaagttccttatgtatttttcctttggatgacaccagtacaggtgcttttatacctgctctgtatcagtataagacagctctgtaatcgagacagttttgagttgagggcagtgtttaaagaatttattataggtacacatttgattaaacaaatcagcagagatttaaattctgaagctgcacagacccagagcaaacctcctcccaaatgaaaacccacccacactttacttttccatggttaatagtgaaagatgggaaataattaagtggacttttaataaaggagtcctctcttcatactgctgaacaaatgcaacacgcatagacctcatttaaaattctgcttggtcttagtgcctctgtcttcctgaagattccacaatccctgacagaaatactgaaggctaatccagaaagctgatatgggttttaccaaaggccagggttttaatgatcacaaagaagaaatgactctggttga

SEQ ID NO: 46199 - DNA, 1176 bp, Bovine  19866880460151
  misc_feature (1)..(1): n is a, c, g, or t
nctctgtgggctcggcggcccccccttaccctcaggtccgtgctccactgcattcagctcagggatccaggctgggcagatgatcctaggaaatagctgattcttaaacttcatctcaatgcctcgagagaaatgaaaagccccaagttgcagggctcccacctctgcagacagcacggatttcacatgctctgtgggtgtctcgggatttggaggtgcaatggacaagacatgggataaagtgcagtttccacaagatcagccaggaagctatgtctttttctctctcatcagaactcaaataagatgaacttgacttcatgtgtgtctatgtgcatgtgtgtttattcacaatattagaaaaagggcatgaaaataagtcagaaacccttctaaacactttacataactcatttaatcctcataataaccctatgaaatactgtgattttctctgttcataggtaagaagggtttcctggtggctcaacggtaaagaatctgcatgcaattcagaagacatgggtttgatccctgggtcgggaacatcccctggagaaggaaatgtcaacccactctagtattcttgtctggaaaaccccatggacagaggagcctggtgggctactgtccgtggggtcgccaagagtcagacacgactgagccactaaacaacaatagataggaaactggagcacaaggaggttaagtttctttcctaaattatacagctaagaatgggcacatttcagtaccagggcaattattagagttgggatataatagtaatatactgtgaaggtctaactttcagacaaaaaggaaaaatgactgagagaaaaattcaaatcaactcctagttcccaatatctgtctgagttcttacggtgcatggcttgatgagaccgaatgtttgtgtttgatttctgtccttccagtgaaccaagaaacctctctgaacagacctgcctctattcctcagacccagtcagcacagcacccctcccagccccacccacagggttgcaaatagaaaaggttaaaaaggaaatatctgtgcattgtccgcattgtgctgcgaagggtctctgaagggtggagcaggctttgagaagcctggtctgtttgaatatcagctcatagaataaagaagggagagggcaataagtggttcat

SEQ ID NO: 46200 - DNA, 1533 bp, Bovine  19866880526455
  misc_feature (1)..(1): n is a, c, g, or t
ntaggtctgttgcccatcctgtaaggacaggggcagcagtcagtagaagactgatgagtatggactgtgctgggcctggtcaggggaggccacagttctgccagagggttctagctagtacaacaacaaaatccaaactgaagccctgtcctgctgtgttgactgcttcagagggaaggctggagggcgtcatttttataaggctaattggggtttgtgaaaggcagctcagcagaccccacatcactgcatggaaaaccagccacctcctgtgacatatcaacactgtctgccatttcaaactatgatacttgaacagagtgtatcagtttaattatagcttaagagctaccagcttcaactagttaagagagcagcctggtcacttaaagagaaagccgtttttacaagatgtattagtctcccttgactgcccaaagaggaactaactgagtggcttaaagaacagaatgtattctctcgcagttctggaggcagaagtcggaaatcaaggtgtgggaggactacactctctctgaagtctcaagggaagaatccttccttgtctcttcctagcttctggcagtggccggcattccttggtgttcgtggcttgtagctgcatccccatcatccctgcctctgtcttcacaaggcttccccccaccccacaccgtgtgtctgtctctgtgtgtcttctccccttctcgtgagaacaccagtcatattggattaagggcccaccctgctccagtacgaccttatcttaacaaattgtatctgcaatgaccctattttcaaaataaggtcaccttctcaggtactggaagttagaacttcagcctatgttttaggggacacacaattcaatagacaatacaaagtaacatttcttttttcttttggcattcccccaggccttgtgaagggatattttacctggaaacctgaccagttctctacagttaaccttgaccatgctctttgtgacctctggttcctgtatgcctcagttgaatccatcgagtacttctttctggctattatatattctttactgggtaaaatatacataacaaaatttcccattttaaccatattaaatatataactcagtggcatcaggtacgctcatcatgtggtacagccactactgctggtctctggctattgttttttatttcccaacatgagaagcttcaacatttgcaagagataggatgctggagggaggaagaaaatagacagatggccacctggaagagtcaggccccgaataattgcaggctgatttgtaacagggacttcaaacagatcaaacctcaaccagtgaccgctgcttgattgtatttataatcattcctctcttgtcttttagattctacctcaagatgtttgatgactaccccaagtctcgaagagccctcattccattcatcttttaaagaaaccaaagaacaagggaacaaagctcccacgatcctgtgaaaatcatcaagctgctgaacctgtacttttaaagtcctactgtgt

SEQ ID NO: 46201 - DNA, 1377 bp, Bovine  19866880577591
  misc_feature (1)..(1): n is a, c, g, or t
ntatgcaatttctgagtttgtttgggtttgaagtcttggcttcatataaaagagaagcaatcaaatacccttcaattgtttggtttacttttttcattttgaggttcgttctcttgcctggagaaattatgttcttctcattcaaaatctacatataaaatacttttagatgggctttaagctttcctgatgatttatgccaggcttcacacaaaggcatccacatcgaagttctcctatgtgatgagctcccttctatccgatttttgtaggttaatcaatttaaatatgcgctcatcagagatctccctggtaagctactcaatacttaattatgtatttgctgagttgaagaaatgagtgctattcttccacaaggactttctaagccaagaaaggaatactcaactattcttcacaaactagcagaaatcgttattttctctaccatgtatctctacacacccaactaagcaaaaaaaaaaaaaaaaaaaagagctattttcccaagctgcataaattcctctacctctatcagaccacacgacccaccctggtgtaggacacggctgctggggagaccagtgggcattcacatggcccatcaggagaaagagaagcagacccagagttcagaaaagtcgtgtcccctgagtccaacaggaatgactgaaatactcacctgaccagggcatgtggttcaggatattctgcagttggattgcgtttatttctggatactgaagtggaagcagagggtcaggagaaaatcatcattcctgaagtctcattggatgtagaacccacagataaacagggctgggaaaggcctctcccacatctgcttagcacagcatatatgccatttctgggcagaataagttacaccattttcttatacataaggacgtgactagacatatgattaaatccaaaatttcataagaacttcaacaacagtttaatttgggtgtcaaattcagagtgccccagcggggcaggactcttaagaagtagactaatagaggtgtttctcaaactgggttctatagagatgctgcaaaagtttagcaattgagttttaatgttattcttatttaactatccttagccaagagtccagatttccattctagacttcatcagaagccactctttacatgggcatttgactttaaaacatgttaatgaaatgtaagtaccataaatttgaacttataaaatggatatgatacctttatatttatctgttctatatatctttatatatctggattctctatgtgattccatttgataaaaggactgcagcagaaaatgtttggaaacccctggcatggaggaaaattcttaaaaacaacacacagaagattttga

SEQ ID NO: 46202 - DNA, 1635 bp, Bovine  19866880589124
  misc_feature (1)..(1): n is a, c, g, or t
ngcttcattgcagatttggttctctgggtttgtgtctgctttggtgggtatggtctgcaatccaggaaggatcagggattgcctgacccaggaagttatattgaaatggcagtgcaggggaaagaaagggtgttgatagttttgctcactgtttctccctattagaagtgactctgcagggtctgtacttctgggccagtgaattctcacagagtctcagtgctagggaggcagtgttatctgctggtgaatgactttaccaagtgatagcgcgtgaagtcctccagtggccctttcgtggtgatcttcggatttacctgactcagttttccaatttgcaagtcgattttcttctttcctgattctcccttttcctgctactccttttcttcccaactatttcccctgtcctggagctgcctgtaggaactatgcctccttgtctctgttgggaaaatcatctgtaaatcttcatcttgcattttcaccaaaaggaccgatggcattctgtgggcgagctaaaacatggtggtctgccttgatttttagctgttatactgaacttaaaaaaattttcttttgtgaaaggcgagattttacctgtggaacctctactttataacatacacgttttatcattaggtagaacatttaagctctctccatcttggttccttcatcaatggaggtggtaatataaacactgtagtgtcactgggaggattacatgaattactatgtgacatgctcgtcactcctggcgtacagtcatttgtaaagtacttattgtctcctctgccccctcactccattctcgtgcttgagatgcatacatgctctctggtggatttgctctacagaaggattctggggttctagttcagagagtcgatttggtttgtcccaggagaaacctaggaatctgggtctggattcccaaagctgcccaggtgacaccgactcagatgttcttcagactgtacttttagaggctgttccgtgggctgtaaagacggcgacctgcaccttgagcatcctcggggcagtgctgtatgctgtcggtttgtggtgaatcacagtgtctgtcacagaagagacacccgatgcacactggtcaaagttaaatgagtacctccatgcactttccatgttacctgatttattttgtcaagttttactcctcactgggcaatcagaaggctatgcataaagtacactagtgtgacaactcatcctcaagcctgaaacgtatcctaggcaacatttgagtccccattcccctccattcctgcaggtctacatctatccacctttccataagccccagttccaagccatgttctctatgactccctctctggttagaattaacattgcccttctctccaaccagcttctgcatatcatgtaagataatttaactcacacaggttatgtatattcattgtctctctcagcaaacctcacgctctcagtggtttccaaacccacccccttttcccatctggaccacagttggctcagtcccagctccatcatcttgcttgtgtttatgacattagctttcttctttgactgagtcgggtgactgtgagttctatatcttttcaataaactctcctttaagtaggctag

SEQ ID NO: 46203 - DNA, 2480 bp, Bovine  19866880646716
  misc_feature (1)..(1): n is a, c, g, or t
ntgcccccaggagccagggcatctcggcatttccccagaaggagcaattctagttccctggtcttctcgccacatcctcaagcagttgctggcctcctgaggctccactggagacagataagttttggcttggaggttcccaacaggcctgggacacgcgtactctccagtcttaggaatatcaaggccacacacaggatgctgagaccattacatggacggccaagccttcagatgggcccgaaccccaggcagccatcaggccactgtgctgtgggtcacagtgagggctggaggtgagaatgtagatcaggacagggccatctacagcaccacacaagcagcccagagctgacgcccctgtggtgttctcacacgggacacagcagtcatgtgtgtgagcacgtagcagtggccactccttgacagcagcccctacccatagcaatggctgacaaccctcctgggctgaatcctgacatccaggacctggaggctaaggaaccttctttccccttgacagaggctcaactgggaccacgtggaaccctccaacatttagcaggaagtgtaagtacatcagggcttcccaggtggtgctagtggtaaagaacccaccttaggagttcataagagacataagaaacacaggtttgatccctgggttaggaagatcccctggaggagtgcatggtaacgcactccagtattcttgcctggagaatcccatggacagaggagtctgacgggttatggtccatagtgtcgcaaagagtcggacatgactgaagcaacttagcacacacgcaggtaagtacatcatggcagatgtgaacgatgctgagccagtcctcagcacaggtctccgccagcccccacccctctagcagaaatctccacgaggacagaaacctcctaaaataagggcaaaagtgctgttggcctggcaaaaggtcctcttggtttctggccaatcttttgagcctctcctatggacagcttccctatagcacatgacagagggaagggccaagtggtaatgaatcttcccaccccacccttgccctgactcacctaatgggctcagtggggtccaggcgtcgagccttctgctctggtgtgagctgctcccactggaagtgcaggctccagtcaaaccctgaaacacagcatccacatgattgactcagtctctctgatgtacctgcaaagcttgctcattcgggctcatgaacatatccagcttcccaggtggtcctgggataagaggtctcacccaggctggttggcaacagagctgcctgatttcccttccactgcttcttctctttctccagcccctcctgcttctctgagccttctctgctgggtggacttagggaagaagagcagaggctacagagtgggagttgagagaccccaagagtggtactcaagggggacatgatggacaattccagagtgaggcccttggtcatgagtcttgggagttgggggtgtaagcaggtctgtgaggggttgaatcacccccagtcagtctttgggagccagtgctcagccctgggcacaactgtggtgggcctcaaggagagagaggcacccagtgctgacgtgtcagaacaatgcaggcctcacagggcggggcggaggggggccctgcttccctcccatcttcaggccctggggtgacctgccccctctctgatccttccatgcacagtcccccgtggtcagggccaccctgaagctactgacattacaggatgcagggctggaggctccagaaaaaccactaggagacctttcttctctctcccttggcagcaatgactaggaggaaaaagtccctctgggcgagggcattggctggccccactcaccccctctgagctctgaggctgactcaatgtagttgaaggtgtccaggtgaatgatgtcaatcacggggcacaccacccgtgtgtagtcctggaaaacagaaggccctcactcagatggtggcatcagggaggcaggcctgggatgggggggtggggtgggggaagggcccgcagaacggtttcagggccttgaccaagcacttccccctctgcatttcaacatttctcatgtatatagtgggccatcagacactgtgacctctccacaatgcctacaatgctaagagcctttcctttactcctgggtgccttctcatggccatctaggcatggtggggacacggggaggctggctggagtgtgctgctcactgaggaaacggacatcaggaagaagggggcccttcagtgtcacggggctctcaggaggcagtggacacagtcagctgggaaggtgacctcaacagctcccctcacagtgggaatttcccagtacttaactttctatgcctatggttcatgggcaagttgagaatagcatcgccagagattcttaacttcattcgtcacctgtgatactcgagtccgtaacttcagcccc

SEQ ID NO: 46204 - DNA, 3013 bp, Bovine  19866880882079
  misc_feature (1)..(1): n is a, c, g, or t
nctcggtttcctccgtgtccccaataagtatgaaaaacagttaataaaattcattaaactgattgacacagttgttggtctaagaaggaagacagataattacttgtcgtcaatgaaacacatctcagtttactttccagttgggagggcctggaacactgtggtccttgccgtcggctctcacactttagcgtgcgtcgggtcactgggggctcagggtaaaaaggtagctccatgggactcacccttagaaattttgattcagtaggtgtggggtagggtccttaaacctgcatttaaaaaaaatatatttatttatatttggcttccctgggtcttcgtttctgcgtgggctttctctctttgcagagaatgggggctgctctctacctgcagtgcccgggctctagaggacaggctcagtgactatgttgcctgggcttagttgccccacagcatatgtgatcttcccagatcagggatggaacccatgtcccctgcattggtgggtggattcttaaccactggaccacgagggaagcccaggcctgcatttttaacaagtctccctgctgactctggtatgcgcagtctctgatctatgctttgggggatgaaacggcctttgctagaaaatagtttccatcctgttggtcatgatacctctgtttcagcaacttgtaagtataattatgggaactgtaaatattggtgacagagttgcagatagattattccctgaggtttattgctatgaggaaaggatcagatttttttttttttgtctgtaaaatataatgcttcatacaacttttagtggtccattatattcgcatggtgtcatcagagaaaatcacacagtgacatttaaaagacatgtgcccacaaggaggaatcatttattagactgcttgttctcggcccctgtttagttttgagctcctgccttgctctggggtccctggggtctccagccctgcagctgtggaggttggccctgattccctgtctgtgctctgctcttgtctactcaggcggtcggggagccgcccctcttcctgggcgcctccgtcttctttgccatcaaggatgccatccgcgcggctcgagctcagcacacaaataataacacgaaggagctcttccggctagatagccctgccaccccggaagaagatccgcaatgcctgcgtggacaagttcaccacttctggtacgagggccccgcagtccagggaggtggggccacaggctggggaaagttctgctgcagagggagggctgagatgttaggctgtctctcagccttcctgtatttttggctgggaagccatgggtccacaccgccttctgccatgaggcaccgcctccaacatgcaggaagataacaagaatccccttaaagctgcagcttgggctgggtctcctgagaggaaggagggctgtgtgatgcccttatcacccactgattccattatttgcataaagatgagggtaatggataaaactccagaagagcctgatctttagtgtccagcagtggcatttttgagacccttctttgttaaagacactgtgtgcggtactaaggagacagggaaaaaaatgaatctgtgagacagagcacatttgtcctgtggtcaccctgtgccatgctgattccggggatgtgtaggtgccctggaaggcatcgcaaccttttcagacaccagttgattgccctgtgtggtgactggttactgccttggaggtgtgtgtagcagagaactccatggtctctggaatcatttggggaagtccctgtgtgatacttgtggggaacaatgcctggtgaaaggagacaatgccaggacagattcgtccactgtcggagcctcagaagcagcccagtctctgagttgggccgagtgggccttgcactcactctccaaaggctgttgcagcctcttttgagttagcagaaccagattcttcctgatacccaagtcatatctcctcctgggtatttgataggaaatttgatagacattttgggtttcagagggggaaggtacaggagaggccctggagacaggcagatctgcagtcagcacagagggtgagggaggcagatgggtctccagtcaggcggcccttcaagttttgcaatagctttagcctcagggtgaaacacacacagaccatgtgcagggctcccaggcagcaaggatgcctacaaatgtacagcaacctcgctgtagcccagaaccttcccaccatggcctcagggctgacagtaatccaaacccaccttctctgagagcagagctgctgcctggctcccagtaagctcacagagattgtaaaattagctccgtgcaaaccgtctgatgcagaagtcagtgatctaatgcagaagtcagtcatctgatgagcccctccctctgaggccccggactcaagcagagattctaacccaagtgccttggctatgctgcaacacagaagtgatttaaaaatccctgctatggattttcatgagcagctgatccatgagccagctgggcttttgaaaagctgtgagcgccatgtgagaaaggaccacttctgtatctggtcatcccagtatctccagagtctgccgcagtgcttgacacatggggcatgcacagtgaaaattaacgaatggccaggatgggatggggtcctgccccggaggcatccccccagctgggactgcagagtggtgtttggtctgggggtggtggttggcggtgcggggatgtggcgcagcgtcctgagctggaggaagaccctttcaaccagttctctgtcgttcttcctagtgtgtcactggtgcaccaggaaactgtaaaccctggtctctgagggtctgaagaagaagccccataggagtcttcttatgctaccctggggattccgtggaagatggaacttgccctgcagaacatgaatctctgaaagtttcaggatgacagaggtgttattcttcaggatgatggttggaagaaca

SEQ ID NO: 46205 - DNA, 1505 bp, Bovine  19866880939348
  misc_feature (1)..(1): n is a, c, g, or t
ntcaagcatcttgcctcattatcgttgctgaaacttacatagcactgcacagaaatggaataaacaaggggtgagttgtcataaactaataatgactcctggctttgtgtttttctgagagtcttcccacacaagatcttattggatccctacatgtattagttttctattgctgctgtaacaaattactacacatagagaggcttaaaataacctttttttctcttaaagctctgaaagtcagaaattcaaaatgagtcttgcagggctgcatcaaagtgtcagaggggttagggagggttttccttatgaaggctctgggataatctgtttcttccctcttccaacttgtagtccttggtctgtggccctttcttgcaccttcaaggccagtcacacaacatctcctggtctctctctgcttctgtgaccacatcaccttctgtccctctgattctctgcctcttccttacaaagacccctgcaattacaccagacccatctgcataatccaaggtaatctccccatctcaaggtttaattacattcaaattacaaaatttaattacatctgcaaagttccttttgccatatatggtcacacaggtacaggttccaagggtgtgaaaatcttgggggagaggggggcgttgctcaggtaaccacactctaaaaatcctatgaagcaggcacacctgaatcccatttttcagaggagcaaactgagatccagaaggcttcttgactcgcctttgttgggtaagttcattcatgtgtcccaacatttactgagtgtcttctgtgtggcagacagttatatacacagcagaggaaaatctaccttgaggagcttacagctggtaggaacaataaacagttatttaaagactcacatagatacaaatgggcttcctaggtggcaccagtggtaaagaagctgccagtgcaggaggtgccgaagacatgggtttgatccctgggtcaggaagattctctggaagagggcatagcaacccaccccagtattcttgcctggagactcccatggacagaggagcctggtgggctatagtccatagggttgcaaagagtcagacacaactgaagcaacttagcacacacacaggctcatagatacagatatattgtgttgtaaaggaatgggaaggtaggaaagaaaagcagcagaggaatcatcatttagatttgtggggagtaaggccaggggaagcctccctgagaaaacagtgtttatgcgaagacctgaagatgtacgggaggagatagccaaaaagaggggggaacagcatttaattttgagggaacagagaatgaaaattccctggtgttgggaggaatctgtaacagcaggacagacctgcatagtgagaaaacgtcacctctgcctggaagcatttcctgctcctggactatggatcctccctggatttacatgaccccttgcactgtccccttaccagaacaccatgctgacttctctttaa

SEQ ID NO: 46206 - DNA, 1382 bp, Bovine  19866880943103
  misc_feature (1)..(1): n is a, c, g, or t
ncatcctctgttgtccccttctcctcctgcccctaatccctcccagcatcagagtctttcccaatgagtcaactcttcgcatgaggtggccaaagtactggagtttcagcttcagcatcattccttccaaagaacagccagggctgatctcctctagaatggactggtggatctccttgcagtccaagggactctcaagagtcttctccaataccacagttcaaaagcatcaaatcttcggtgctcagccttcttcaaagtccaacgctcgcatccatacatgactactggaaaaaccatagccttgactagacagacctttgttggcaaagtaatgtctctgcttttgaatatgctctctaggttggtcataacttttcttccaaggagtaagcgtcttttaatttcatggctgcaatcaccatctgcagtgattttggagccccaaaaataaagtctgacactgtttccactgttcccccatctatttcccatgaagtgatgggaccggatgccatgatcttcattttctgaatgttgagctttaagccaactttttcactctcctctttcactttcatcaacaggctttttagcctcttcactttctgcactgtaggggcccacaaattatttttcgagatttgcagtaaattcagttgggcatgagccagctgcatggcccttcctgcaagagtgggatgtcagggtagccctgaggtcatgttccaagcacagatgacagctgtcaggctatggcatggcacagcccaggctggggtttcaactcccccgctcagtgtccccatgtagcagcagtatcacaggacattaataaaatcaattattggataaaaatcactggtttccaatgcttcattttgtgctattagcaggagaatgctgtttcaaaagaagataacagagagagtgtgaaagggagagatcaattacctgataagctggaggggtgcctgagatgaatgtgcatgtgggcacgagtggccccccccttacctgccaagtgtgggctgagtgcctgcactgatgtctgcggtgcctgccctgggctctcctgttaggtgcctggaggacagaagggcatcctggtagtgatgggatgggtggtacccaggcagcttcagatacttgcacagggccaagggtcagtaacacatgaatgaacatctcatccttggtgactatgccagccccggggctccagccctcatggtccaggtcagggcctggtcaatagttttttccagatgcagtgttcttttggctttcttgaacctaaaaggtctgagctttgctgatacagactgcctctcccctagtgggggcagtactagcatccactgggcagtgactatcaaggg

SEQ ID NO: 46207 - DNA, 1546 bp, Bovine  19866880991893
  misc_feature (1)..(1): n is a, c, g, or t
ncgacgtatcgaacatgcggtagaaaaggttcgttgtatttcccaaaactggacaatcactgagtatatagaaacttagtcataaaactgtttcttaagtcattgaacagcggtgtggggagcccctcctatgggcaggcactgagcttggcatagcagacacagagatgctcagcgtctggtctccctctgaacacacttgtttagccgtgatggtgccacataccatgattctgagcagtgaggctgggagagcagacacgtgggccagcagagcgtggcgtgtgcccttcaagagatctgtgagctgcagcaggggccgtcttctcccagagggcaggcaggactgggagttcaaaaagcctggaatctactaaccacgaaagtcctgtcttgtgctgcgtgcttagtcgctcatttgtgtccccctctgtgcagccctgtggactgtagcccgccaggctcctctgtccatggggattctctagacaagaacactggaatgagttgccatggcctcccccaggggatcttcgcaacccagagatcgagcctgtcttgtgggactgccccaaagtgcatggtccctctcagtacacggggggtagtggtcccctgagggacaccctcagccaccatcaccccacgagctcacttctcagctcgggggtgccgtttctcctgtggcatcatggaaggaacatctgcatcggccctgaagtaggtttcataggaaattacgcctaccactgcctgtcccgctcctggaaccgctgacaagttctgaaaccgatttcagtgtccctgcctttgctctgcctacaccaatgctggcaaaggcccagatcggttatcccaggctggggcaggagccggagaaggaagcagtagggggctgtttccagcttctctccggttcgcctgggcaggtggggcttggtgcctgctgtggaaagcagcacctgtctttggatgaggggtgggaggcagggtagccatggtttctgtctgtcctgcaggtggaaggggcgtttgtccagggcctgggcctcttcaccctggaggagctacactattcccctgaggggagcctgcacacccgcggccccagcacctacaagatccccgcgtttggcagcatccccacagagttcagggtgtccctgcttcgcgactgccccaacaagaaggccatctatgcctccaaggtactattgccctcggtctgtgctgccttccggtctgcattgtgggaaaccacccgccatgggggtctgcagggagctcgcatggaagagagagagaagggcctggggcagatgatgggcgggcagggctggaggtggggtgaggggggcggtgagcagacctgcctggaagcacagggcactgggttgaggatgacaccacctccctgtcatttaagccagctttcggggtgtactcagagggattccttaggtcagtcttataggtcaagtcctgacctacacccacgtctcaggtgtgcatccttgaggctggtcccagagatgctgtcgcaggt

SEQ ID NO: 46208 - DNA, 808 bp, Bovine  19866881012617
  misc_feature (1)..(1): n is a, c, g, or t
ncgggttcttgtttgttatgaaatcagacagtgatagctagcagagccggtaaactgccttgcatgtagttgacactcaagaaatgttagctcccttctctgcacaccatctgtattctatggggttcttgcctgccccgggggctcagctctgctcgtttagtttgaacatcaggactctgggtgagggagttgggggagtccggggcatacactgaggcaagagcagcagctggtgggcgaagggaaggggagtggggaggacgctgtcctgccagggcacagcccagtctcaccccacagtgggtctggcagccaatcagggttctgctgtacatggctcgggttaggacatcccagaggctgtcaggggcttctgacagcttgatggtcattgtcacccctccagtgaagtccacaagggcttcagacacctgtccacgctgcaagtcttcataggagccagagagcctgcccaggaaaggaacagatgtgagagaaggaagagtgtttctactgtacacaggacagtccaaacaagtctaaagaaccccctgcttggttattcccagggcatgtgtctgctatcccttcctcccatcccaggggcaaaaaagaaatatatactcagtttctattcctactgcacaagtccatccatcagggaaaggtaagactccagaaaggttgttccagtggggtgacccttacataagagaccctggatgtgtcacttctgtatttgctgagctaggcctcagtatctcacttgataaacttcccctgcctcctcttgccctccctcaag

SEQ ID NO: 46209 - DNA, 1050 bp, Bovine  19866881070513
  misc_feature (1)..(1): n is a, c, g, or t
nacttaccaactccctctgtgtgtaaattccccagtaaacctcctacactagatgatagcaaaaactctccttctcctagagaatctagggaattgctgaggtagcgagtctgttatgtacctgactttgtgatgtggtgcccaggtctcccgtttgctgggagaccttgtggaagggtgcccaggaaaagacagagggatttagggtgtgccgtggagcagagaccatcccccactctccccttgaccccacccctgcctccatctcagcatggaagccaaagagacaggttagactgggggttgggggtgggaaggaagagtagcaaggagaataatgggaatgagaagatctctaggaaaaatgagaacaccccagaaaacagatgcttccatttgtcacaggtactccaagaaaaagccttctagggacaagtgctacttctcactatctaccccgggttctctagcactctgacttaacacaagcagcaagaaggaatgagaaatacagtggggagaatcctgaaatagccctgatttcacacatgttctgtatctgtgtgcccagaagtctagttcggggacatgggaaactatggtcactgtagctccaggggcttctttgttctccatcagaaggatatttctgtctgttcctgcaggagctgcacagcaacccccttttctactctgccaaggccaaacggctggatctgtgccagggattggtaggtaagtctgcacagccccgagacacacctggtacctgccagcccagcccagccaaggcagagtggggtggggaggagggggtttgagagatcccaagagaggaaatggccaccctgagctccatcttgacatgctgtcattttctgggagaatgatcacaaccagtcggttctctgaggatgcatgggaacaccacaccttgcctaacgatcctcctccctaaccagtctccaggtctgggtttcatcttgggaaaatggactcactctaccatagttcctgtaatgagtccttctggcacaccagtcactagat

SEQ ID NO: 46210 - DNA, 943 bp, Bovine  19866881126923
  misc_feature (1)..(1): n is a, c, g, or t
ncctggtgctgggggaaagagaaccccacccctctagaaagctgcacccgcaaccagatgggcagcttgacagagttctatgcctctgtgcaaattaggacaaaggtgtcccatcttcccactgggcacagcccagggccagcacacacagctcggccagcaaagccccctacctcctcagctaggtgccccggggaacggctctgcccacagccccgtctttgcctggagaagctgccactttagctgcgaaagcctctggcttccatatacacactcaccttggggcgacttcatctggccaccagcagtcctcccattctcccatctcccctccagcatggtgtacgaccacttctggcccacctcctgagtcagcaggcctgggctcagtttacagatgaccagaagcatgaaatgtgctttaaagtcctgcagtgacatcctgtgcagacaataaaagaaagaaaagaaagtgtagtcgctcagttgcatccgactctttacgaccctatggactgtagcccaccagtctcctctgtccatgggattctctaggcaacaatactggagtgggttgccatttccttctccaggggatcttcccgacccagggatcaaacctgggtctcccgtatcacaggcagatgcgttaccctttgagccaccagggaagcccatggagatgacattcagtcattaggaccagagggaagctgcaactaaggatcaggcacctagccctctccagacccagggccccatcctccatgccctcatgcagacccaggtgagtggggctggctggagcagcgtgagggtccatcaccagcaagtggtgctacggagaaaccctactctgtggctgaaagcagcctccaacaacggctgcctgagggcaatgatcctgtgccactgatggtggtataaagcagaattgggg

SEQ ID NO: 46211 - DNA, 1189 bp, Bovine  19866881238560
  misc_feature (1)..(1): n is a, c, g, or t
nctccccaagcgtccttttctactggaagaagtctgttcttcagacagaaatgacctctctttcctcaacactttatgcaaattattctcatagcaagtatcctcctagtgcgtccttacactacttctaatcttcctccccaacctgtttgcttgctgcctgctgggagctgtcttcatcctcacctttctctttcatgtcttatgtgaagtgagtgcttaataaagatgtgctatagggctgtacagctgtccttttcctttttcttattcatgttttgctgttgacatatgctgcccccattaaattataagttttgtaaagtctgtaactgcctttgtttttttacatccatccttactgtacaatccccattgcatgcatgctcagttactaagttgtgtccagttctttgtgaccccatggactatagcccacccccccgactgcccgtttgtctgttcattggatttcccaggcaagaataccagagtgggtagccattcccttctccggaggatcttcgtgacctagggatcaaacctgtgtctcttgcattgacaggcaggttctttaccactgagccaccagggaagcctacagtcctcatctctctccctctctctctttagtcgctaagtcatgtccaatgcttgcgaccccatggactgtagcctgccaggctcctctgtccatgggattctccaggctagaatactggagtgcattgccatttccttctccaggggaaggaaattcccaacccaggaatcgaacccaggtctcctgcattgcaggcagattctttaccaactgagctatgagggacagtctccatagatggtgtttattatgctaagtgctgaattttccattagcccttgtgtttcaaggttgtacagccctaatggtagaaatacagcaaattggcaattcatcccaggcactctggcctttggtttgtttattcattcattcatttatttatatcccacgtggaaggtacaaatttcaggccacaacagtagggtgcaagaaatgtcacatttctttatttctctaaatcaaatttaatcagtgccaagcttccacctgctgagctggcaggaaattcaatctgtcttttgagaggccccgctcccatcctccctttgaggattgtataaaagcctcagggttttcactagt

SEQ ID NO: 46212 - DNA, 1057 bp, Bovine  19866881290711
  misc_feature (1)..(1): n is a, c, g, or t
ntaaggtgggagacctgggttcaatcctctgggaagatctcctggaggagggcatggcaacccactccagtattcttgcctggagaatccccatcgacagaggagcctggcgggctacagtccgtggggtcacaaagagttggacatgactgagcaatgaagcactcatggagatacttcgaagggtttcaaagaacggaatgacatgatctgacttgttttttaaagagaactgactgttgtattgaaaacagacattaggagggcaaggatgcaagctgtctgctgacccaccggggaagcccgagatcttttaggagactattgaatgatccagccccaagatgctggtggcttggatcaagatggtagccacagtagaggtggagagaagagtcagatactgggtgtgtttcagagggagggccaggagggcttcgtgatggactggatactgtggaacccaaggttttccccttagcagatggagggatgaaattgccatctaggcgatggaagggctgtgggtggagctgggtccccctcccccacccactgcactggttcccttcctgggaaggaagaggagtggagagaatgtggaagaccacccatcccggtgagatgacagtcgccccttctgttttgaaccttcaataatctttttttcttcaccaattcaaatgctgcctgttcagtaccctcttcaagattcatcccctcctttatgacatctagcttgattaattttacctggctgaaatctcccagttcactccatattcatacagagatatgttttacttaacaggggagtttttaaaaagagaggtgtaagtcacctttaaaaaaaaacattaaagcctggcttatgttcaccaggggaatgacttagagtgctctattattaatgcttttgtaaggtgaagaatccttttgttggatgactatggatctccagtaattttcagttttgaaagatcaggttgaagacatataatactgattgcacacttagatgatatgtctccgtacatgaggcacctgctaggcatct

SEQ ID NO: 46213 - DNA, 1135 bp, Bovine  19866881327414
  misc_feature (1)..(1): n is a, c, g, or t
ntgttttcactgcacgcacttgatcttggcgtgggcccgggtgctggtgaccagccggaggaacagctcattctcgtagcgagggatgtcgtcacagtatacggcctccccagaggcttgcatggccgcggccaggtggggcaggggccggcccactgtgtcctccttggactgaccattgggcacctcctggaacaacatggtcacaggtttcagaggacactgttcctctataggccctggggaaccgtggagagcttcaggccaaggcaaatgtgaggagtgagaatggaggaggcaggagagcacaggggcaaggaaacagtaggcaggtaagaagtcacttgaagagtggtcacagtatcactgtacagtcatcagcagtgtctgtgggggactgggtccaggtcaccccccggagagcaaatctacaggtgctcaagtcccttctataaagtggtgtggtccagccggccctctgtatccatggattccacatacacagatgagggctaactgtatacaggaacaaacaaaacaaggagcctaaaggtccatttgttgaaggttgggtaaataaactaggctatgctcacaggatggaaaatacacaattgctaagagatatttttgaggaattttaattagaaggaaatgctcatgttaagtgtaaaaacagggcatacactattgtatgtgtacatgtaatgattcaaattctgtgggaaaaacatggtaaaatgcaaatatgtccatatacacataggaaaaaaatggagagaagtacacaaacatatgggcttccctgatagttcaggtggtaaagaatctgcctgcagtgtaggagactcatattcgatccctgggtcaggaagatcctctagagaatggcaacccactccagtattcttgcccagagaatcccatggacagaggagcctggtgggctacagttcatggggtcacaaagcattggacacaactagcaactaactctctcactgtctcacacaaacataataataattttctcttggaggtaataagcttccctgttggctcagagggtaaagcatctgcctgcaaggtagaagacctgggttctatccctgggtcaggaacatcccctggagaa

SEQ ID NO: 46214 - DNA, 1075 bp, Bovine  19866881336300
  misc_feature (1)..(1): n is a, c, g, or t
ntgatgctggacttaggtggccccaggccctgcacttcctctgtcttctttgggtagtgatgtgcgtacatgctgacgtgcatgtacacttgcctagggaggggaaactctacccatgaaaattctacgggaggagctagaactgctatttttttttccaaacatttcctcattttatagtcttaagtgttctgagtgcatacattcataccccctagattcttagaaagagattattactttgaaaattccccagtcattattctttctagaaagccctgtcatctcctctcttgctcatttatccagcaagaaccacttcagtgtatcctcccaacacacacacacacacacacacacacacacacacacacactgtggttcttgggtatgctaggtatggaaggaccgaaatttctaaccctttcaagttgggtgacacaccccacccctcctccaggaagcctcccctgctgcagcctggtcctctctgcacatctcagcggtgctcaggcgccctagttaggtggcgtatgatcatgtacattcctgtcactattgcagacccctgtttcatctgatgtcacaagcaagtcttctagcttcttgagcacaaaaaggaagctgtaaagtcaggaagcttctgtgttagctgctgggttcacctctggcatgatccacttcagcaaactctcccttgagtatatctggttggcaggacttaaaatcacaaggatgtgacttgaaggatgtgaacctggttgccagggagtctgggaattgtagttcttctctttccaacctgtgcactctctgtctaactcaaggcagacaaacacttggtcaatcctcagtgtctatataatcacagaaagaagacaggtcctaagtatttgcctccattagtgcaaagttcttcagcttaaaaagtggcattgaaggaccgggtctggaacattacagcagatgcctcaggcactaaggactttgtgccaatcacctatgccctcagcttcaggtgaccttggttcttgagaaagcagaagctcagtctcctagaagacttacctgtaca

SEQ ID NO: 46215 - DNA, 959 bp, Bovine  19866881366591
  misc_feature (1)..(1): n is a, c, g, or t
nattcttgacagctggtaagtgaaggggacccccggacagagtctcctcagagcgtcccagcatcatggacagaacaaagggttgtcctctctactgagggtgagtgagcagagaaagaccccctctgaggaggagggtggaagacatgcccaggggaaggaccccaagcccctcttgctctacttgtcctcggaatagagtgaccacagtcctccaaggacttctgaaggggcagtgacgtcataggcctgttttggggctgatttccaagctcttcaatccataagtcccatgtctggtgtctaagggcccagagcatgtacattgtacccatgcattgggctccttggttcctgggctcatgtgaatgcccagaaagcttctgaacacgcattttcaccttaacaagccttcccagcccaggaagtagaatgctgctgctccaaacaaggacacaggagcccccagagggcccaccccagaactgcacccactcccacgcggctccccccaggctgccctcactcgactttctgaccaaaatttattcagtccagagtgggcgtgtttccaaagaggggtataaagccacaaacagaaacaaagatcatcttttaaacagaaaatttctgactaagccagccaaccccctggccaagaccagtgcttaaataacttggcaccaaaatcaaaagctcaaaagcacatctgttaagctgcttcatgtctttcctcccaccaggcttctgtgagaaatctggaaccccttccctccatccttccctggcctattttctctcgctctgttttccagctgattatctggctcaggaatacgggggtagccttcccttctgttaggttctgaggctgcctctctgttcactaatgggttttgtctccttccccttgttcctgcagcttggcacttctagttttctcttattgctctaattct

SEQ ID NO: 46216 - DNA, 980 bp, Bovine  19866881586005
  misc_feature (1)..(1): n is a, c, g, or t
nctgggtcccggggcggcgagggcgcagcggtcgagccgcccgggggttggtggtccgtggactctgcgagatagtagctggtgggggtcgagtggcagggccggccggcgcttggcgcccgagagaagtctggcggccgcgctgacctccttccttcccgcagctgccaggccggagcaggggaggccggaggcccgggggtgctccgcgcgcgcgtgtgcggcgcgggcgagcgccctgcagcgtcccgggcggctggcgcccgggcccacccagcctgtcgcaacccttgctttataattgtcttcgatctcttcatctgcattggaagttgaaatgaatgtgccctgaacatcactaaagagcctgtaaaaacagacgccttggtattggtggggagttgggaaaatgagagtctaagtggcttttccaactcctgcccaggcggttcatctgagcggagccactgggctctccctgcaggctcagtcttacctttactcagagcccccattcctctgtctcttcttccacagacctggccgtgggacacagaagggggcctcaggggggtttcctgaccagccaggcaacatttatgaaggggtccagagaggtcatccagtaactgtgaaagaccccttggagaagcttatggtcccaagcaggagactgaaaataatggggagagaggggagtaagtacagcgcaaaggaccgactaggtgccaggtacatgtgggtgcttcataaatagttgtaggagttgggtgggattctccttattccatatattaggaaactgattcagtcttgccttatgctactgatttgaactcagacctctgatattcaggatctttccactgtatcaagttgcctctgagattgccttttaactgtctttgggcacttacattctgaaatcttgccagtgcttgattgaattccccaagcatttattgatgatctgctgtgtg

SEQ ID NO: 46217 - DNA, 1131 bp, Bovine  19866880470067
  misc_feature (1)..(1): n is a, c, g, or t
ngaaacactggtctatatcatataatatcttttacattggtagattagattactgttcaaaaatattctctatattcatggaaagcgtatatttcccctatcttcaacttgaacttagctctgtcactttcttttgccattgaatattggcaggtataacacaaggaggttgaaatgttgttgtatatctggactccttctctctttactttgtatcattaggagaacggcttcttctgggtcactgttagtctttcatcttgggtaccaaaatgaacagatgtggagcagaccttaggctaaccttaagagacccagctgtacctgcttctagaaacagaatcacccagctaagcacatcctaaatcagctgacctccatgtgacttgtagacatatgagaaataaatcctttttagggtatgctactaggcttccctgatggcttagtggtaaagaatctgcctgccaatgtaggggacacaggttcaaatcctgatccaggaagataccacatgccacggggcaactaagctcatgcaccacgactactgagcccgtgctctagagcccaggagccacaaccacggaagcctgtgtgcctttagagcccacggtctgcaacaagtgaagccactgccatgagaagctctttcactgcaactagagagtagcctctgcttgccgcaaccagagaaaagctcatgcagcaaagaatacccaacacagccaaaaataaataggtaaaaaaaataaacattaaaaaaagaatatgccactaagattttgtagttactacacagcaacagttaactaatatacccaacaaagatagctttcttaaaagtaagatttgtcgccaatcaaacatacctttgaatctgggcttcccaagaggatcagtttctcttgttggacttgagctaaagtcagtgatgttatctgaggatggatgatacaatgaaaaagtagtaaaggctataaatatttataatgcctcctggtcaattgcatgcaactttgatttacatattattataatccatattattcacatttcaaggcctttaactgtgtcctgctgcagctgttctgggagtaacaaattatttaaagattacaacggaaaaaa

SEQ ID NO: 46218 - DNA, 2002 bp, Bovine  19866880565802
  misc_feature (1)..(1): n is a, c, g, or t
naattctgactgtatcacttactatctgtgtaaccttgggaaaatgactgaacctatctttgccttagtttcctcacctcttctaaggggataataataatatccaccactgttatcccccttattgtaaatgtcttaaggatattactcaatttatttacataaaatttgatagttactagctactatgatagtaagcacactaaataaatattagttttcactattatcattgttattgttttaattaataaaaagacatatgccagaatcaacaatatgaagacagacagatactctcattgggactatctgcacatgcaatcatgaaagttcgaattaaagtaataaaatccagatctgtgcttcctagattcatcttacaaaaattccaaatatctttattcataaaagttaatgtatcatttccatgttacccccaaggagagctctttcacatttaatttatctagtattttcatcctccatcaaactctggacgggctaatatgatataaatggttggcctggaatagtcccctcattccaccaatagtcttttagggaaaaaatgaagaggtatgaggggaattactggggctcaaaaacagtcagtttgattgttcttaatatgggcaaatgatgaacacccagaaccaggtaaaacaccagataattgttatctgatcactttctaaataattgtgtattggttttagtcaacaacaaaaattaagatgtatttaaagttagatgccttcagccacacagcataagaagtggtgattttaatttggtgtggttgaatttctacagctcttgagactatatctctatgcccaaatggtaaaataatcagcagattccataaaatattattgcaagaagtcatttgatttctagcagaaaaaaaattatatattcttggctttcatagtggtatttggaagcctgttttagaataaattttattagcctaaaaaaagacagtaaatgaacatcccagctgttagtccatgaagtaaagcaaagtgattgtccttcttgggggtttttcctgcttcactttatacatatacatacatacacgcacacacatatatatgtatttaattatcaaatgtcaactagtccttcccaaaattcaatttttaaactatattaactttaaaagttggacttgaggggcaagtggcagtgttcctaaagggacaagatatactaatatatcttattgactgtctttatgtgtttgatttccagaactgttgtttttccacttctggaattcatattcagaaatgtgtatcctcttatgaaaccattttttaaacacaataaaaaaaatcctgttgattctctaggtgtctcatgctgacactgtacctttgctgagaaattaacaataaagtaaactttgggctgtttatacaaaaatttggcatggtgacaatatttatgtgccaaggggtagagctgaacaacctcaagatggagatgaacaacacttggaagctggtagctcatgtttgatgcattaaaacacctttatgacctccaccccagcaaaccacaagactatggagagacaaggaatttgtgctctgtaatttcatcattacccgagaggttatgaattttatttcatcctcataaatataaaatgagatgacacaagaagtgtcgaggtatgttctaggacacagattttctccatgccgcctcatatttgggacctcctcatgctctcaacactgagcccagctatgttagaagaagctacattccaggctctttcaacatggtaaacatcaagtagtttacaaatagcaagaactacaagctccttaatttgttttctaacttatcatgtctaacaacatgaaacagcaatttatttatgcttgtctgattgcttactttttccaggaaagagatattaggaaaggttgtgagagctaataaaaccacagtattctacttgggaatatttatgaacaat

SEQ ID NO: 46219 - DNA, 1535 bp, Bovine  19866880594910
  misc_feature (1)..(1): n is a, c, g, or t
naatacttggaaaagtcaagccccaggattgccaaactttacacgtggacttaaacctttgttctaatgtcagagctatttattgaagctgtggaataaaaatgaaacatgtttcatattaaacacaatgaatcatgtacatatacctaatggtgaaaattctaaatattgtgaaatgcaaactcccattccaaatttaaaagagatatattaaaaactactttgtttgatatgtgtgttttaatgtatgattgtttcatacagcagttctatagaaaacccagtattgagtagtcctagtaataggacaagaaatatattttttcattctcaatgaatttgctaagtttttataccactcaaatcgtgtttgtattgaaatctaaagcacttctagaatagggggaaaagtcttccagctcttaataaatattttgttctgtgttgttcagtcgttcagtcgcatccaactctttgcgaacacatggactgcagcatgccaggcttcctcgtctttcactgtttccaggagtttgctcaaactcatttgagcaaagtccatcaagtcagtgatgccatccaaccatcacatcctctgctgcccttcctcctgccttcatctttcccagcatcaaggtcttttccagtgagttggctctttgcatcagggggccaaactactggagcttctgcttcagcatcagtccttccaatgaacattcagggttgatttcctttaggattcactaggttttgtgcataaatgaatgaataaaggaaatctaaaattaaaacctaaaaaataatatagcctaaaatttttaaataaaagaaactaaatctttatatttgttagttaagaaggaagatgttagaataagctattaatgtgttgcataatcttcctcagtctctctccagaggctgtgcaagagctgaaatcaggctacaatctagaaaggtgtatccatttatgatccaccccaacctacataaaatggatcatatctctgaaaacttactttatcgttacaactggcatagagcatattatagagaaattatgaaggccttggaaatagtatttcaattaagatactgccaaaatttaattaatagtcacttatgaagacagagtattttaaaattcatcttaggatattcttttacttaattacataggaaaaggaaaaggaacatcttgtgcattttaaacagtctgtgacttgatttaaaggaaatcttcctctaaatttcagtagaaatagtttcttgaactttgaacaacaggacttgaactgagcaggtctacttatacttgattttttttcggtagaaagactgcgatattacaccatatgccattggttgaatagcaaatacagtaccatggatacagtggaattgcctctaaggggcttttcaactgtgcggaaggtcaacaactctaacacccctgagttgtttcagggtcaactgtactctcttagacaagtgcttttcaaactttaatgtgtttacaaatcatttaggga

SEQ ID NO: 46220 - DNA, 1745 bp, Bovine  19866880645886
  misc_feature (1)..(1): n is a, c, g, or t
natactatgttagtaaaggtggtactataattcacagatattgctataatttgcagatatggctacttattcaaggtaagagaccacatttcacttggtggcatttcttataaaaataaaagacctataattaatttttaatacctttcagaatgatgaataaaattaccgattgtttttcctgctgtgagcaacgtgcttaggtttttgacaacaaagtaaagatattagtaacttctgtgtatttaaagcacaccaataagatagagggaaaggaaccatctaaagcaagagaaacaatgttttatcccacaaactcattttgtttgggatcttttaaagataatatgtcatctgttcctactttttaggtgaggttaaagtgataccttgattgatttttctctagattttccaactagtaagtggttgaattgggatttaattatagatctgtttgcttctagagcccatcccccatccctttcacaatattacattgccttttgtccctgtaaaatctgggaatgtagatggatggatgattatttgaaattatttgtatgtgtttcttttatctatgatatgatttagcctctttttgcccctccagggataatacccctcaagctgaatggccctcagcagatgaatccaccacgagcagtatttcaccacttggtttcagctctggccttccttcagccactggcagggaactctggtcagaaagccctttgggtgatttagtgtctacacccaaattagcctttccctcgaaggtgagcctcagttcttccccagaggttttagatgttagcggcttgactcttcattctgtcaccccagcagtgcttcagactgacctgcctgtggcttctgaagaaaggacttctgggtctcactcattagaagatggtaaggaattttaatcacttttcacaatttattgcattagatgacagaggttttgaagagagcaagagactagggttagaagaaagcatggccacattcactgagaggaaatgtcttggaaaagttgtgtgagaaagggaacaattggctttaatgggttggaatggagagtccaaatgggtaaataataagaaatgaatatcttgggtgagatcacctaatagatattttgaagcttctgttaaaggatatataattaaattatattactatttaagaactactctacttgcttgaatattttagtagtaaacaaacagcctcaaagattatgccagtatcttttaataggattaatttggggccaatagagatttttagcttgcattaggcttgagaaggggaaagtctgaactggggaagctgtagcagagattaagaaatgaagtcaagtagatggtttagatgtggcaggagaggacaaatcagtgagactcagggctagagtataggtgaaagaggaagatgaataaagatataaataatgagcccagctttttgaacattgggtgaacctgaagaatggtagacaataaacatagccagaaaatgggaattcaatttctagggaattttcttcctaaggttttactagagtcagtctttgttgtcaatatggctacccagcagttctctgttttcacggggtaaaaaaacccaaagtgtttgaagatgagttattttagtccctgatggttttgttatccacagggaaaggggggtataatcatgagtgactgtaccacatcacaaaaatataatcatcc

SEQ ID NO: 46221 - DNA, 1424 bp, Bovine  19866880659247
  misc_feature (1)..(1): n is a, c, g, or t
ntgcagtgattttggagcccagaaaaataaagtcagccctgtttccctgtttccccatctatttgccatgaagtgatgggactagatgccatgatcttaggagcctcaggaagcccaaaatttcttgcactgtccaagtaggcataacacaaactgagtatctttttttaaaatggggtattcaggcagtgactagcatcactgaggcagtaacctgagaagatgagagtttcaactttacaactatcctttcactagacacctgacgctcactgaagtgatagcagttcttcctttcctgtggtcataagaccattgtctaaaatggcaccacaggactactgaaaaccaagaaaaatttactcataacaacagttgtcaatggaacataccctatgtggatagaaaatgagggacagtttttaacagctgattttctcatggtataattgcctagaacactgatgcctacaggtaaacctattattttctaataaattttggtcatttatctctatgacttctgaaacctaccagatgaggagctcagtttacactcttatcaagctctctacatccctcatttctagcactgctatctgtaatcacatcaatcaccaaaggtaataacttcatccatacttattttctaccttgtactgtaattctctatgacagcatgacctgacacataggttgttaattctaattattagccaataaatatatatacatgtgaataaatgaatctccatggaaaaagtaaaagcacattaagatctcattgatgggtccccttggaactgtattataaagtctacttatattttctcaatagacctgagacctattcatcataaaaggcataattaccaattactgacatgtcaaaataatattagcttttgttttacactcttgggtgattagacacattataaaaactgtagctccttggatctaccatggatcatgtcatgtgttgttaacacatgcagaataatgaaccctctcaaagacatccttattgtaaattgcaaaacctgtgaatatatcaagatgtgacaaaagagactttgcagatataattaagccgaagatcttcagatgaaaagtttactttggatttcctgggtgaactctgtgtaatcacaagtgtctttataatatagaggaaggcaggagtgtcagagtcagagaaagagatacaatgatagaaaggtgaaagtcactcagtcatgtctgactttttgcaaccccatggactatacattccatggaattctccaggccagaatactggagtgggtagcctttcccttctccaggggatgttcccaacccagggatcaaacccaggtctccctcattgcagcaggattctttaccagctgagccacaagagaagctctgcttctgtaatg

SEQ ID NO: 46222 - DNA, 2149 bp, Bovine  19866880666453
  misc_feature (1)..(1): n is a, c, g, or t
ncctcttgatgaaagtgaaagaggagaataaaacagttggcttaaagctcaacattcagaaaacaaagatcatgtcatctggtcccatcacttcatgggaaatagatggggaaacagtggaaacagtgtcagactttatttctggggactccaaaatcactgcagatggtgattgcagccatgaaattaaaagacactccttggaaggaaagttatgaccaactttgatagcacattgaaaagcagagacattactttgccaacaaaggtccatctagtcaaggctatgattttttccattggttatgtatggatgtgagagtcagactgtgaagaaagctgagcaccaaagaattgatgcttttgaactgtggtgttggagaagactcttgggagtctcttggactgcagggagatccatccagtccatcctaaaggagatgagtcctgggtgttcattggaaggactgatgctgaagctgaaactccagtactttggccacctcatgtgaagagttgactcattggaaaagaccttgatgctgggacggattgggggaaggaggagaaggggatgacagaggatgagatggctggatggcattaccgactcaatggacatgagtttgggtaaactccgggagttggtgatggacagggaggcctgatgtgctgcagtttatggggtcgcaaagagttagacacgactgagagactgaactgaactgaccaaccagagtcccttggactgcaaggaaatccaaccagtccatcctaaaggagatcagtcctgggtgttcattggaagaactgatgttgaagctgaaactccaatactttggccacaagatgtgaagagctgactcattggaaaagaccctgatgctgggaaagattgagggcaggaggagaaggggacaacagaggatgagatggttggatgacatcaccaactcgatggacatgggttggggtggactctgggagttggtgatggacaggggggcctggtgtactgcagttcatgaggctgcaaagaatcagacatgactgagtgactgaactgaactgaaagaccagataagtcagactagggttgggatccaagggtcaaaaattcttaaaggtccccacgtggttccaacatgcagccaaggttgagaatctctaattttggtgcaaatttactctatatggtttaaatttctttcatattaacctataagcctattttctatcatatttaacatttcaagaccttctaattcatatgtcttcttagtctcagaaaatatggttcattaccaagtccaaaattcagagtgggcacatatcctgagctaagtagctagaatgtaaaagtggccatttcagataatcttaagaaagcaggaagtaagttgttttacttaatatttatttcagctattatttaactccatgcttcaaacttcaatataattcatgcaaagctgaaaaagagtcacatgtttttggtgctctgaggagtatagcatcagtaaagtaactgccaccgggcccccccccacccccaccccaggatgatagcttagtgtcactacctaaaagcaaagaattgggctgtttaaaatattagactcatcctctacaaactgctctatgctcccagatttatctataatgtgtatggtcaaaggatgaaagttagcattcagaggaccaaaccaaatactgtgggaagaatgtaaaaaggtctttcttattaccaggtgggcaaaggatcaagcataaacagagactaggggctttccaaagtgtttctcagttatttttctctttgattataaggctgtcttaggctgtgatgtttagagatcagccagctggcctccaaaatcaagggcaagtgctctgggttagaattatgatgccatgaagatctctctccctctcgctggacaaaacaaagtcttgccattttgcactcaagtttctaagttttattttcctctaggactctcccacagttctaaactcacaagtaaatctttcaaaaagtttccctatcccaacttaatcatgcaaaaataaaaccacaagaacaagtctgcagtagaaaagagttactctgcaaagctaaagacacaggaagggattccttaagaca

SEQ ID NO: 46223 - DNA, 1107 bp, Bovine  19866880731470
  misc_feature (1)..(1): n is a, c, g, or t
ntacatttttagaaatgtctaaggctcttatttttcttgcatcaataaaataaattgataaattattacatattttagatttaaaaaggaatcacaaaactatacagcaagataaacaacctggtatcaatgtgtaataagggatgccaagaaaagttattattgaacaattaatatatgtccatttaaacaaaatctattctcattgtctataataaaaagatcccaaagcaaaggaatgctgtgtctagtctgtaactattttaagcattaactcttacaaatgtttacctgcatttgtcatgtggcttttgtttccctcctctcctcttccaagcacaccaagccaactttctgtgcttcaaatctagtttataccatccacactccagttttctctggtctgtagacttttcctctgctaagctttggtatttgatatcaatatttgatattaatggccttctacctctcagtgtccccagctctaatgttaactaacaagaccgacttgtcagttcctgtatccccaccagtcagttgcatatttgcaaaccatgactctaggagtctctagtgctgtgtacagaaagccaaagaatgaaaggcaaactagaccctcccttcagatggagaaggatgatgtcatttcactcctttgttatgatttttacactctcagaattcacctgtaatagcactggtggcttaccttgtgtctggttttaggttttctactgtggagaaggtttgatttgttgtttgaatggacttgttcttcccactgaatgacccattttctctggatataacttcatattctgaaaagcaagaaggccaacagacacttgtctttatgctctggcaaactgaatgttcttgaagctaacagcctaaaaagtcactctcataaaagtgagcaactgagattgcaggcctgagacctattgatcatacacatttgcaacttccagatgggagattatcagttgatggtgaaggtgccaaagcatttggggagttgctcatggaccatttttgttttctctctaccagagcaggaaaggcctggtaactgtgtaaagtgatgacactcctggggtagca

SEQ ID NO: 46224 - DNA, 1483 bp, Bovine  19866880827134
  misc_feature (1)..(1): n is a, c, g, or t
natatgtaaggaaatgaagttatctgctttgctccaggtggaaattgctgtagatcctgctagttcgtgtgtgtgtgttccacactgcacactgccttcatttctgccctcttaaattgtagccatcttcatattctacctaaatgttatttattctcacaaatctacctacttaggataattaacctctgttttcaaattaaagtgttccattacagtgggtactatgggctgcccaccgctaacccaccattcggtttcttctctagcaccaactgaaatagattatgtctattccaccgccaaagcaccactcaggccagaggagccagagacagaaggtggtaaaggttttcatgctttgattcttttattcaaaatattttaattagtatctattacttttcatagaatactaaagtccaagctggggtacttgttctaaagttcaatagctttgaagagccatagtttctaaaatccttgaattcctaaaattaaaatgatagttgactctctgaatacagaaataaacttcagtttctctgtggtatctaggtattgaggcataataacacttgacagttaatgacagttaaaacatcaatcttagttgggaggtttaggattatagaataggatgtccctctcagatcgcttttttcttatcctaacgctgttgtcctatctgtaaaaatgtgatgcagattcccaagagaatgaggttgatattcaagaaagagatacttgactgcagctgaacatcttacagtttttaaaattgttctcctttgttttgatacagttgtgggatctattacacatgtgtctgaacccacctgagaccacgctaggtaatgctacaccctggcagcttttgtcctcattgtcaccatcaccagaaaacccatgttctccttcattgtgaatccatgttgcaacatcattcttcatcacagttcattttctttctagatgcttctcttcataaccattgtccaaaaaagtgtcttctctcattcagctttgtatctagatcttggcctcttgctatttcagtcaccaaaactgtcaaacctaaagcatctttttcctaatgttgcacattctgccagtttggtattatgttgaatatttcagataatatatttttgtacaatgatccacttgtaccttctgccctagcaacacacttttcattagcagtcatttcattacgttgatttacttgtttgattttctctttgttaaacaaaattcaatgctgctgaatggcttatgctttaacagtttttattactttgttttatggttactcttgaacacatatttctagcattattgggggaggtactaatatggagtgatgatttaaaaattaaggatattgcttaccttgaaagtcttttataacctggcatctctaagcagtttttaaactaaatacattattaagaagtaggagtggtattcactgcaattt

SEQ ID NO: 46225 - DNA, 1784 bp, Bovine  19866880893528
  misc_feature (1)..(1): n is a, c, g, or t
ngcgtccttaggcgtttaagtctttatcccggcagaaaatatttcttagttggaagcagccctgaagtgctgcttagaaacttgctgattttgaatccaaaccccaaccagtggttgagaaagaggcatttgaaatggtcttttatcccacttctctgattcacattttatttaggatattggtacttttaagtaattcttggttatgattcagcagcaaataaatcctgaaatccaagtgattgaacaataagggtttgttttttatttattaatatatcaatcccgcacaaatcagctgagcaagcagagactcagggctctagcttttcaatcatgcaactctagcatcttggatttcttcacttccagttacacagataaaagaaagaggtggggaaggcacattggtcattaactgccctgacgagagagacagagagagagagagagtgtgtgtgtgtgtgtgtgtgtgtgtcctgaaggagtcacattggtctcaccctaactgcagagactgggaaatgtagaaatgtacaaggatgtttagttattattaacagtgtctttcacagtattttattttaaaatttcaaataatgttaaaggacacaaggtttatcacaataggacaaaatttaagaaaggttataaaacactatattagcaaaaagtcatttttcaaacattaatatacttgaaaaaaattctaagaggataagacaaaacagactcttgagatgaagtggggttgaggatgagattaaatagagttgaaagcaagaaacaataccctaacacttaccatcctctgatttccaaaggttctacatgaggccaaaaaaaaaaaaaaaagtggggcctttaaaatgtcccagcagaagttgagagttgcctcaatttgttacaaaattttatttgatttatgctgcttacagtgaacttcaaagagattcatgcccatggttcctaaatgttacataaacacaattttctataaacatcagtctggaactctagcaacctgtacagagttggtagacactcagcagagcaaactggcaaaggactttactctcaagccttcacaattgagcatagctttgtccatttttctacttatttagtagaatgcccatttaatgtttctattttcaggtagcaatgcacattctctatggttttgcacatcggtttagatttctcaaaaacattatgaatttacgagaaagaccattctccaatcatgtccactgcctaatattgtgctctgtatattcagcaggcttctataaatgttacagtttgatttataaatatagtaagtaaaatcagtgggagatacacttgaaatatgattatgctaatgtatatgcatgaaataattttttaaatggagcctcattcctattacttggattaagcgcattagtgccaaaatgtgagataagttactatatcatattttcctgtaagtggccaagaaagatttaagctagaataatgcttaaccaagttatatttttcagatatttttaaaggatgatccttacttctccacttccacaatcaagatggaggaagggaacaatagttttgcactatttaaagagcatttagtattctctttagatcataggtcttcaactttgtttccctatagctctcaatggttttataatgtctagatggcaaactataaaattcttatttgctgttagtgtgaaatcaataattttattcattaaggaatggaacctctgaataaatgattttctgtggct

SEQ ID NO: 46226 - DNA, 2646 bp, Bovine  19866880921768
  misc_feature (1)..(1): n is a, c, g, or t
nccagactggatgctccactgagatgacccctgggggaaaaggagagaccacaaggggaagttcgcttgggccccacaagctcttttcatgttcctattgttgtttttgttgcttagttgttaagttgtgtcctactctttccaaccccatgaactgtatagcccttcaggctcctctgtccatgggattctccagccaagaatactagagagggttgccatttccttctccaggggatcttcccaaccctgggatcaaatgcctgtgattaaatatgatcagctcaactctgtgacctaccttcatgatctgctttcacttgagtaccttcaactctggacctccgtgtccagttgctcaggtttctgtttcaagggcagctgctcgcaaccttaaagtggagagaactagggctgagcagggcaaggacattctggccaaagggtggtgcccagggcaggaatgttcctggctctcgctccgtgaggacctctcagctgtcacaagaggggctcttctcctagaatagcagcgaggttgccaccagcctcgtgttctttgtacccggactgtacttctgggacagctggtccgattgcacatcaccgacattccaagcccggggtgccctgggcctcagggcaccagcagactctctgagaattactgagtgatactcagcctccccccacagtttctaaagatctggatgtgagatgaatctgcaagagaaaaaaatagtaactggaaagcaccttagagattaaattggccagagtcccgcctggtttgcatatttttgtgtgtgtgtctgtgatatgcatttaaaatcactttcctcaactttccactaagtcttctggagaattcaggattttcatttcccacactacgggcatctctggagttttattgtcgtagctgttcttgttggtctgaggtcttccagaaattaacagtaatttacatgcaaatgtccattccagatggacttcttgactcttctgccctacttatatggttgaaagagcctagaattctactttcattcagaaccctagatctgtcttcttagctggccccagtgttggttctagggagagaggccctccttcattacaggctaagaaagtcaaggaggaaagggaagaaaaaaattaccccagaacctgccaccaccattatcagaccagataggaatactaaccaacagtctggggacttccttggagatccagtggttaagactccaagcttccattgcagggggtatgggctaaatccctagttagggaactcagaacccacatgccactcagagcagccaaaaaagaaaacaaagaataagcataataaataatctggtgtgtgcctgttcttttcatctagtaaactcctgctggtcagtcattaaagtcttgtataaacagaatgggcttctttactagtggtaaagaacctgcctgccaatgcaggagatgtaaggactctcaattcctgggtcgagaagatcccttggaggagggcatggcaacccactccagtattcttgtctggggaatcccatggacagaggagactggcggggtacagtccatagcgtcacaaagagtcagacgcaactgagcgactaagcacagcatagtacagaggtctaagtgccatgggtgctggcaaattctaccttctccctgagtgatttctattagtccttttcagttccctcaaagcatgtgtatgtgctggtggttaagactcactctgtcattgagtgaaacttgacttcttcctctgttgttttaggctgacttctgggcctcatctccttaggggctgtgcagcctccaagaataaagccagcattcaagcaatctctctaccccatgtcagctcccatccagagccaaaagaagactattgtctcttcctgtttcaaaaaccttcagaccactaatgaatctcttatccacctatagttttctagaaaccagaagctccatgtttactgtttcagttgcctctccttacccagaacctttgacttattgaccacatagttacatctacctggcatatcctaattaaatgcccatctctcctgtgaaaacttctgtgattgttttagtctttgcttatctcccttcaagagttttgcagtactttagtctctaatacacattttaacagttgtgatctatcttgtgatatttactattagctcaggttagtcttatctgctaactagattgttcacctgcaggaaaagaccttttttcatatctctcacagcttttgtcatactgtcaaaattatataggtactcaatagacacttatttctgttttaacagatctgtttcagaactactcaaatagtgttcagttgtttggaaatcatgttttatgtgcttttaagtttcactctcatattgctcttgaaatattaggccaagaacttgtgttctaatgtatttttatataacattaagcagtagcttaaagaatatcatgaagaatatatactaactttcagtgaggtcatatgtagttcctgtagtcatgaagagttttgaaaatctgttcatcatgggggggactgtgaactggattgcaactcactcacagctgatgggttttgaggacatt

SEQ ID NO: 46227 - DNA, 1917 bp, Bovine  19866881013127
  misc_feature (1)..(1): n is a, c, g, or t
ntttcgaatgacaactttttttaacttttgtaaattcacagaaagcaaatagtctctgaggctaggagcaattcatcgcagagagtaggtacaacctttgaactctgctatgaatcctagtatggtcaacatgagactgacctaggtgtttgattttctgattctaatatggaagcttgcattagaaaatctgtttaggcaatatatgttaaaaatatgtgaaaggaatttgttgcatttcttataagttgggtaaaaacctatggttatgtactataatagatcatgtgtgtttaactgtagatgtaccatgactaactatgccagtattgctacaaataaaagtgaccaagaactcatccaagaagcagctgctaaccatactttaatgcctcaactcttagggaacatgaagtctgttactttccatcaaaggcactgctttgggaccccacatggacagactgctagggtttacccctcaaaccatggaataacacatttacccaatttggtctgaggtgcttcagggcttgatgtggttttaggtctgggacgtggacgacgaactcgtgttgttttataagctgaaggaagaaatattggattattattggattattattattctagtgaatgtggtattggaaataaagttctagattttctaaaatatgtttccttgaaatttaaggcatatatttttaagatccaaatgtttttgcctattttgttcattattttatcacagagtcttgaggtaaaacttacacataaaattaagtcaagaagtgaagagtcttataaatctctaattttaaaaaaggtaaggactatcatcaaaccataggtagttcacagtaagaaatgtaaatattcccccaagccatggaactatacattgttatgttttagttcatctagagaagatacagacattcctgactgcatttgaagctcagctttaaaaatgagccccatttagacaaaagtagaacatgatacaaattcaattaagattacacagtagaaaaatactctgacctaatcccaagcataggttttaaaacaataggcaacttcttttagagtcttcaatactgttattgagaaggataatcaagttgcagaacagcagaggatgacaagatagtcttaagaagctagtgataatgtgatgatgatgaggatgataatgatagaatgagttgataatgggcaggaaaaaaatgttgtggaacacagaatatcattacctaatgttgtttctggagccttggttgtatgagtgacaggttcaacgatggtaggaagaactagccaaaaacaataaaataaaccaaagagatttttaaaatgtatttgaagactaatttcagaagctaatttttaagcttcaggacagagagaaaagagacacatacttgttctttgcagatctgaccaaattatggccaatatccattaacctcgtaagacaggttatgcactttgttcaatatcactgtggtcaacaagaagctctagatgtttggttatctgacccttgctagcatggaagactttgctagatgagctttctacacgtttatgaatataaacatgttagacttttctaactactggaaaaagcatttatcagtctatttgcacttctatacaagttgacatataaatgtctactaatttgttcactctttcaataatcgtgggtataataatgaattcacacattcaaaaggataaggatcaatgtaaaaaatgggacatgctcatcaaaatttcaaagtggttcttcattcagtaaaagataagaaactcttaaaccttgttaaataaggagaaataatcagcctattctatcataaaagcccatcatttaaacttttaagatttaggcatgttcaaaaattcgac

SEQ ID NO: 46228 - DNA, 1396 bp, Bovine  19866881020591
  misc_feature (1)..(1): n is a, c, g, or t
naaggaaatggcaacccactccagtattcttgcctggagaagcccagggatgggggagcctggtgggctgccgtctatggggttgcacatagtcggacacaactgaagcgacttagcaggagtactatacacagagaaggcaatggcaccccactccagtactcttgcctggaaaatcccatgcatgcaggaaggctgcagtccatggggtcgctaagagttggacatgaccgagcgacttccctttcacttttcactttcatgcattggagaaggaaatggaaacccactccagtgttcttgcctgcagaatcccagggacaggggagcctggtgggctgccttctatggggtcgcacagagtcggacacgactgaagtgacttagcagcagtactatacacggagaaggcattggcaccccactccagtactcttgcctggaaaatcccatggatggaggagcctggaaggctgcagtccatggggtctctaagagtcggacatgaccgagcgacttccctttcacttttcactttcatgcattggagaaggaaatggaaacccactccagtgttcttgcctggagaatcccagggacgggggagcctggtgggctgctgtctatgaggtcgcacagagtcggacacgactgaagcaacttagcagcagcagcagcagcagcagcagtactatacaagcattttcatttgaagaaacatttcagaggaaatacattaagagcttgtactttgattaattatatgacaattataacttgcttaaactctgcttaacactttctatttttattttcaggtcccctaaggaaaatggcaggtagagtaccttttgacactttctgtactgttgacctaattaggaaatagtttagaaaatatggtagccctaggtctaaaggaacatggctcagttcttttattacttccagtatcactgtccaactttttaaagatcatttggcaaacattatttgttaagagtcatatattaagtattttatactttttcacactacataagctctgtcatatctattcactttggaagtagtgtaagcgatacattgaaaatgaatgagtgtggctgtgttccaataaaacttatttatagatcctgaaatatcgttgtcatatgggtgttcacgtgtcacaaaatgttattttgagttttttcaaccatttaaaaatataaaatccattaactcatggacagtgggcctggagttagctcataggttgtagtttacagacttctatcatagactgctgactaacaagtacttgtattttttaatctcttaatttttattttaaaacttttatttttttgaggtatagttgatttataatactatatatgtttcaggtgtacta

SEQ ID NO: 46229 - DNA, 601 bp, Bovine  19866881024060
  misc_feature (1)..(1): n is a, c, g, or t
nctgctagggataaaaactaaaatttatttggcttaagattcaaaacaaaatttttcacttagcacttaaaaatctgcaaatcagtaacatgtgtaaaatggatttgaattcaaaattatttcaagttaggcaagtttttaagaacaagatacagtttttgaactacaagaattaaaatttccttcccaaagaatagggaactgtcacacacaaatgaacattaatgaacaaatccattactgtgagcctgcttaataaagatgccagcagtcaggaagagaggaaacaaaggtaggtcactcactgcattacctaatgttgttgaagatttagtttctagcattccaggttctaagactgcatgaaaaatgaccaagaaggaatcaaaatccaaggaaaaatgatgaactttattaaaatacgaaaaatgcttaatttttaagtactaagttgagcaaacataaatggtgaaacttttattcatgtaagaaattgcttttctatgtaaatagattactatgtttttagacaaaatgaacaaaaatgcagctggtcatttaagttggaaagagaaagtggaaaaaaaaaaagcatgactct

SEQ ID NO: 46230 - DNA, 969 bp, Bovine  19866881028109
  misc_feature (1)..(1): n is a, c, g, or t
ncctccctgtccatcaccaactcctggagttcactgagactcacgtccatcaagtcagtgatgccatccaaccatctcatcctctgtcgtcccccttctcctcaaaaagaaaagcaactatgagttttacagagaaacttgacagtttggaaataaacaaggtgcattgaacatacaagtaaatagcataagaaacctcagcttttactactgagctaaaaaacacatcttaaatccatcatcccaaagcccattgttactacagtcattaatggaagctttgcaagtctttgttgctgtccttataaacacaagagtcacctaaatctcgcaccctagtgttatcccaagtaactcactgattgtacatctcagtcctttccgttcttctgggcaaatgcatctgccattttcccaggtcccgcattcttgcagaactctacaagggtgcttaatgtggagattaacagttcctaatgaaacaataacagagtagtatatgaactggctgattagtttctcttttgggttctatggcctgtaatttacatatgtaaaaccattattttgaataccactgctgaaaaacattctttgtaatatcatcaaaaaatatatacactgagaatctatacagggtatacaaagcttactagatgttatggatacaaaaaaaaaaaaaaacatatttgaaagataacagcatcttgaccaagaagattagaatctactggaggaaaaaggagacttatagatagactgctgctgctgctgctaagtcgcttcagttgagtccgactctgtgcgatcccatagacggcagcccaccaggcttccccgtccctgggattctccaggcaagaacaccggagtgggttgccatttccttctccaatgcatgaaagtgaaaagtgaaagtgaagttgctcagtcgtgtccgactctagtgaccccatggactgcagccta

SEQ ID NO: 46231 - DNA, 2012 bp, Bovine  19866881054059
  misc_feature (1)..(1): n is a, c, g, or t
ntggttttctctactttcttccatttaagtatgaatttggcaataaggagttttgctgactgtatagagcttctccatctttggctgcaaagaatataatcaatctgattttggcgttgacccttactacagtcttcggccccagtgtagtagggatcaatttatttcttctcaatggcaagccctttgcccaggagcctagaaagaggaaatgctttcccctcatgccaggctaaggttcatctccttatcctctgccccaagctctgagttttctttagggatattgacagtggtgttattcactgtttgccagaattttatctctctctgtatttgtgtggtttaatccaatatcaaaccacctcaaagacatcagaatactattaccaacagaagttagtttccccaaatctgcatcattcagttctaaattacaagcaatgaagaacaagtctttggagaaaatcttgaacttttctcattcttactacagtctttttctccccaaatgctgccaagcaattgctcaaagaataatacatagaatgttggaaattacatttcagagacaaagaattctaaaatcaaatatttcactctgaaacataatttttcagacttagaactgcaaaaatgtcactctttactaaagtgcataacttctcaccttaaattcactttacttatctggtgaacaactgaggaacaagtgagttcaaattgatttttgctgagtcttcatcttagaaagcaaaagtttccagcaacttttaagatagcactcccctccccatgccgattccatcacctattccccgcctcctcccaaatttcaggcttcagtctaaagccagcatacttcttatataaacacgcatattcaaaacaaatgctttagataaatgaaaagagtatgtaatgcacgcccaagtatcttatttccaaaatggctctgggatccttaatgagttctaatttcctagccttcaccttttacacatccataaaatctgccctgtctcgtaaacgctgttgggaactccttgttcagaaactgattcattcccattccccgcacagtgcctgacaaagcgtaggcgcccaataatgaatgaatgagtttgtagaaggaaggcggggaaaaggttagttttttctagataggactaggagaactacaatggctacaaaacaacaaaaaaacacaaacttggacaaacgcctactcttagctctcagagtccagaagaccaaattacgtcccgcccacgggcgagaaacgggaaatactactgcttaggaaaaccggaagtgcctggtcacgccccgcgcatgcgtccatccgttctgcgtgcacttcctacacttatccagtcatccagtgagaaagcagagactcagacccctgcagaccccggcgtcgttagtccccgccctatcgacgtcgcgcatgcgtcctgggtcggtccgatagctctgaggcggagcgaaaggacagattttcttcttattcccgcccctcttcgttccccacctgccacgtactgggcccgagctctcgctaggcttggtgggtcagtgcgattggtcggggcccgcgcgagtctgccagcgaggtgcggcggccccggagggcaaccgagtgggctgtgaccgcagccttcccccaacgccccaaagcccgacggtggcggcctcgcacggggtcggatcagcggagacccgcggaggggcggcagtggcggcctcgggaagacggtatggccgctggagacggggtcgcggcagatttctccggccaggctggccgggagacgtggaaacgctgcgagggcctcgttcgaaccggcgagcgcggggcgggtggggtcggaggggtcgtgggaaggttctggaggccgaggactgaggccgggccgggcctcgcctcgaggagaagccacggcgggggaggggcggaagtgggggtgccactggccaccgtggcaacgaagcggacctatggggag

SEQ ID NO: 46232 - DNA, 1898 bp, Bovine  19866881111312
  misc_feature (1)..(1): n is a, c, g, or t
nctcaaaccaaaccgggtaaatgtgggtttctcatttaaggactgagtcctcgtggctctggagagtctgggattgatccagcagtgggaatggtagtccatgtgatccctgcgtgggtaaaggcacgaaatggcctgctgctgcttccccctgtcgagttagcaaaggaaaacgtgatgagggggtggcagggactcgtgcgatagctgattactctgctttctacgtaaggatctactcttttatgtactatgtcctttatttgcgttttcttattccattcccttcttcacttaaagacaaaatgtcttaaaccaatcttttttttttttttcaagaaacaaacatgaagtaacttacctgtccccacagcccatcaacagttgtgaggatatcagagaaggcagcgacttcttacttctcagtctggagtagagtcaaattcagaacccgcctcagtgtgaaacattgaaagattgaacctaggcagtatatttgtgcaaacagagttcttttatgcaagggttctaaacatctctcagctgaaagagagaaaagtctgtgaaggacagaagtaagaagtcttaaaatcatggagactgacagacaaaaagaaaggggaagagaccaaccagcgagcacagacttctgaagtgaagggaggttctgcttctcagtggtaatgaagagaactgtgtttggaagggcccataagagtagttgaagaaattccttgaaagtatgactcagaagtttggatctgacccaaaagtatcagtggtctctcctgcaatggtctcttcccccctatacagggtacagcctgtgattagaacagagcacgttaagtgctctactgggcaccacacgctatttgttcttatatcctgatttattgagtgcttttgcctcaaacaaggtctcagcctacttccaaataggtcttctcaacaagatctgtatgcttcacttggcttaattctgttccatgtctataaatacaaaatctacttactgaatacatgcttatatagacatgctattttcttccgattttattgagagaaaattgacatacagcactgtataagtttaaggcatacagcataatgatttgacttgcatgtgtcatgagatgattcccacggtagctttagttgtttagtttaatccatcacctcatatagatagatgaaagcagtaggaaaatgtttttccttatggtgagaacttagacatattgttttcttaaagcttccacagaaaagtcaacagttgtcagaacagttacataagtatatatttggtaaactgtttggataattttcctagatcagtgttctacaatgattggaattaggtacttagatacctaggagaaactcatgttgactttatgaagatatttaccagattgtgtatgctatggctgtctcataaaagaatatctacctggctttaggtgaccaaatcattaaataggaagtatgtgatttcaaaaaaattttcaaattgttatgtacctactgaagcaatattatactggtaagatttaatttgctgacttttcacaagtgtttgtttcattgttttttgactagttcctactacagatcttgaacctggtactcttagaactgaagctccagaaatcgtgggtaatgagcatgtgtgtccttcaaatggtgctcttcctgttcattgtcataccattatagccacaggttctcctgcatcttaaaccatttctaacccctctgttgtcatcctattacaatctttatcgtgtaaatatgctaagctctatgtcatctgttgagtctaagagaactgtgtatatactaatttcaggatgtcggactgctgtgtatctactcgactttgtcatgtgatcatg

SEQ ID NO: 46233 - DNA, 1786 bp, Bovine  19866881150681
  misc_feature (1)..(1): n is a, c, g, or t
ncttgcctggagaatcccccatggacagaggaagcctggtgggctgcagtccatggggtcccagagtcacacatgactgagcgactaagtacaacacagcatacctgaaattaaactcaaatttgatacaaactttggccttgtgagccaaatgatttagttgggttcttctgtgtaaacaaaacaaatggcttatctatagagacttgggaattattgctattttaataatatttttcattgtttctttttcaatgaattaaagttcaaacagaattaaacatttttgaatgcctaaaatatttttcgatattgaggatattgaaatttctcatgtgtatgtatctcattattaacttctcagatgttttgtgactaatgtagcatttgaacttttctaggtgaggaaaagaaaaccaaaatagcttggttcattgcctactggtctaacactattaaaatttctcagcctgcatggtgaatttgactcaagcttaagactaggttcttaaaatagaattttataacatttataaagtgttaggaacatctacctgaatgaactacttggaggaaaaatgtcttcttgcctcaaaatttgaagaaataagaaggaagccttcctcacaactgttttatgaaacaaaattagaggtattctctctctctcttttttttttttttttgtatttagaatttaggagctgttgaactgatgaattgtcccctatctattccaaattctaaactataaaataaagaaatgagattgtcctttgagtattccaagcactattcatagaaattttttccttaaatactgaagatatataaaaattcctactggtcatgccattccccggtgtggggtgaatcaaagttgtaagggaagaaaataggtgaggggatataaaaagggaccacagtaagttgaagttgggatagtaggctgttaagtaacagaagctatgaggctgagaaaaaagataaagaatacagggccaggtagcttattactagcagaaaacagacgcaaaggaagactagaggaaacatccaggttcactgctgaggtgccctcaccttccataactccacgactggtatgacctgaggaggcaacaagttcaaaggatggggagcaatcagttagactgtgagtgcatgtgggtgaggacccagggcagaacggcattctcaggcagccagaagagcaggagcagaggtgctgagggaagaagtaattggtgcatttaagggtcttcccaggtggcttaaatggtgaagaatctgcctcccaatgcaggagatgaaagagacacaggttcaatccctgggtcgggaagatcccctggaagaggaaatggctacccactccagtactcttgccttgagaatcccatggacagaggagccttggtgggcttcagcccatgggatcgcaaagtgttgaacacgacttggcacgcacaaacacacacacaccctaaagatcacctgcatgactgggacgtgattgggcaaggagatgcaatcacttacttactttcagagggtaagtaaggcccctgtaggacaccttaaaagatctataagtgtattaaaggcaaactaaattattttcttctactaagctacatatatgcagttttctgagaaatgaataatacaaaatataaacgtatagttataaaaggtatccacatggtaaaaaaccttgcttcacatgcccttagcaaaaagcagcaagacttggtaataaaaaagtatgctgtattttaattaa

SEQ ID NO: 46234 - DNA, 2095 bp, Bovine  19866881171886
  misc_feature (1)..(1): n is a, c, g, or t
ntccagaagtaaccatgtaacactgtgtataatttcaagtatttatggattattttcctggtttcctactaagcaagtttcaaatttctaccttactgtttttatactgaaaaaaaaaaaaagactatcaattaagaaacataactattatacttgtcattttaaaaattacttatacaaaaaaagtaattgtagttctccttacttttgctgaaagacatattttgaacatttcctgaagactttttggtttcagaagaattagtaagaatggacacatttctcaccctttccaccccaggaattaattttgttgtatagtcactaaatttatataatctctttgctcgagcatgtgtccttaattatgacacttacagccataaccattatgctaatttttaatacctttctcttaagcatcgaaatgaccccaaaggcctaaaactacacgtagaccagatgtaccagcctgggtaatccctactttcagtattaggaaagcagtgtgtaagtaacactgatcacattcacagctctgccatgactctaattatagcccttttctcttcagattcaaaaccagcaaagcaattactttctaaacccacagcaaaaccagatactccaccacctacatccggtaaacataatttccaatgctttgacttaagatgctttctctttggggatgttgctgagaatgcttacaatttgtcatgttgtaaagcatagaaacctaaatacaatgatttctttgttcattcttctcaaagtagccacactgatgtggctactttgttcatttcatatgttaaatgaacaactcagtgtttgggaaattagtaaattttataacagattgtctgggcttccccagtggctcagtggtaaagaatccacttgccaagcaagagacttgggttcaatccctgggttgggaagatcccctgggaaaggaaatgccaacccactccagtattcttgcctgggaaatcctccggacagaggagcctggcaggctacagtctatgaggttgcaaaagaataggactctatgacttagtgactaaacaacagacaaaattttacatctgattatctaacagattccatttttcttaaagcattttcaggctttctcagtttgtgtttgtaacgaaagcttgtttttctttatgtggaacattttcagagccatttcagcagcaaccactagggaggctgatcttgtgttcctcctttacagtcacatggagactgactttctctaaaataccttacattttaaatggtacctgttaattgattttctaccaaataaaaagatactatgtaacagttctgaaaattcaattgtttttcaattgaagttttcccctaagattccagttagtacaaaattctaacttactaagagagcatctctcataataaataagtccatcaagaaggcaacttatatcaacttagaataaaccagattctgtatcctatgagttaagcatcagtgagaacctaaaagtctagccttccttgcttttgttacttatctctgtttatttttttatggtgcagtttttgagcctgttacatctgagaccgaagcgccagccacaagcataggtaacgatggatgtcttcccttttggtcattgtttctctgaactcacccctctcatctctgtcactgtctgtaatgtcctgtgtaaacagtggtcattcatccacattttcattcattccctaaaattgtttgctattttcaacaggaacctttttcatatcattaggcattcttacatctgcagctcagcttgttacacctgaatgtgaattgtgctttgatcaccttcagagatagatttcttgcagcacttgatgttggcaagagtcacagatgctctctctgtgcatccttcaaaccagggacgttgttgaaatctctgctttcatatgtgtataatttatgatgtgggagagaagcaatgaaaaagctgattggggcttgaaaaagaatacgtaatcacctctttcttggcagaagtcctttcttttgggatttcatactggtccattgtaactggacctttct

SEQ ID NO: 46235 - DNA, 868 bp, Bovine  19866881311675
  misc_feature (1)..(1): n is a, c, g, or t
ncacagacacagtcacgactctcacccctccaagctttgtggattagagggctggcattctggttttctatgcctcccaagaggctggtaaaaagggtgtgcagttagcatctaacatccagagctgcctaaaatattagtcaccaggatcaaggcatgttgttaactctttaagggaactgatccaagaaacaggaagatgaactactccctgtaagggaggaaagaaaagtggggaggatgggaagccaagacactgaggttatttttctatgagggttggggtggtttttgtttttaaagaaaaaaagaaaaacttctgagaattacccagtgttgtttctgaaatgtctaatgcactagacacagtgggcttagtggttcttggaactgattcaggagtcactggaagggaaaaaagatgactttacaaattaagataaaatgaaacaactcaggaccatagggtactgctgttgccctttagaattagaactgacatgtatacagaccaattcttttcaagttaattatggtaagggctccctggcttggcccagtgtctgaactgacacctccttccaactattcccttctgggtttgtccactctccaggtatttcaaaaggcacatgggaattgaccctcatggaatcacttaacagattattcataatttcttatgtctttttttctctttatctcctgaacttagcacaaactctggagaataataagcaagcacatgataaatatttattaaatgagttaataaatgggcagctaaaagaatgacccagggcaaaaagatttatttagaactattacattataggaattctcttttccaaactgcagtgaacatgca

SEQ ID NO: 46236 - DNA, 1479 bp, Bovine  19866881364465
  misc_feature (1)..(1): n is a, c, g, or t
ncaacatgggagcaccgcagtatgtaagacaaatcctaacaagtatgaaaggagaaattaacaataacacaataatagtgggagactttaataccccactcacacttatggatagatcaactaaacagaaaattaacaagggaaaaaaaaaaaaaaaacatgtatctataaagttcactaaagcaaagcacagtaaaatgagggattgcaaatttttatcctctacactgtgagaacaaaaatcttccagagcaaagcttcggaagtgttgaagtcattgtcgtccaccgctgggagagtgaaggtgctgccatcaaagccaaggctgcatgtgaggatgtataacatgatcaggtcatttccagccctaaatgaacgttttaggctgctggagccatctacacttaccgaggagatgtctgagagtgatcaagtaaacccaagcacctagacagtaaaactgttaccttttgtggccctctttttattcagctcactttttccatttccttcctttattatccagtcttctcataaaatctccctcagtatatttttgcttaaagttaagacttagataacacttgttgtttattatcatcaggaatggtggatttggtagtttttctattattcaatagagtcttaccccagtgaaatgaagagttccactcagctttcaagataattcgattatcattgctccctacatcataaagtctgtgtgacaaagtttgataaaaatatagaacctaaaacaaattcttttatgatttaccaaaaaggacatgaagagaaaaatttacccccccagaacaaaatgatttctggtgaacactacaaggagttgcttgtatgtatcatacttctgatctgtgaatatattaaatttgtatgtgcctgtacttttatttccagtcaagaactttgcacttatttaacctctggaaaggcttttttttttttcctgttaaaacaaaaagcatattttatgcccagagcaattgattccatgagaattgggaagtgagacatagaaaaatgagctggttgctaaagcctctatttccttccagttcttgatacatctaaccttttattgatgaaatgacagtgaggctcagaaaatgaaaacttagtcactatcaccccttatgacttctaaaagatccagctgctcatgaggtttcaaacactggaattatgaatggcttcctaaataaaaaatgacctccactgggttggagagcactcccaccggacttcggacttcggagatagagtctttgaaatgctgtgttctgttttgtcacgaacgaggcacctgctgtgagtgcactgagctaagggactaacaaatgtcaagtaagctgtggcataccattctcaccatgcctcaaagaacatgtgttttttatagaaatggttgtaaatgactgtcggatttctaggtgagccaagggcctactccatctgtag

SEQ ID NO: 46237 - DNA, 731 bp, Bovine  19866881389050
  misc_feature (1)..(1): n is a, c, g, or t
nttgcagtattatatacttcggtgatggataggaggagtgttgctttgaaaaagagatttctgagttttgaaccagaccttgaagttattaagagctaattatagagaggcgtttaaatgggttttagatggagaaatgggatggggaaaagacattgacattggcactagccagagtatcaggggaacatgcagtagattgacttgtttggaggggcatgggtttgcaattatgagaaattgaattcaaaaagagagggacagtcttgttgactactttaaatgaaaggttgggaggttaaagaaacatggatctttttcatttcaaaccactgtatattgagttatagcatagccaggttcaaatgatattttgaagcagatttcattgagagctctgtggcaagatggctttggagacaaggagtaaccctgaggcctatttaaaaaaaagtaagaccagacatgagagagccacattatgatttggcctatatttactgtcccgaagagaatattcctgggttactggttttatttgctatgtacaatgttagagcagtgagaagcatcacaaatcatgtagcatagtccttttcatttcacaggttaggaaagtaaattctggagaagtagagtgactttctgagctatgagtttgtaaagtatgtaaaaccaaagtgttaagaataaatttattgaaaatgatagccacataaagctatgaattt

SEQ ID NO: 46238 - DNA, 1616 bp, Bovine  19866881530831
  misc_feature (1)..(1): n is a, c, g, or t
nccgtttccttctcccaatgcatgaaagtgaaaagtgaaagtgaagtcgctcagtcgtgtccgacttttaggtgaccccacggactgaaggcctactgggctcctctgtccatgggattttccaggcaagagtactggaggtggattgccattgccttctccgacttaccccctttagctcagtctaattctgctctgtatatttcctgctgttctttcatcctgtttcatgcctctctcttggctgtcttatccttggctcactatccccagtgaggactccactgtaaggttaacactaaacgtgcccctagttcaagtcactctctccatgacatccaaacttaccgtgggacatctgagggaatttggaagaagggagaagtcacagtcctctgagacctgcccttccaattttgaggtcctctgggcattaagacatacacaattgttaaacctgcaggctttggaagtaggcatgtctggatctgagtcccagctctgccttcctggacaaggaaaagcttagcatcaggagttcacagtgattgtgtgcttgaagcagcagtgggacaccctgtaacaattgtagggttggttgattggtttttaaattttatttatttgtttaattggaagataattactttacaatgtggtgatgctttttgccatacatcagcatgaatcgccccaggtatcatggtggtctcccccatcctgaaccccctgcctcctctctccccaccccgtccctctgggttgtcccagcgcactggctttggatgccctgctttaggcatggaacctacactggtcatctattttacatatgataatatacatgtttcaatgctattctgattggttttaaaagaatgtgtagcttaaaatctttttttgagagggaatataaagacagaatttgactggttcactggttcaaattaagtgaaaatacactaggattcaatccaaaggatttcacttctttccattgcagtttctgagtaaactaaactaatggaaattttgaaggaactgcttctgtcaaatctttggacatttatgggaaaaaactaatgaaagcaataaaacagaggcagatatatgtactaaagatctttccagcaaccgttaaaccagtgtcatggagagcttcatagaaggcaagaaaggactacttccagttttaaaattattttttaagttaaccataactcaaaagctgtatctcttcctcttttcagccagcatatgtcccaagaaagctaatcccagtaacaatcatcaagcaaggtaatttgcatgtctgctctggatatatgcttacaactattttaatatgctttttaaactgagataattaaacatagcacatatttttaaaatatatatttatgcttatttttttgaaaaataactgctctagtaaattagaagttaacagataattttgactctacaaataggccaagtcttggcaaggcatattggttgaacatctggagaaagaacaaccctaacaagtattaaatttaaaaaaaccaattaaatatatgtgggtttcttcaggattaagatcgtttagatgtaggaagtcattaataggatat

SEQ ID NO: 46239 - DNA, 1125 bp, Bovine  19866881650027
  misc_feature (1)..(1): n is a, c, g, or t
nataaatgggtaccagagttcagctagttattacagaaaaagtgctgtttttcataaattatttttaaacattataggattaaaaggattcattttcaagataattttctttcttttcccacatttcttaaatctccattgtttattgaattgcttttggtcagttcctgccacagacattgaacctgtaactctaagaactgaggctcctcggacaacattaggtaatgaccttttgtatcttttaagcaagaacattttctgctcattgtccactctattccattatcatcttggtcaaagggttttctcttttacaagattctttcatcatccttttttgtcactcaactatattcttcattttgaatgtattgaagatgtttaaaataggtcacttggttagaatataagtctgtatgaagctatcatccatattatcccagctttcctaaaactttacagagcctgtggttctgctggattccagataaagttaggagtctcttccctataaacagggcttcccaggtggctcagtggtaaagaatttgcttgccaatgcagcagatgcaggatacacaggttcaatccctgagtcgggaagatcccctggagaaggaaatggcacccactccagtattcttgcctggacagaggagcctggcaggcttcagtccatggtgtcacaaagagtcgaacatgactgagcatgcatgccttataaacatcagatgtaattctatggccagcaacggaaagttgttttaagatatggtatatatgcctaaaccaagtaatttctaagtataatccaaattgatttctaaaccaactaatttctaaatataacacaaagcaggagagtctgggcccctctgtaatgtgatatagaaagttatacttctgatttcccttggatcagggtcctttttgaaaatttggtaccagcaataatagtaaagttttcagataattaaaataaggttatatgttctttctcaaaagaactgtcagcagacacccccacacatttttttgtgtgtagatgaaaaaatttcaaaccagagagacaaatttctcaagactcaagaaaatctagcacaattttagaaaacctacagc

SEQ ID NO: 46240 - DNA, 1289 bp, Bovine  19866881819734
  misc_feature (1)..(1): n is a, c, g, or t
natctctttcttagaggaagtatctctaaccttgtgaagccgaaatctctccctacgacatacctacaaatggccccatgtccaggcatgatgtcacacttcccatcattcaagcagaagttgggctgtaggtcacagagactctgacagggcagatcttccacactcaggtacccagggtagcatctgcactctgcctctccactccagggattgaccaaacactcagaaaattcattgcatgcttgaaacttgcaagggttggcttgatcacctaaaataccaaacaaaccaaagaatggtataaggaaaggcaaaacataggaattggggtataagaagcccctccaataagggtctcccattcaaagtaccatgggacaatccccttcctgaatcactgaaatatatcaccacccacaccacaaaaagtttccgattcgcccttgactgatgatagcttttgtcaaatttctttgaaatgcagagccaaattataggatccagtgacctgggcgagccttgacctgttttatataagaaggatgtagaagatttaaaatctatgtattataggtctaaattaaacagttttcacgtaccattcatttccaccaagcctattctgctgtcgtggtcctctactccgcacatcaggctgcataccctactcctaccctcacctcactgagaacatggcatggagagacagagtatagagaagaactggtggaagcctcagggatgagtacagccacaaaagagcagtctaagaacatttgagatttgtgaaagttaatatcatgaaaacatatcagccccacaccacctcaacagtattttggctttagtaattccaatttcaattcatgggatgagagaaagtaacatttaaaaaaattatttaggacaaaaaccagtcaaaaatgatataaaaactgaccatagatgggccttccatcctatcatggtaaaactgcatattcttcagtggtgaatggcaatctctgaattacaaaaaggcaaatggtaaagaagataccacaaatagaagaaatcactggaaatgacccatgaactcatctatatgaaaaagcataaggtttagctagaagatgaagggaaggttgaaaaacagaaagcatagtctctcagtttccaggtaaattaatgttgctttgagaatcaataacttccttgctgctgtgaaaattcaagacattttgcatgaatctgtgaccttggaatatgtagattctctgcagctaatctttcttggccttatgtag

SEQ ID NO: 46241 - DNA, 1133 bp, Bovine  19866881939735
  misc_feature (1)..(1): n is a, c, g, or t
natgaaaatgtattagtatattttcattaaatactattctgtgaaatattatttttttaagtttattttctaatggaatatttccaaaatcatccaagatgatgggtttatagcacttgaagtataggttttccttttgtagttttagacactgaaatgtctaaatattgatttgatgatcattttgtttctttatttttccagctcccagtaaaacacaatttatttctttgaaacctaaagtccctctcagtccagaagtgacagacagcaaacctggtaattaccctgagctttgtgttgatattatttcaaatgtagggttgaaaaaattttttatgccactctttggaacaaaacttttgattcacactttggtatttgattcatctttccatggaaagagcaaaaatgtgatgaaatgatgtcattagagccagctcctctgatattatcatagcatctctttgagctgtgtggtgtttgattatgtgcatgaccatcacagagaaagcacagaaagagagtggacggaatgattgagaactcctttgtctaggactgtgaaatagtttccaataccaaagttgcttggagttcagatcagccgcctttcagctgagaagtggagaagcctttccatcccctcagaactctgccttgtttggggccttctcagctctcagggtgcatgactagtaaggattgtagtctcctaatgttccacgacttctttctaaactggggctgatttctgaacactgacttttgtttacttctcaggagacattaatttgctgaagaaaagtaggtgttttgttttgttttgttttcagcaaggggttattctatgtatataattaaaaacagataatttcttgcataaggattgcaggacatgttaaataattaaatctttctttttctctatctatacagaatctatacaatagtctgaaatgttgatttatgagagtataaggggaactttgtcacaactcattattgtcataaaaaatttaatgcctgagctttgggaagaatatatttctcactgtaatatggatttttcattaatgtgcatttacagagtaggattattaaagcaaaagattgcttaagtgggcatgatt

SEQ ID NO: 46242 - DNA, 916 bp, Bovine  19866882151033
  misc_feature (1)..(1): n is a, c, g, or t
nagggaggaaggaaggaagaagaagaagaagaagaagaaaaaaaaaagccatacattacattaaaaaaaaactttaatggccatttaaaaaagaggtctaatttttataagagactgtagctttctggatggtacaggagagagctacagaaaacaacagacttttcaaaaaaaggtggaagttgtggctactacatgaactgctctgaataaatcagacgtatatttctaaggagtatggagacatttgctaacatttctaagggaggaggaagacatttgctaataacgatacaggaatcactgggtaggaaatatgatacaacacagaactatatcctggctacatatcacactgaatgggaggtatcatgaggaaaaaaaactaatcgtgaaataatttccattctttcttgaagcctaagtatacacatgaacacacacacacacacaccccagcagagcaacaacagaaaaaccaagtttcctacctctctggaaaggtcactgttctcatacatttgtctgatctcttccctgctcagaccagcaatcatctctctgtctgtggagctgtagaagggccgctgaggataggggccctcatactgctcgaggtcggcctcgtaactttcaaacacggggttgtgcttcacggctctttctacggatgagaggccatcacgctgcctgctggagccacaaaaagaaaagtataattgactcaggttcttttctggatgctcagctattcaggagactatttacctggagcaaaattcctgttgaggaagaaaaagagactaattggatacaaatgggagggggagtgactgtggaaaagatccagatcaatctcaaatattatttaccaacttgttatcactataatttcctcaactacttgataagtgcc

SEQ ID NO: 46243 - DNA, 2099 bp, Bovine  19866880642890
  misc_feature (1)..(1): n is a, c, g, or t
ntgttgggttgggggtagtgcggtttaatgggaactagtcaattctcctgttcctttatgactggccctttttattgcttctttggcctatggagctaaaagcctgggagcagcagggaagtgcgtctgaaattctactgagtgaaaaatctttcgtggtgtgtggattaaccttcacggggtatctgttagtagctgatgatttccttgcctgtgaatatagctgctataactcgatgtttagagcttgtgctgtggataaaggcccattttcttttttagctacgaccctcaggtgccttttcatatattcattgcaggcagtcttcaagatttttgttgtgagccgcacgattaaatatgactatgaaaagaatacaggttttctcctctctcttctacattcactgagcagtgaactgctctcttttaaagaaatttggtgaagaagttgcattaaaatctttagcttacagtatgttgtcttccctgcccgtgtcctgcagcctgcctatagcaagtgaatccctcataggccattttaaatttgggggttttgtgatctaggtaggtatagttttttcaaagtcagtctcatacaggctttttccagctaccttcaacaggattctggaatggtcctgaaaaaaatggctatttttaaacactaaagcgttttgctcaatggttgtgtgttcttttctcccactgaggcctgggtatatgtgccctgtagtattttcattgggtctgtgtatctgtgagctattttttccttcagtttttccctcctttctttctctttctgctcttatggctgaaggaggttgttgatcagctttcttcaatatctgaaaagattttaaagaagaaagtactgaaaataaacatgtagtttccataatataaaggacttccctgtagctcaaatgataaagaatcagcctgcaatgcaagagaccaggattcgatccctaggttgggaagatcctctggagaagggagtggcaagttactccaatattcttgcctggagaatcccatggacagaggagcctgtgggctacagtctgtggggttgcaaattgtcggacatgactgagagactaacacacccatttccataatataacctcaatagcattgcaagggagatgggtttggagtgggctttttgggttttacttcatgtttttatagaaatacatactcctttgcaataagaacgtattacttgtaatatttttatttttagcaaatcaagctttataagattgaaagatggagtaatgttttctctctttctctttattaagcaaatactgtaatcaccaagttataagataaaatggcaatgtggatatttatcagaatcaagttaaaacttttgagaagcagagtgtttcttcctgcctgctgtattccttcacttctctgaagtcattcttgtgttctctggttcctcctgttcccagcagtgtgtttacacacctaccttggcgcgtgctgccgccctcctcatacctggaggaaatttccctaaggtcagcagccctcacctctgctttgtccgctgtgccttctcagtcagaggactttgcctttgtgtttatttcttccctacgcagccctgagtatgtgtatgtgtgtgtctctgcactcggtcgtctagtcagcagctataggctacccactgccgcattcttgggcttccctggtggctcagacaggaaagaatccgcctgcaatgcaagagacctgggtttgattgctgggttgggaagatcccctggaggaaagcatggcaacccactctaatgttcttgcttggagaatcccacgaacagaggagcctggtgggctacagtccatggggtcacaaacagtgggccacgactgagcaactaaacccagcacactcattaacactggccctgtcccacaagctcttgtctcctggttgccctgccaattcagacttagttccttccttccttttttttaaatgtctattttaaaattgtggtaaaaatcacaaaatataaaatactattttagccatatttaattggtgccagttcagtggcactaagcccatt

SEQ ID NO: 46244 - DNA, 1273 bp, Bovine  19866880647460
  misc_feature (1)..(1): n is a, c, g, or t
ntgaagatccttttctggtacccgaggaaattgccatagaaggagggggacttgcgaggctggactcagggtggtgcagagagggcattgctctgagtgttagcatcactgctggggcagcatggggagggtctgaggtccactcttcatgaggaacacccaccaggtgcccaggggctgagttcccttcatcctgtcccagaaggaggtgtccgctcttatctccgacctcatagtgccccgagcccgtgcccctcacctttcccatgtatatgctcagaaaagaatatgatgaattcatttacactcgtgagggctacggaggattcatccgtgcccttcataggcaaggttgccagagagaatacaggacactcggttaaatctgaatttcaaatcaacaatgaataatttttagtttaagtatgagaatattacatgggacatcctaagactaaagtgatgaataatctttaatgtatacgtgccccagttattgcacgggacatacttaaaaaaaaaataggttgtttatctgaaatgatgatttaaccagtgccctgtatttttatctgccaaatctggcagctctatcccagtcaacaaagaaagtacttctcatcaacactccaataaatatccacgtacaggagaaagaaatccacggggctgcagagaaaagcaggaatatctaaacaggcaggaacatggcaaattaagctcctcttcctgcctcaaacagcttgaaggtcatggtgatgacagcccttgagaaactcaacccaaacactcctttttttccagaccaaatcctagtaagttgcaggaaatctcggcttcttttacggttctacccaaagacaccatcttgaatgtagctggcgacgccagggacgtggtttgggatgcggcccagtgcagtttttcccagagctattataaggaagtagtcatgaaacaaaacgaatctgtgtggttgaaaactgcagtgctgacccaaaatatttctaatgtgtggaaccagctggcaagctgagagcctgagaaaacacaaagagctgtctggccgctccgagatgcccagcgcctccaagggtggcttttgctccacgctattagctgtgttccaacaggcagggagccaaggcgggcaactccgggggagatgtattggcagacacaattcggccttgacagcttcatttggaggacaaggaagagtgagagggagggagcactaggggagcagaggccccggcctgcctccaggggg

SEQ ID NO: 46245 - DNA, 1507 bp, Bovine  19866880760506
  misc_feature (1)..(1): n is a, c, g, or t
naccttctcctctgactttattaaaaagctaatttctacaaaagagcagggtacttgagaatgccaaaatgacaataaatattaagaaatcataattatggaaggaagtacatgggagctattctcttttgacatgttatatgacacagttccaaaattatgccaaagaatcattataatgaagcctttccttaggattgacctcagtttataaagagcttctgtcattcaaattgtatcagttaactttgaactgaatttaaagtttaacactgacaaacactatgtttttgatgtacttccttaaaaatgttaaatgcaacaataataattagaaaaaatagtatctgttaactagaatgaaagcttgtccaacttcaatcattaaagcatctatatttagtacttaatccaatgagcattctttgtcactgttgtttagagtgaacacagtttttttttatatatataaaatatttgtaagtattggcagaatgcacaggcagtttctgccttttgccatataatctcatatttaataaatgaaaatcaagccagattctatgaggctccatatcaattatataactcaaggtcagaaaaatgtttaaaagaaaaccattatttctattttatgttgagtgagcataatctttctaaattagcttctgtaacatatgtaattagcttctgtaatacatgtaatcatttatttttaaataccatcaaaataaactattcatttctgtattcaaaagagtgattcctttaatggcaaataaaatttcacttcatttaaaaagttcatactagagcataaggtggtaatataacaattgtatattaaacgatgaatatgcctatatcagagtaaaaaggcagaggtacttatgaactaacacctcggtgacaatggaaaatattcttcctctgttgagagaccccaagcagaattttatgttgtatacaactctatttgtgctccttgatatgcttttgcttaaaaaccaagtcctgtcatttacctgatattcctgtattaacaggaggagacaggtttaagctgatatgattctgtatttgcaaggggcttcaaaactggagtgagactgtcaattcctgatcaggtcaaccaagtatttggaggttaaaaaagccagtcaccagaaagaaggcttttgtggttcacataaagtccaatgaaagagtatgatttaggaaggaaataggaatctcagagtttacagcactggaaatcctacaccagatgaaaagaattgaatggtctcagtgtcaggatagggaaaagtttctagtaaaaatctgccaccaatggccacgtgacctgcagcaatcactcaacctctcttgggttcctttccaactaaccgtgggagatggttgacctcataaaaggagaaacattctttataatgacaccattttgagggacatgatttaaaaacacataaaaatgctcagctagaagggatgattaacggcagtg

SEQ ID NO: 46246 - DNA, 2020 bp, Bovine  19866880764426
  misc_feature (1)..(1): n is a, c, g, or t
nctcctaatgactgaaaacactgtgctcttattacccagtttaacagctgcaggtgacaggatggcatgtgacacgccaccagccaatgaaaaccttaacgctcagtctcaaagtcgagcttgtgttttaggataaaggggtccagccaggtctatggaggcccctgccctccaagacgtcaaatcaactttgggaggcaaaccacaggtttgtggaaagttcactaacaattcctaggtatcaaaattaactgccaatcaagtggtacaggaattacaaaaacaaatagcagaaacaaagaacacttcacaaaggaattatgtcccctcaagtgggggacatcttcagacaaaggcgaggaggccaagatgtgcatggcatgattggacagtggggagtaaagcccagacacgacacacacacaccccctcagcaccttgtattcgactcctctcttcacaggcccgggatgcggggagctgagccacacacacaggaactctgggggccaggctgcagaagaggctctctaaacctgagtgggaatcactgacactcaagcccccaacccaaacatcatctccagcttcgtgtttgctctaaacaactatttaagcaagctgtcatccacagaagctgcacgtgtgaacccagttcgagatccaacaagcattttgaaagaccccaaatcacactggttaaaattccaaaactgtaaggattgtgggattatcttgggtaatcttacattctccaacccctcatctctcctctttttaaaatgaaatcctatatgggcttaacagtaaaagtccttcagacaccccctctcagccctgcagcagcacttcctgtttatcaaaagactaacgtgaaaagcaggtcaacaaaactccacaaggaaaacagaaaacccatctgacatgtgctgtgtgagccagagaagcacccccacctttcagtcgccagccccacataccggcggcatcaggcgtgtccagcccagccctctgaccacctcccaccaccatgacagggctctgttcacatcacagcagagcctggactagcacacaggagactcaagcagcataacatcaaacatatccaagcatctgaacaccagagcccattcttaactaaaaatctcccgacaaacaagaggcaaagtccatttggaccaggtgagtgtttgttttgacacaaagcctctctggggcccagctcacagtcacatgacattcctgcaaaaacctgcctccattctggatggaaccccacaccagggtactggcaccaaaatttcagtttatgatgcaagatatgtgggaaacaattgctcccacgggtaaatataaaccaagcgtagactactgacactcgtttttctttttttccccttactttttgggaaaaaaaagtgcctttgaattgatgccattttgtaccttgtcaagaattcttctcaacgcacctaaaataatacctatatatacacatataaatgccactagagtcctaaaaatgtgccgttatttaggaaagcaaaatccattgtaatttaaataagataatttgcctttaaggactgtcactgtcatttaatgagaagtcacaatgttatgaactaagaaagaatttttcagactgatttgagggcacttgacacagtgttgagccccatcacagcagaagggcaatggaagtaccttgagaagggcgatgcattaattctgaatctacagcaaatattcaagcccccttgacaaagcttatgcaaagtaatacgatattgaagcaaacttgactaggttacatataaatcctaagcaaggtccactcttcacaaagaccagtgacaaccaagtgaaatcaattccagggctgaggagactgcattctaaaaataacaatctaaccttcaaattagggttctttctatcctgtatctccatgctggctttgaaaacagtcaaacaactgtggaaagaatacagtgtaaaattaagcccatgtgaa

SEQ ID NO: 46247 - DNA, 1580 bp, Bovine  19866880826908
  misc_feature (1)..(1): n is a, c, g, or t
naactgttagtctgaaatcttgttccacccttgcgcatcctctctgccgctgaagagctgctctgattggttggttccctgaaggccattggaagggtctggggataaaggagaagacaggaaaaagggaaaagaatccacttggtgtgagccataataaagtaagagtatttggggagagtcctgagtgttaatctagttcctttgttgggagaagtgaatagagctctgtagatatggggaaggaaggccagtttctcattgttagaaaaatttctaatacagtgacctgagtttattctagtcaaatatttctgaaccagcaaatgtacttgtttggctctgtagtttcagttattaactgaaggacttcatgattacatgtaagaactgcatgaaaaacacgttgaaagttgttcagtcactttgccttgtgttcaaggaagatggcatttatttaccccagaggaacaaaaattaacatgtattgtcattccagaggagatttggctttagtctcatattcgtcagccaccaaagtatgtaccagaagatgtagcttagtttttgtgttgggtgcacatttgtgttgggttcatgattttatgggaggggtcttgcatggtttggagacaactgtaggcttgactacgtatgtgtgtgtaaaaagttgcagatcatgtcctttcaatttttttgatattctatcgagtaaaattcaggcttcatggatttgtatggacaaaaaatattttggtatatggacatgtcgtaatcaataactaaggaatgtcagattttctatttttatatggaatcagccgaaagaattttgggaactcaaatagctacagtagtgaatatcggagattcttcactgccagtcagcagtaaaggctgtgatgtgatgaaaaaaaaaataagatttgctgatcagacagggtaaagttaacatgggaaaactagttcacctggttggaaggaagagagcaattgaaggataattgctttacagaattttgttgttttctgtcaaacctcaacatgaatcagccataggtatacatatatcccctcccttttgaagctccctcccatctcccgccccatcccacccctctaggttgatacagagcccctgtttgagtttcctgagccatacagcaaattcctgtgggctatctattttacatatggtaatgtaagttttcccgttgctctttccatacatctcaccctctcctcccctctcgacatgaccataagtctattctctctgtctgtttctccattgctgccctgaaaaattcttcagtaccatttttctagattccatgtatgtgcgttagaatatggtatttctctttctgacttacgtcagttcagttcagttcagtcgctcagtcgtgtccaactttttgcgaccccatgaatcgcagcacgccaggcctccctgtccatcaccaactcccggagttcatcactctgtataataggttctaggttcatccacctcatcagaactgactcaaatggggttcctttttatggctgagtaatgtttccattgtgtgtatgta

SEQ ID NO: 46248 - DNA, 1318 bp, Bovine  19866880843196
  misc_feature (1)..(1): n is a, c, g, or t
ntgtcccgtgggaggcttctgtagttttcatctttctattcaaaagaaacaaaaaggtgtcttgtaaaaaaccagactttgcaaattaatgatgcacctggtttttctaaagtagcagaaaaaaaaaatgattctacatatttaaaatgttttcccctagtcgatatcaaagagctgattgaggtcacttcctccaggttagacctcagaaatgcagtcacctgcctgggaaagggagtctgatggctgtggccacacaggtaggagcacagtagacagaacaacacactctaccctcctctggggtcaacctctgcagggaaatacttctatactagactttcatcatcactcaatcatggcatttctcttttcttcttctttccaatcttagaataatgttgtaagatgttttctataatttaccaaaaacatttagaacagaagatgaatgaatttgctctttatttagatcctcatagtttcaggaatttgggtaagagattgaagactctgggctcttcagttacctccttcacaagctagttgtaaacattaattcaaatagtgagagaagaaaaaaattagcctatcccaacacatggtacataatcagatcagatcagatcagtcgctcagtcgtgtccgactctttgcgaccccatgaatcgcagacacattatttgttcaccccaacatacttgagatgagatgtctttgattgataaatatttatttaatataccccagagcagccaaggtatttctttcaaataataatttataacaacttgctttggctttagagctttggcttaatctcaatgttctgaaaagatatgagaaggctaggataaggtaggaaaattgagcatttcagttcaatagctaaatctaagtatcttctaaaagaacaaatttaaaatgttagcctcacttcagctaacttacatcagtgccccacattaaatacccaaatattttccttaaaaactttgttgagggtagtctggctgtaaaaatcttcatacacatgattgattcttattcttcattacttaaaccacattagcaacaaacacacacatagaaacaaaaagtgtaacataataggattgattgtatagaccttggaataaaccaggatactgttttctgttccatcagaggataaaacttaaaaatgaactggtcatcctgaacctaggccaatattgtgacttttgaaaaacaatttaatctataattataattacagtataaactgtagcgtgaaatagctacagtataaactgtagcgtgaaactttttaactttt

SEQ ID NO: 46249 - DNA, 1271 bp, Bovine  19866880847914
  misc_feature (1)..(1): n is a, c, g, or t
ntttcgtaagaaaaaaaaaaacagaagaatggcctccaagcctttacatctatgtccccctcggccatgtcctatctgaactcagcacccttcgatctagtcaccctgctttccagctgttcctcatgcactgtgtcctcctctcttgcaggaggccttccctgaccaccctactggggttgcacccttccttccccccacactccccctccattcgccggctctgatttatccacagcactgtcaccatctaacactgctacggttcacttggttattgcccgtcctccgccactaggctgtgtcccgggagagtaggaattgttttctctgttgtgcatcactgtggccccagactgagaccaggcctgctctagagtggcacccactccataaagatttgttgaatagctgcactgatgaatgaatatctgtttctttacctttttttccagaaaactcaatcttttgaaataaagcagtctttaacattggtttacataaccacctttaagaaagatttttgccctttagagagtaattaactgcacagctcatgagctaggtgaacccaggcagccggagccacagggccaccttgcagccacatactcttcattgcagggaaatcctgtaaagaaaaagaaatgtcttgaaagcggtgtttgtaaacctgaaagaaaaataacattctagcagtattctttaaaaagtaaaggttgggaatttttaaggatgcttttaaaggcaaattactcggggtgcttggttcatttagaagagacctcatcctttctaccatccatctggcaccagaaaagccatcattcttggggacatggggagtttccattcttccagggttgggatgatccttggagaaacagtatgtggactccttgggacttactggcaggaaaaaaggaaaattatctggaacaacagtggttccagtgtcctgccagggtccacgtggatctgctaatagcccctgcccaggatgcaagtcacaggcagcctgacctgggccttcatcctccaccaagccctctccggccccaggagggagcctgccacttgtgatgcagccaagaactgctactggcaccccgtgttctgatggcttttgcagagactgctgacatgtttttcagaatgtcagaatctcctcttccagggaaagccttctacagaacagatttaaaatcatatcaagtcataaaaaatattctttctgacaaagaggcaggaggagccaggggctgcctgac

SEQ ID NO: 46250 - DNA, 1524 bp, Bovine  19866880902035
  misc_feature (1)..(1): n is a, c, g, or t
ntatatatatgtatacattatcaccctgtttatctcacaagcatctcctctgattaaaaatagacattctacagatcagggtcagcaaacatttttctaaaaatgtacagagactaaatatttttggagctgtgcaagtcatatagtctctgtcacaacattctactttgcattctatcatgaaaatagccattcacaaaacataaataaatgacagtgactgtgtttaaataaaattttatttacaaagcagataatgaaccaaacttaacccatgggccatagtttgatgattctgcactagattgctcatccctctcataacatccaatttaaaaatttccgtgtgggaaataaaactaaaagtcaaggttccttggtaaccctgctaagctacgaatattcatttcaagctcttcatcgggattttgaatttctgtacttgattttaatttcatcagacttcttacaaggtgtgtggcttcatatgcattttgaagatattaagttttgacattttggcgcttaattggaagcaaatgaaattcaagttttgttattaacttttcacaatgatgtgttctcctaagaataaagtcctttctgcaaacggaaaatggagattgaaaattacagagaacaagtccttaaatgccacacatgatggaagaacttacacacgtatattagtttcaataattatctccagcatttttagaaaacacaagtattataaaatctggactgtgtcatgaacaaatgctgtttgaatttcagtggcagaatcacagttggtgatttgcaatatgccaaaaacatacaattctacagctctcttttaaaccgaaatttaaatgccaggtgcagatataaagtaattttgtgttaaattgggaaggatatataattttagaaaatctactctacaagaatacacagtagcacagcaaaagaaaacaagaccttcacagaaacatcacatattaaaaaactctatcgtgcccttcaaaaaataaaggaaacgtcttgctcttcaatttgtgaaacatgactcaaacccatattttaacagatggaaccttcactgctgcccatgaagtagactgtttttgaaagttcatttttaatttcgacagttattatttcatcactcttgtgatccattcacccaaaaagtatccacaagaaaagagagaatttaggataacagccatgacgaaagtgaaagtgacggatgctcagtcatgtccgactctgcgaccctgtggactgtagcccaacgggcttctctgtccctggaaacacctaagatgacccacctataaataaaactccgaacttggccacatatttccacctcccttggaacaagtcatttcagctgcctgagacaccagaaccttacagcagaaaacccatgtcataaacattgcatgcaaatgcatatgtaaaccacttgaggatcgagggtggcctcttttagaataaaaaactgcaggagcaaagggataaggacatagaacc

SEQ ID NO: 46251 - DNA, 1394 bp, Bovine  19866880918818
  misc_feature (1)..(1): n is a, c, g, or t
natgctgcatgtgggatcttagttcctcagccaaggatcaaacctgcgtctcctgtatccactggaccaccagggaaatccctatacttgtctaacatcatgacttctgaggcagtcgaatcctattttttctcctctatcccttaaaatagacaaaagtatttgatattattgagtcagtgggcagcacagaaatgaggatgtgcctagtaattatatacatcaattacatgcctagtaattatatacatcaataagcaaaaggaccatccctcctagggatgaccatggaaggctttagtgacaattaacacaaaccatgtgaagcattatagccgaattttcttactgccctttctctggggtcttttatgaatctgtcagcaaaatgatatttcattgttgtggctttgagctacactcaagtccacgtgataatagcttatctttgaatgagttttttggttcagcatagagaaagaactgccatataaaggagaaacccaccacttgaaatcctcagatgctgtcacatttactgctgcattttatgtctttttctgaatgtgaaagtgatgacaaagtaaggattaaatatttgtaatattcatcataggtacaaaagcctttaagtcgacactgtgatgaggaattatgaaggcagtcataggaatagatctgtttggggccttaagaagctctgtactggtgaaaataaatgaataacgaacagggccggagtgtggcattaatatccctaaggggattcataaaatggtgaggacttgtatgattttgctgtggggaatgtgcaggagttggaaaagaatatgaatgaagggttatccaaacaagaatggcagctgttctgaatcacagcagaaaatgtaagcttttccagtctgacaatatctccctaatccttgatgaaaatgttatgaaaacaaaagggcaataaggcaggattaataactggaattttaataacgctgggggggcgaccaggatatggttacattctttaaagaatcagctgtcagtcctgcagacaaagttgcgaagtatgctagtgtattgtttcctgagtctgaaattagtttactaggtatattgatagggcagaattaattatgttatggtttaagaatatttagttattttaagatgcttattaactcacagacttatttgacatattcaattgtgtatgtttacagttcgctgcacaattgtggaaggttaaatatgtcaaatggctaaactttgcatttcttcactgacagaatatccttttattcaatccatgaattgatttaggaaacataacagacaatgtttgtaaggtgaaaaaggcaaaaacagcatattctaatattagtgacaatgtaatttca

SEQ ID NO: 46252 - DNA, 1592 bp, Bovine  19866881018443
  misc_feature (1)..(1): n is a, c, g, or t
ngagttcagtgtcgtaaggaagaaatgcgttactgaagtaatgtgtcagtaaatataaaattacactaatgtgccacaaagaaaagggatatggtacaatgagagtgtacacaggtcttgactcagggggtgttagggaaagctttcttgagcaggtgttctttcagctaagagccagaagttgcggagggattaaatggaagcttgagggcgtgtatgaataaattaattagtttgtgatttgatttagtatgttattaggtttggctgtatctgtacccttcaccgtttaaattccttcatagcctcaacgttaagactattcccacagtttgcatgaaaaggtatttttgtgcattgcatcagagttgaacgaagtgctcctggtgagaagagcatttttatcatccgcctctctcccacaggtgattagccagtcaagagctcggtttaaccctagtatcagcatgattaagaagtgtattgaagtcctgatagacaaacagtacatcgaacgcagccaggcgtccgcagatgagtacagctacgtcgcctgacgcggcgtcctccagcgttggtgtgagaggtcgttgccgtcagcgtccggtgtgtccccgtgggagaaggcaggcctgtgcctccataatttggtcatttggcagcccctgtttctctgctgtttacaacatcaccagtgccacgtcatgagcgtcagagaagatgcctagagatatttcaagctcatgtcattatgacatttcttaaaactttattaaaaaaaaggatgagtgaagtattgctgaaatgtggaaatccggctgggtaccatgctttttctccccttcacgtttgcagttgatgtgtttgtttttttttttttaatgtatcttaaaggacataagattaaaaaaaaaaaaaacctaaatattgtaatatgacagataacctaataattgtatctacattaaaatgacaaacatgatattgctgcttgtcaaataaaaaaataaagaaatagaatgccttttttatgtggatggagtatcacaatgctcagaaatgtccgtgagtcctcgtgttcctgtttaaatcctacatgaaaacgtctcagttattgtttctgaatgccttcagcgtaaaggatgcgttcagcataagtgatgctttctttttatggattagaactacattggatgtgaggctcgtgaggagtgaggctgtgattctgttcgagtttctggtggtgtcctgctgcagcgcagaaccatgagcgaggggactgaggggaccccgcgtctggcttagaaagcgccgtcattcccaggctgtgttactcctgtctccgaggtgcatcagttctaatgaggtctgacgcccctctgctccttccctcccgcttcctcggggtcggaggtcatcctgcggtaccggtaccggtgtctgcctgtgcgttccccccgtacccctgcctgcctgttactctccacctccttccactttaacactagattcgctcctacatcacagatactcttagcaatgcataacctaaatactttttttttctgtatagtgcagtacaccaggtgccg

SEQ ID NO: 46253 - DNA, 644 bp, Bovine  19866881019644
  misc_feature (1)..(1): n is a, c, g, or t
naatttaaagtgaaaataaattaaaagaatcctgaacctgataggggtaaattatctcatgatttttattaatatggatcaagccaccctagttgagatttaatcttttataattaaaaatttattactttataattaaaataatccagaggactgctggtaccagtgccccagtccctgcagtgagccactgctgacccacgcctctagaggagaccctccaacactagtagatttcaacactaaacttgcacaatggctttgaaaccaagagtcgtagattttgaggaatcctgaaacaaactctttacaataatcaaaattgtagtcatgttggagtacggaaagagagcaacgtggaacaatctcttctcgtatccttcaatggcactgacacctccatccatcagagagataggttcataagcttgttggaaaatgagaacaggtttaaggttttctaagtggaagaaaattccagtgtgacactttgcaaatatattattgttcacatttctaagttcattgtccatatgtagcagtcaaaaatctttgctaaccttttatgcaataaacacgtttactgagcacttaaataattattcctttaagggccaccttacctttaatttaaattgaaaaat

SEQ ID NO: 46254 - DNA, 2049 bp, Bovine  19866881019700
  misc_feature (1)..(1): n is a, c, g, or t
ntgagagatgttccgaaacacacatccttcagaaagtatccaaataaatatcacatatttgagctgggtctgaactgtatgaaggaagttgttctgaagaacttcttctgtaatgttaaaagcacaattcttcccctagtagtggtgtggatattaccactgcttcttaatggagctcaaaaataaccattctacaaaagaccactggagggcacacataacccagggcccttgtccaaaaataaatgatgaagtaaaaagaaaatcacattctatgtgagatgttagttgactttttattcaattattactgttctttggtaactgaaagggagctccaaaaatattaacattaagaggaggaatcttttcaatcctaatagacaatactattttaaaaattctatgtactattctatgtactattttgggcttccctggaatccgcctacaatgcaagagacctgggtttgatccctggattgggaagatcccctataggaggtcatggcaacccactccggtattcttgcctggagaatccccatggacagaggagcttggctgactacagttcatggggtcacaaagaggtggacatgactgagcgactaagcacagcacagcacacagcacacatgtattcttttaacagctgttaagttacagtataacacatagatagtaaaactaaacaagaaagcacacagccagaatcgcttcctatcattttttatattcccaaggagtagcctccaattatttttttaatataaaaaatattcttttaatttaagtttaattccatatagtcctatagaacaatattcctatgaaagtatataaacactaatttgcattcagtgtaatattttgtttatgcacaaaagtcaactaatcctttcagtgagatgttttggtactatgagagtcttcattgaaacaaacttttaggagaagaattcatattaggaatcagaatcttctgataccatgacaactttgtgttgtaacagtgaataatttaaacccatgtaataaatgaacacacacaaataatacacatccattaactgatggatggcgcagaaaatagcaatgtttttgaaaccttgaaagaattttcaaattaaattttcaaatcaaattttcaaagcttttctcaaaagtttcaactactttcgactccaaaggaaacttgaagagatcagaaatttctgtaccaacctgccttttgctgatttctgaagtggctcttttaaggttcaatgaccttgaaaatctcagggccttcactgaatctttccgagaggttccagaaaaggagtaatatctctttgcaggtttccttgtcaatctgtctgccatctcagtccatcagaaggcaaaaatccacagtgactcaggttccaaaactaactacaggaaaaaacaaaaatgatcccccaaacccagatataagccctgtgtttcgctcagtcctctagaaagggcaacaaatgagagacaggtgggaaacacaggaaagaaccctttccatatatgtaagcccccaggaagacgagagctttgcatagggcagggagaccaagcacacggcttcctctgcaccagacgaaaacaccctccaccagttaaacagtccagaagtacttgtcaggagtgacacagggtgtaacaacacacctaggagtcagcaaggtgtgagtaaacacagcaggttcagagaagtctctttaactcattccttgccaaaacagacagctggtgccaggataggacggagccccaacccctacttcaaaggcagagccctcttaattagcaaacactgttttctaaactcctcgaacattctcttcttccaatgaatgagaactgaagagatccaatgctcaaatacttttacccagaaaagtataggacaaaagagtcacaggagaaatgaacaggagtctggaatacctgtcctctgccccagaaaggagaggagggtgttttacatcctttccaaaggcagcatcataccttcagcttgtctcaagtcca

SEQ ID NO: 46255 - DNA, 1046 bp, Bovine  19866881096935
  misc_feature (1)..(1): n is a, c, g, or t
nccgggtcccttcaaccaaggggtatatgttaaaggagactagagatgaaggtatgattttattatttatattttcgtattgaaatgtgcacagtaatgtttttcgcttagtgctttattggcttctctggtagctcagctggtaaagaatccacctgcaatgcaggagaccctggttctattcctaggtcaggaagatctgctggagaaggaataggttacccactccaagattcttgggcttcccttgtggctcagttgataaagaatctaccttcaatgcgggagacctgggttcgatccctgggttgggaagatcccctggtaaagggagcagctacccagttcagtattctggcctggagaactctggacagagggaggagcccgcaggctacagtccatggtatcacaaggagtctgacatgactgagcaactttcacttgtatttataaagttcaaattgatatcattcaaaacagtaatttctgaatttatgcaaaaagtcagatttgcaggactgcggtttggccgtgaaaaccacagaccgagttgtaagtgaaaagggctggtctgatatttgcataatctttattaggagcttttattttgcgttttcttatctataaaatgagtaaatatactctgtgggctctaatgtctttttctaacatgaattttctttttgcttttttattgtagtgatagccaagtaagttaggttgtcgtagctgaaaataatttgattccttttttcttttttacagtttgaattattttacagccagcatttcagtggaaggaaacttacatggttacactatctttgtacaggtaaaatgcatttaattatatctagtttaatgaaatttacctgataatgattatgttaaaattttggacagagatttcttagagcctaattatagttgtctttttttttcttttctaattatagtttttaaccttttcttcttcatctacctttctggttacccttaaagcaacaataaagaagtccacatgcagcacttttaatagtgtg

SEQ ID NO: 46256 - DNA, 1626 bp, Bovine  19866881134463
  misc_feature (1)..(1): n is a, c, g, or t
ngctacaacattttgataggctctcatcagctcatgtgttccttgcctccagcccagacctctgaatgcatgaatgcatcctctgcatatcactcacaacacctttactaaagtacatgtcagacgtcacaactcggagaggttgatccggtggggtcacaagacatcagattaagccctggcacctctccacccaatgctgagatccagttggagtgctctgaagtgaccagaggccacagacccctccatcccttcttgtccattgtcttgaccactctaagagcctggagggcacctccttctctaagaagtccctaggttctgaaagcatagtgaatccatgccttgtgttaatttcactgattagaaccagtgctctcttacccctctcccttgttaatctcagaggttccacccttagatcccagcccagcaaatgtttgctaaaatgttgttgtatgaataaatgtgactacccatctatctccatcctttcacattgactgtctcaagtattataagggcaacctttttagcaaagaaaaaacaattacagatattagatggccagagaagacaaaaaaaaaaaaaaggtggggggtggggggggtggtttctactaggagaagctcaaagaattatgaactgatatattagtgataaactctctcgtccagaatctcatcaacattctactaactatttattattaactttgtactattgttcttcactcagtgtttgctctcctctgagaatatttgagcccgagtaaatctaaattcttcatatataattttatatgtatatctatcaaatcccttatatgacttccactgtaccaatttagttcaaccaccatgtaaattaaattttgaaattatcagcttcacctgacaagttatttgtctttcaaaattgatgttacctattgatggtttcggagatactctctaaatgcgcactgccctttctcctttgacatttgtcttctattattttattaaggattcaagtaactcagtaactgtcaagttaacttttgattagaattattctcccattcctttattattttaacctttatttcataatactctacaaaagtgtaatatttttctcctaaccagggaccagcgtttcacctatttcatgagccaactttctcttctttaagaatgtaatcttttctattatttaaggaaagtacaactttctgttatataaggaaggtcctctatgtaagtagactttataattatttcacgagcacattaaccatcatcagctacttcacaatgacaaggaactccttaagtgttttttttttttaatgtggattatttttaaaatctttattgaatttgttataattttgcttctgttttatgtttttgtttcttggccacaaggcacatgggatcttagctgcccaacaagggatcaaacccataccccctacattggaaggcaaagtcttaaccactggaccatgagggaatttcttagctggaagggccagctaagaagcaaagcccttcttagcgctcaggtggtaaacctccaccagagtcgctacacatcattatgctcatatatagaattcttcatcttgaatttgaa

SEQ ID NO: 46257 - DNA, 1912 bp, Bovine  19866881251737
  misc_feature (1)..(1): n is a, c, g, or t
nttctgtctccttaatataaagacatttaaaaatgtatgaatgtttttatacggttggattcttttagaggggaaaggtttcagctggaaaatgcattgacatggatatcgtcagacattttctcagtacaaataaaaatcatttaatactatgtcagatataaaagacatgcaaatgccaaatcagtgatgatgaccttcactcttgtaaacctgcactgtatttaggtcaatgaaaccaccagtgaatatcgtcagtcagaacttggtgagatctggtttcatgcagtcacatgcacgcacgcacaggtttgtttgcttatgtcagtcatgggacagcagcagctgaatggcagtggtagttaatgtggcattttataaacacataaatgaatcagaaaaaagtaaattattctcaaagagtgaccatctgtaaataatgtcacgtccattgcatgacattattcaatacctatgaataggaaaaaataggacaaaggccactgattgaatgagactagacaaaaaaagtccaaatgggagactggaagagggcctagaaccttcccagcccttgacttcatcttcagccttgggactgaatttgcaaatctcttctctgcctcttccctgtttcagtattatattttcaggataactttttgtgacattccaacctttggaattaaaaggatatttatacttctataacaaaataatcttactttgaaaaaaaaatggatgcagaaagcacagcaaaacttaataaattcacattgagtaggagaaagacctaaccaaattagtggcctgaattatagaatctttaaaaaatttaatagtaatttaattactttcagattcatggagttccttggagaaatcgctttggtaagtagctaagaaaaatttacaaatagcacatcagtgggtaaataaagcaatatttctaaagaatccaccatggactaggatttttaagtggttttgctccctgaagtatatgcacgttatgaatttgccttgcaaaaaaatgattctctatgagacataggagagatattcctgatttttaaattatttgtggtatttggaagtccttcatttactcattcgttcttgcattcactcactaagcaaacgggaggtcattgtactggggacccagtggcgagttcaacgtagcccccgctgtctacatcctgtgggctggagttaaggaagtacattttaatgaataaatatgtagttaccaattatgctaaggatgtaatcacagtgcagaaatactttaggaagaaagagatttctttgacatgatgccatttgggccgaatcccgaaggatagagagaggtcagatgcggagaacagaacaatctgggcagagggagctgcatgagctggtgagaggcagggaaatggtcagtgtgttccagaaactagaaggaagccaaggtgatctgggatgaaattggaaaggtgtgtggaaattgaatctatccaggcaaggcttatgagatgagctttgttcagtgtcatgagggagttattatagagtttttaattattttaacttacttatgtatttattggtcatgccacacaatttgtgggatcttagttcccagaccagggattgaactgagaccctcaacaataagagtgccaagtcctaatggctggaactccaaggaattgcctagtgtttttacctcgtgagcacaatcgggtttataatttttaaatacaccaatggctgctctgtgcaaagtagattatagggtgggtatatcaggtgtcgtcaggaaaacagaaaccacactagacttttcaaacagtaaggggcctgatgacacagggggtacagaggaaaaagacaacacagaagtttctagcgataacaaggtgca

SEQ ID NO: 46258 - DNA, 2023 bp, Bovine  19866881277027
  misc_feature (1)..(1): n is a, c, g, or t
ntttagtgccaaaaccccaagctgcttcagggaaacaagagcctgaaaactagcactacgtcacatggaatcgccgcatacatactgtattgccccgtgctagtctgatatatgctagtcggcactgccatagcagcgatgttaggcggtgttccctcttcctctgatttttcttcttcaatcttgggtacaccaggcacatcagaggaaagttcattcagtatttttctaaaatataattcaacaatacaaagaattaagatacatgagtgagatttaaaacagaaaagctatcacaggagaatctgaggtatctttatttctccctttttggaaaaacttttcatgactgtaggaaacttaacttacctgtaagagggtcttcgtgaaaggatttctctacgtttatgagaatcaattacaccttctgattctgcagactcatctgtttctgcaatggttgctacctataacacaagaattcctgagatgcatcataaaacccatgggatctccttcattcacaacccggtgtctgaaggggctctgcgtgcagcacaaagccggcactgccaacagagcacactgagccgggctagccgtgctcacaacctggctcaggacaggaagtgcagacactgacacttggctgtaaaccagcctgtctgccaaggatgacacagacgacatgtgctacagaaacgcacagtgccagacaggcttcaggaaaacactgaatgtaagacacacaaggcctaagccccagccctgaaaatgtctcacaaatccagcagagggtgagctagcaagtgacagaggagcaaacaccactgctgacttaggctgggtcttcaaattacacattagatagacccagagaagaaagaatattaagtaggtaaacacttgtgttaacaagcctggttaaagttatgatttatattacaacaagtaggttgggcttgatgtcagtaggtcttgtcaaaataaggaattactccttaaaagaaagagcagttttaaatacaatttcattttttgaaggaatagtataataacatgagtattaaagaaaggaaactaaaataataaatctctccacaacatgactgttctcaatatattcagccatctatcacaggttctgagtttacaaaactacctattaatatcatctatcatctagttctgagcttacaaaactcctccaatgaatatgataaggacatgggatttgatctgggtataatcaaaaaatcatattaaaataccaacaatgtaagcaggaacatatacttcccaaggtacatggatgtgcatgtatgtttgcccacacgtatgatcatgcatctttggtcacggataccttatacataagcacactcaggcatgaagagaatctttagagaaactattgttgcagtcagacaaccacacatcatcaccaactatttatcactttccattgggctttcacacatctcttgtataatcataaccacccctttgtgtaaggtaggctattactgtagaaagtgaaaactgaagttcatcactcaccaggttggaattctaagacaagatccacaggcccctacctctgtaaagataattaagtcacccatttaacaaaatccaaaacagcctattgaaaatgagataatactctctcttccagtgccaccgaggttaaagctaagtagaaatatctgcatcctaataaaagtcacaaaaaggagagtggaaagtcttgttttataatcagagtcagaaagagtcagaagctcctagaattaaggtcctcacaagaaaggaaaaaaaaaaaaagacactactgagaatcactcaaacttttgaacaactcggaagagacatctgtgccacaaaaataaacagacttttattgcacatggatttattacttcaagtatcgtggtacaacccttatccttattttgcaacaaactggattcaaatacacaggaaaaggacaagaccaattaagtataagcaactacttttt

SEQ ID NO: 46259 - DNA, 1507 bp, Bovine  19866881487332
  misc_feature (1)..(1): n is a, c, g, or t
ngccgtgtgccctgagaggctgggtttccatttaatgcccaagggagagaggaaaggcacttcaggaagaagggatctggccactagggctcacagagaggcaagaatcaggatgaaagggctgtgagacttattttagaaattgcggaatgacattcagggttttgaataggaaatagtatttggtattctagatttaaagctaatctgggctgactctacagggaaagtgtgaaaggtttctgaaggtttcccttgtattgtcttcatctgaagatactgcaggttgttcacaagggtgaaataagtccttgctctgggttgtgatgctgaagatagctgctgagctttttaaaaatacatggattgtctaataccttaaattttatttcagtttgttatcagttacgaagtctgttttctactgaatcacagttcagttcagttcagtcactaagttgtgtctgactctttgtgaccctgtgaatcacagcacaccaggcccccctgtccatcaccaactccaggagttcacccaaactcacgtgcatcgagtcggtgatgccatccagccatctcatcctctgtcgtccccttctccccctgcccccaatccctcccagcatcagagtcttttccaatgagtcaacttttcacatgaggtggccaaagtattggagtttcagcctcagcatcagtcctttcaatgaacactcaggactggtctcctttaagatggactggttggatctccttgcagtccaagggactctcaagagtcttctccaacaccacagttcaaaagcatcaattctttggctctcagctttcttcacagtccaactctcacatccgtacatgaccaagcagcagacaacttgatcttcttttatctcaacattcaggagtaaatatttcaagagtcaaacagtttctatccccatgaatgacctaaaatcttaagtatttcaagacttttatttttgtaactgaaagtcaccaggtatctgttacattttctgttaatattttaatttgtgctatcactgctgcaatcattttatactgaaaattgtataaaataagcctcttgctctgaagacctctctttctagtaaatattgataagacagtctttgatacaaaatgagctcaagttttttaggccatgtgcaaatcacaaattctggttttaattatatctcaagggaacaacctgaggaaaccaaaagaactgacataattggatcaaattgtgtaatcaaaagcaaatgatgtggttattaatcctaatgaaatgatttcccagcatttaattcatttctctgattccagaaattttagtgataagtgtgttgaaagggatattctgagcaggtactcttcctaaatagtccttttctccacactgttttttggttgaaatatttctgaagtttaaaccttagaacagagagtctattctatatatgaagtcacatgctatacatgaagttttagtcctatt

SEQ ID NO: 46260 - DNA, 911 bp, Bovine  19866881531987
  misc_feature (1)..(1): n is a, c, g, or t
nttatgttttgaaagatactgtacttgctttttttcccccccttaagactttatatctggatctcacgctttctggtgtgtgtgtgtgtgtgtgtatgtgtgtttggtttggtttttaaaatctttggagtttatgatgatgctggtaaagtcaaaattgatactgtgctaggctcagtttcttaattgctttactatttcctggtctgtatccttccaggactcctgcagtgtcgggttactaggcatatctgggcatccttgatttgataacacaagccccacaggggaaacgtgcttgtaaggacacttagtgggagtcccaagaagggcacgttgtccattaagggaccatctcatttctgaaggctgttctagcttggttgagtaaaagctatgttttctttaaaaaaaaaaaaaagtcacctatttttttcctggatgccatgcaacacaaatttcgtttattaaatctaatcagactagcgctgatgaaaaccgtacacaatcaaataatgatcctcaagtttgtgaatttccttttaaagagaaccgccgctacactgcactggcttaaaacagcatcctatttgacaaaagcactatcgagttgtcatgtacactttccagggctgcttctcatcatggttgattaccaagatgttttttgcctaaatgggagctttttctgcttttcctaatcagatctgtcttccctgattcatctagcatcaccacaaaccactgctgagcaaatcagtacatgatcatggtagcaatttctttaaatgtcactaaaatatgaaagatcctgtattggaaagatacattggaaagttggaaaggatttttttttctcattgataaaatggaggctgaggcaaaaaaaaaaaaaaaaatagggccagaca

SEQ ID NO: 46261 - DNA, 1122 bp, Bovine  19866881722494
  misc_feature (1)..(1): n is a, c, g, or t
ntttgttgaactctgatcttttgctaatattggcttgtggttgtcagaatgaagactgactctgttacgaatcagcataaagccaactttcattccgagcttggagggagcagaagtgatgggtttgatgcgttttcagtgggaaagaaatcaccgagaagcggtgactcccagttctttcactgtcaccttttctgactcaccttttttctcctgtgtcccctgctgctcctcaaagtcagtgctgtagaatcttctgaatttctgtctgttaaagcagttaaactctctttttttccgatgatgccttttagttggaagctaagctatcagtgggagtctggttcaaattgtgaagtcagcagttaagggattactaaccctgagtaagtcccctatacaaatggcaagttgccttggaaacaggctggttcctttagttggaagtgtgatattgtctgtaaatgccggggatgatggtttttacctttattgcaccacctctaggactagcgtactgagaggctttctgcttgactcctcagtactgatgccttgatggagccagagccaagttttcatttcttgtgcttttaattttaaacacaacccgcaaaatttagaactaaggaagcaatcctttaaatttctattttaggataggaaattctcctttgctgattgccaaaaaaaatgaaagtactatggctccctggatttgactggcaaggaattttagtgatgagtcatatattcaacagtgggatcagcaatgggtgattagggagaggatccctgtgaatgcattgttctgttaggtggttattttgatgaatcgggtgggtttctcctgggagcctggaatcacctgatctgcagtccatcgagcacagagtcagggcgtaggttggtgggaggctgtgcttgtgacttgaagcttaaatgcatccctgcttccctcttatgtagatgtttctctcatgctagatgcaggggtggtgagggcatatggagacaaggctttcaggccagtggaagaggcactggctgaatttaacctggctagctgaggaggtaaaaagactagagggtcttccggggaggtctcaactggtttctgca

SEQ ID NO: 46262 - DNA, 1206 bp, Bovine  19866882027675
  misc_feature (1)..(1): n is a, c, g, or t
naggacttggataaagaactgaataataatgatggtgatgacagtgtcctttactgttgtccttcactctggtctgctattcgcttggttctgtcctaggtgttttaaatgttgctgtttattcaacaggcaaataactccatggtgctgatctgaagaaactaaactttcaagcgctgctgggccaagatgccctgcattcaaaaggccagtgttaagataaaagcccaaatctgacttattttagggccatgtcttttcactgtccccatctgccttcagaggaacttcatggccctgtctctaactgttggcatcacttactgctcgttctcgggtttttctgttttctagcaaagttgtataagaggagagttgaggagctttttacccaggcttcagtgatgtatttgtgtaaatgagcctcagaatccacccaagtacacttccttatgacagagctgcctgtgtactattctattgaagctttccagtacaagttggaaataggagttgaaatgtagtagccattaagtatgaattgtgggtcatttcaaagacattgtttttacaaattgatgacaacaagctaggtctttcatgtagccgtcttggacgggacagtctttaccagccgcacacgttcccagtgcttggcattgttctcaggacatgcgatcgactgttgaagtaataaacctctttgctgtctgagagctgaaagggaggctgtagtctgtttgggcacgactgaagtgacttagcagcagcagcagcagtctgtttgggaaaaggcgtaagtcataattgtaggctgtaataaatataaatccatgagaaatggttcagcttcaaacagctaggtagcagaagcttgtaaaaccatgccctagtcctcctttctggggcccagatcacagaagaattattcatcttttttttaagccgtgaaattttgaaggattcttacaatctccagtctcttggcttcctgcaagaaaacaaatatcgagtcttaaatgacagaaatgattcctaaataagttaaactttttcaaaatttttactaaatttgaataataataatgctccttacagatgatagctcaggccagcacttcctcagtggcgctgagctaacattctaaattcgagatggcattctctctgttctgctgtcgggataatcactgatgaaacattaat

SEQ ID NO: 46263 - DNA, 1270 bp, Bovine  19866880410595
  misc_feature (1)..(1): n is a, c, g, or t
ngaatatattgggttgaccaaaaagttcatcttatggaaaaactcaaacgaaccttctaaccaacccagtagatttctgttggtgtcgggaaagtgcttgtgactattgggaactttttcttcaaccaaagtagtttacatttcaagtgattactgaaaggtaaaaggaagaattatgttttttcgttttctttttttctctttgtaggtttttttttttttaattggagtatagttcatttcagtgttgtgcttgttgcagatatacagcaaagtgattctgctgtatacatatatatatacacacacatacattctttttcagattcttttccattataagtaacaatcatgcttttaatttggacaaactccatcactgtgtgaaaaaggaaatacatttattacactaaaaagatttgtttctaagggattaagttgtagggaaatcagtgaattttatggaggattatggagacatttaagatgcagcatatgagacattttaacaccttcagaaaccgatttttacttaaacaatttttagctcatgaatcagttataatccaagtgttaagagcactttttcctgtagaaatgatataagccatggatagattcactggaaggccctcaaaaatctgcttaattcctaatgccactaaatacagtttcttggggaaaatgtattctgagtcctaactcccagtaacaataacagattttaaatctcctcctttctcctctcatgcagtttaccaaatggactgtttttctccttctaaccaaggccacaagagcagtagggattccagggacctttatttttcgggaggagccatctggtgaccctggcaagaagcttaggaacaacccagttagggttctggtagctggcccgccccttcccttctcatcgccctcgtcgttgctttgcctctggagttttctgggagattgagaacagccctgctaattattgactccttaggttcctaacacacggagctttggggagtgatttgacttgtttgatttccttctctactagggcgtacatttttttgacctttgtactttgagtgttcagttggtaagatgctgattgtattgcttcctttgcctatcaggtggtgataagggttgctgagaagtggtaaatgcactcagatccttagaggaaagtgttcatcaagtgtgactactgggacacgctataaagcctgtcccacaaaatatcgcatttttatccagttaaaattttcaggcg

SEQ ID NO: 46264 - DNA, 2622 bp, Bovine  19866880422617
  misc_feature (1)..(1): n is a, c, g, or t
ngaagcgcttctggaaaagaagaaggatggggtccaggttctaaaatccacacggagccctggactcaaaagagtctgtgcccaagccccgtgcatgtctccttttctatccaagcctggcttggctatatttagttgcgggaaaacgagtgagtgtggaaaagaaaaacagtggatgtggtgctgacggtcacacttagcgttatatttgggctagacctgccgagaggggcacgagttcgcatttggcctcggagggaaggctcgcccctgctctcccgacaataaaagccccttctgggatcatctgtactctctttagcctgacattgccttcgaaatcgctctcggtcggctacggtcaagaaacacttgactaaagcgtgtcattctttccaggtcacgtaaagatgggctgcctgctggccgccctacacagagagcgcatgtcaccgccgcaagaagtttaaagactgctgcatcacggtgtccatctcctctgcagcagtcggacagtttggggaaaaacatctccatcactcgccctgctcaggggaccaggcaggccgggagggggcgagccccagcagtcaccgccttgcctggcacacctgagactggaaaacgtcggcgccccgacccctgcccgcgtcgggccgcttcttcacccgtgttcctgttctccgccctcctcaccttatcttatgaattccgtattgaattcctgtatgctcactcatccaggaaagttgtaaaagacttaatggaaacctaagataaccccgaggaagctggaggcatttacaagctccttccgaagcaagccataaaaatatttgcatgatatattaaggagaaaaggcagcctttcagaaaatgtacagtgcctagaacccaataagtactacagttgaacaaatcccttagaatcccattgttccttaagtaaatctttataataaatacagaaggctacagattagcatggtaataatggctatttctacgtgatgggattaagggccaatttcagattcttttcatcagtttttctaaattctctttgtgtcacaaagagagaaaagcaataaaatttagagtcattcttttatgccgtgtcatcgatttatttccaaatgtaaatgtgaatatatattcagatggcttttggatagtaattactatagtagccacatttactgagggctcctccatgctgggcatcatattaagtgctttatatccattatttcatttaacccttaaaacaactccatgagatatatcatacaattactatctccaagagcagaaacagaggcttggagaggttaaatgatttacccaaagctccacagctactcagagtctaactaaggcttttttgtttttgttttcctgaccatggggtttgagatattaacctttaggccatactgcccctgcttctgaggcaggattcattctaggaaatctgttcctaccatacatagcctctggggaacagagcagagaatatctattcctaaggaaaccaccatgatatttctctgtagaccatggtttcaaaatctagcaaaattaaagtctatctcatcaaaattaaatcatgaattctttgatgaaagcaaaaaacatgagcccataagtgaggtggagaacagaaaagaaagtgtacaccatctgaggaaattaaacttgcatgagcccttcttacacgtctctcctcaaaagctcaacaggttaggacaccatgagtttgaataaagtagtcacttcacacaactgcttcattgtactggttattgatttgttctgaaagcgttctaggaccccacgacctgcagagccctggctgctctcatctgtgatgctgtcgtggccgaccgtctgtatcaccaaggcacccctctcatctccctgcagtttcagggtcgctagttcctgctattgaaaacccagcttttttttttcccccatgggtttataaataggttgttttaagtgaccctgagctgaaaccaggcttacaaggtgtcaggcctgatgcaagtttcctgctcactgaagctttaaatttgccaggcctgatttctaaacctgagtgtaagggcacagtaacggaagcaaattttagttttaaaggcacttctttgaaagtctccttctccacttacgccggtgtaaaatacaagattttactttgagaagaggtgacagaggatgaagaggtttcaagtacaaaacctgagtcggctcagtagaattctaccaaccagaacccctggttaaatggattctgatgatgaagggcatgttatactccccagggacaaagacaaagggtagaaaacaagttatattatggttggtttttttttttttaactttccaagttatttcctaatgtcagtagaggctctgtctaatcacactccttttatatctacagtctaaacaatgattcctgatctattcagaagtatgaaactgcaagaatttgagaaaagcaactatctcatcatgttacactttacattacacattacactttctatggcaggatagtagacactttacaaataatgttaacagccagactactgcaaatatcagtaaaaa

SEQ ID NO: 46265 - DNA, 1765 bp, Bovine  19866880447337
  misc_feature (1)..(1): n is a, c, g, or t
ntgcgacccctggactgcagcccccaggctccgccgtccctgggattctccaggcaagaacactggagtgggttgccatttccttctccaatgcatgaaagtgaaacgtgaaagtgaagtcgctcagttgtgtccgactctgtgtgaccccatagatggcagcccaccaggctcctccgtccatgggattttccaggcaagagtaactggagtgtgttgccattgccttctcctagtgtatatggaactattgattaaaaaatggttcaggagtacagttcatctattcctactgtaatagactttaccatgagtacctagcccactagcagtctgtctctctacaatagatgcgagaattaaaaagccagcaccgaagagcctgatgaagtacagtcttctaaggagagagctcctgaaacacgtaagaatctttttgcttgtcacccaacagtggctccttgggagtgtcaacaattctgcatagtgtatcctccagggtggaggtgtatatatgtttagagtcggtgtgaaggtaatccaacatttacagtcacgtgacacatagaaacaactctggaaacagactgttttgataagcagtcttcccaaaagtatcgtgaacatttcttgtgttggtctcttattttggaaacaagcctcaaagaggcgtagagggactggaacttctcttgtaccgtctaaatgctcatcagtgacggcagggatctgctggattccacctcgtgtgaaaaaggcaataagttctcagactgtccttccctttgggggacccacccacccaggtcatgtgcccattctgccacccgctatatactggccctgctccccctgacatgggtctctagagcccaggctttgtcttgcctgctcagactttctccaaaccagtaattttaagcaggaggtgacaatgggattcttccgctatcataggagttctagcagacacttctagagaaagaataaaaactggtttctacaagcaccctactgactttacttcatttaatataaaagttacagggacttccctggtggtccagtgttcctagtgtacagggcacaggttccatacctggttagggaactaagatccaacatgcctcacagtgcggcctaaaaaaaaaaaagttataatgactttcgctatcttattacttttgcttattaaaatttctctttaaattgactttaaaaaatgtggcctcaccctaagtaattatatttatagcaccatcagtttggtatgctagttatgtatattagaaaaaaaaaaactctgaccattaaaataaaaaatgttattcaagtactacctaacattatcacaagaactaccagtacagacagtatagatagatatcacttgggaaaatgctagtctatgggcaccaactagcttatctgatacatttagctaacgggacagggttaaacagcccacttggttcccaggtaactagaatggtggtattccagaaatggcatatttgtctttattttttttttgccttaggactcggtaactttcctagctcaggagggcagagctgtggtaagctgtggaaagaattattccggggcatttgaagctgggcagtccactgaatgtcgtattatgcagacagccagggacctcccttcactgaagggttggtgcaggcttctaggaagggtagctgatttcctgaaagtgtgtttactgcgagctggcctcctgggagttgcctgggagaatcat

SEQ ID NO: 46266 - DNA, 1396 bp, Bovine  19866880469859
  misc_feature (1)..(1): n is a, c, g, or t
nggcagaggtacatatttagctggaaggtcatcttgaacctgagtttttgatgggttagtacttggttgtatgtctaataaatttcttattaagtgctatttccatgaatggggaaaggcaccctcccccaccacacccctggtaatccagtggtgaagagtctgtctgccaatgctggggacgcaggttcgatccctggttggggaactgagatcccacatgccatggggtaactaagcttgcatgccaaaactacagagccagagctgcactattagacagcccgagtacctccacaaagagcaacttaaaatcccacctactgcaactaagatcagatgcagcaaaagagatgaacaaaattttccaaaaaaaaaaatcatattatgtctaagcacatatgacctcttctgatcatcagtaatgcacgaagattggcttccctcatagctcagtcagtaaagaatctgcctgcaatgcaggagacctattaattcctgggttgggaagatccgttggagaagggactggcaacccactccagtattcttgcctggagaatcccatggacagaggagcctggggggctatagtccacgcggtcacaagaggcagacacgacttagtgataaaccaccaccaccaatgcatgtaggtaataaagactgaggagttccgtggtagataacgaatgttattgttttacacaatatcatttggtataacatttggaaagagccatcattagtggttttacgactgtaaatcaggtccccaatggcagaactggcaaaaaacgcatatacaatagcctctaggcatgctttgtgagcgtctgttagagtaatttgcagttttattggtgaattcatagttccctgacatagctctttataaataatgctggagaaattcttggatgaagctaaattcccttctcttatgaaggcactctcttgtctacaatgaattctaaataataaaaaaatctaaataatagatttgtcttgtcattttgttttaaaaattatggtttcaaattctgtaactttccaagcttttttattattgaattttgtagacttttctccataaatactcagttggctatcttgatagtcatttttaactgattaagaaaaaaaaaacaaattgaactaggtacaataaaacaaaatattaaccctcttttttattttttatattaacatttaaaattttaattattactttttattgacgtatagttgatttacaatatcatgttagtttcaggtatacagtacagtgactcagttttatccatgtgcgtgcatctgtatctcacacacacacacacatatatatattctttccaagattcttttccttacagggttattacaaaatattaag

SEQ ID NO: 46267 - DNA, 1064 bp, Bovine  19866880520967
  misc_feature (1)..(1): n is a, c, g, or t
ntgatctaaattcctagtgttcttgcccaagcagggtggttaaggaaggctttttaaagtaaagggatttcctgtcactgagggcaggtaagtgctcaagcaagaaaatgaataaataaaagtgaggtaattgtgtgtattccaagctagtaacatggatcattccagacacactattgacaaggatttttctaccaactgggtcatttcccttatagtctttctctaaatttcttaaatgtattcccacaacacctgcagttaagcccagtgtttctagggatataagaacaaagcacacagcctgtctctgaggaaaatggatccagagagcaataatgagagctttgagaatgagaaatctgaagaaaaaaaaaaaaaagaagaaacattgtggtgtcatagattcagatatttcagtaggaaatcaatgttaaatgactaaacaattttcagagttaaattatattttctatccttaaggattatccataatagttacatattgtaaatatatacatgtaaacatcattgataaaattctgacattggttacacctgtccttttttctattaaaattattttcgattgcattattaatgtatttcttatgcatttccatcatctttgtcatagttactccccactgtttcagaaaaaaataaaacttcatgtttacaaattgacatttcttgataagagataaaagtatttgtttaaaaagaattctgtaaattttttattaggctgcttcaatttataaaatgactaaatttttaaataacttcaagttacctggaatataaagcatcattaaagagcatacttaaataattgtttgttaatgctaataatacatttgcttttgttattgttgttgtttgtttacttttttaacacaaaatgatgcgaaaggatcctgtatattaagtgtttaaaaaaaacacagtgtttccctggagactggttttgagacttcacagtttttccagtttccaagtgtagaagatgttataagtattccccaaataaatatctagtaagtgtcatcaggcaacccttc

SEQ ID NO: 46268 - DNA, 1724 bp, Bovine  19866880560679
  misc_feature (1)..(1): n is a, c, g, or t
nctttgtaaattcttcaactggaggctctaagtgtttctaaccgtttatatgaattttcctgctgtaaatgtattaacctttggtcacttttataaacacattttacagactgtggttttttaactttgcttttcttttgcaaacagaagaaacttctgtgtcaaatctcttagttttttttcctttgtgattttgtgtgtcactcagtatcttacaaatccttctcattctggaagtttgataaatattctattttcttcaagcctttctagggttgattttttaacagggatgggtaagttatgtggaattcttttggtgtcagtgtgacgtgaagtacagatgactctattttccaaatagctgttcaaattccttaatgccattattgcaacatttaaagactgcagcaaaatttgcattgagaaagcaccagagggaataccttcccttcctgatttttctgcagggacaaggagccagagaggaagagagtaaggaagagtcaaacaccaaacagcagacagttcctcaaattcctgctcagcacttcctttaccagtgggtcttgcttgggtaagaggagccagtaaggaagtgtgaagaaggacgtggattctagggagactacgtaaaaatctgtgattcatgagagcttatcctgtaggttacaacctcacttaggtaacgagaaagcactcagatctcccagggtactgatgcacaagacgcccgttcttatgacaggtaaatcaaatggtagagtctgcctgcgtgcatcttcctgatacagggatccaactcgtgcctcctgcattggcaggcggattttttttttttttttttaccactgagccaccagggaagccccattatagagtatacatactgtatacatatcataactttgcaatcacacagcttgttgattacagacgtagattgacatattttggggcaaattcaaacacctcaaagcagcagctagatacaagaaaccctcattgtgagactattagcttataactaggggtcacaaactataacccttgtgccaaatttaactttgtgtttttgtaaatcaagttttagtggaacactgccatgcccactcttttacatattgtctgtggctactttccatccaatggcatgtctgaacagtactgacagcaactgtatggcctgaaagcctgagatacttactttctggcccttaagaaatacgctgcttagcacccctggcttatagaataggatagaaccttattccctaatagcagcagcactaaaggcttctactgtggtaaaggagaaacttctttaatgcatttcactctgggctctctgtactaagaaggaatcttccccactatctcagagggaacaagatattgctgtgttcctcgtggcaatgaggaggtgagtgagcctgcagcagtcactcgggaaagtgaagtttccagtgacgacaattaggtgagcaagtccaacatttctccaggcgttagtttctacggtttccttggggtagtgtagagggggcgtggatcggggtgggaggaagaaggttcttggctgggttgaggcgcactttggggtggagagggttagaagaaaggaaagtgtaacagaaaagagaaaagaaaaatctgaaagccagtggaaatggaagcgaggctggcctttccctccactggccactccagaaatgctgaattta

SEQ ID NO: 46269 - DNA, 644 bp, Bovine  19866880561197
  misc_feature (1)..(1): n is a, c, g, or t
ntgcttcctgagaactctcctaaggaaagaatgagtctgagaaccgtgaggtatttcacggtttcatcctttcccttcgaggtgttatcctttagtacctggagctgcctgtttctcttccatagtcaaccgtgaatcagtatttggtgtggttgctgtttacagcctgacttgtcaggcttgcagagtttatcagcacaccagctctgcgaatatcttggccaggctgtcctgcatccctttgcccgaaggaatcagttagatgatgtagagcatctggaatctgtaattttgaattaactgtatgattatttagtatcattatagcatgaatgggattgttacattatgcgggcatttaatccatctggcacggtgaccacttccgagctgtcccagaaagcggaggagtttcctaatgcctagccctttggtgggaccaaagcaagtcgaggtcgtcgggttttgggaggggaccacgtgctcctcagtagcctccgtttagaagctcacacatcgctctttcggtccagctgtcacgtgtgtggatttgagacggagctcaacgtccagtttgtcagccacatgtcgctccacgtggacaaggagcagtggatgttctccatctgctgcacggcctgcga

SEQ ID NO: 46270 - DNA, 1046 bp, Bovine  19866880566136
  misc_feature (1)..(1): n is a, c, g, or t
ntcggctctgctctctctctctctctgtcctcaaactgtgccaagactgtaagattttcctgatgacggggcatgttctgcatctggattccatggtcataacaaccagaagtttcctgtcctctttggttgaactgattatgctatagagctgggtagcaacagcagcaattgggaggtaagcgctactatttaaaatacagtgctccctcatctgagatttctgggtgcctgggagggagggaaaagagaaactatattcattctgtgctaacactatgctacacgctttactcgtataattctgatttaccttgacagtgaccctgtgaaattgcaggcgttaatatcctgttctgcaaatgaaaccgtgggcctgtagatatagggagggtctagtaggaggctgggtgtgatttaaatgagactttctggtgccaaggcttgtgccctttctgttttgccatgctgcttcatgttctagaaatgctgtggttttttggttaggcaaaacatgttgtggcctcattttatcaactgggtaaattcttttttattttttaattttaatttttttgactgcttgggctcttcattgcaaggtacaagggctttctctagttgcggcatgggatttgttgcccttcagcatgtagagtcttagttccctgaccagagatggatcccgcgtctcctggatgggaaggtgggttcttaaccactgagccaccaggggagtcccatcagttgggtaaactcttgaagttgcatatacattatatacttaagagaaggagaacctgtagttttctagtttaatgttgtctgtgcttggcagctgacacaaacttcgccatttctgcaggagcccagggccagcaagagggagcaggtgttattgttccactttacagatgagggatctgagtaatggggggcagagtgttcacatctgtctggttcatctctgtggtcctaacacccagtcaaaggtttggtatttagtagactctccagttttttgttaaataaacaccaggaattat

SEQ ID NO: 46271 - DNA, 1164 bp, Bovine  19866880658108
  misc_feature (1)..(1): n is a, c, g, or t
nttctagaaatgcatatgttagtgacagggtgttttcttctttaagaagcacctgaaatgatgatgattttgcttcctgcagggtgagctctgggaaaagtggaatccattcatgagaccgtgtaaactgtctccctgtcactcaatcacattgtgtctgaatgatgcatttactctaattccgaatgtattccagcatgttagtctccaagtttgaaaaagatattacaaatgactttcataatcctgagactcaatgcttttgagtaaattccatcaaataattgtgattcctagtagaaggtgcagagaaaaagtcatagtatttgactttcaaaaccctagtgtgaactggtgtcccattgttttctagcattaaatattggggataagtcactttcctctctctttctcacgagggcatcaaaagaggaatagtggagatggcagatctggtggctatcaccaaatctgacggagacttgatcgtgccagctcgaaggatacaagcagagtatgtgagcgcactgaaattactgcgcaggcgttcaggagtctggagaccaaaggttagcttgcattccgttctgcatttttctcccggagtagactgtgcacatcagaagaggggatgtaagtcccaagctagacatacaggccatctttgcttgaatgagatcacagttttaaaaattatgacaaagccagagcctgtagtgattttaagtacagtccgtcaaccaccagatgtcaaaaactggatgtgaggtgatagattagagtgcttaatgctgggctcaagctgtttggaagtgatggcaaatccattctgaaaagatacacccttaagattatggcgcaattaatgacttgattatctacattagagtttgagtaagagagagaagtcttttgatacggtaactctccttcccattatgtttgttgggtgatgtttttaataaggaaaaaaaaatccagtagtaagtgatacagtgatatgatggggacactttatctgtagaaggacaccgtgttattaaagaagaagcggccatcgctgtaatgagaacgatggtgacgtttcttgccgttggctcccagcatgttgtcttttttgctgggtctggagccaccttgtctgtgtgggcactgatgctcagt

SEQ ID NO: 46272 - DNA, 1396 bp, Bovine  19866880746521
  misc_feature (1)..(1): n is a, c, g, or t
ncatgggaatttgaaaaactgaaagagctacagactccagaaatcttgagtggaaaaacaaatacacttagaaaatttactcatgcagggctgggttctcactactgtaaaattagaggtaaagcttagcagacagcaatgttttataatttttgcatttccttgtaagtggaaggaccatttaaatgtatgaaaaccaattttgccaaaagaataaagtggtggtgagactgttttgcaaaattaacattattgatattaaggaaacaagtagaataaagtcaactaaattatttttttaagtttttaattagaataaataaaataacttatttttaacttattttttaaataattaccctattctattcatgagcttttttgactcatatggactagattcttccaaataacaagaaagaggacaagaattttaagaaatccttaactatattatttcctcttagtatctgtccactacaaataatctaacttaagaagcagagtgggcattttagaagtccccatgaaaccttagatggaattcctatacctggtcagtctaagtatgaagcatatagctggacctcaataaaatgggctacttgatgccatgactggcatttactgtaatcttgttgttcagtcgcttcgtcgtgtctgactctttgcaactccatggactgcacacaccagatttccctgtccttcactgcctatgtgctttatcatcacacagatgacttctgttccctttggccggtcctacttttatatcttcccatctcctgacttgggcttcctctcctatttctgaactcatgcctgtttttgaactgaagattgtgtctggcatattttgtttcttttactttcagttgtgttgtgttctctcagctcagatccatttgtcttccgtcccctgctctgctccttttccaaggttccttgacaagtgacttttttcaaggtctagcaaagtaggctttgagattaaatatgggacagtgaagaaggcaggtactctcaaatctctctttcactctctctctgactgtcttgctctcccctactttggacagcctctagaaggggttgcatctctgttgagttgcaaatactgccaagaagctccagttccttcactctccatattatttcctagaacttttactgttttacctttcctatttagatcactggttaggttttttttaatttatgttttttgttttttttttttttctggaggggtaaaaagttgggttttttttttaacattttttttttcctataagatacctacagtgacaggtaagatcctttttctaaacatgtatatctgagggtctcagtaccatttattaaaagaccatgttttccccacagtactgca

SEQ ID NO: 46273 - DNA, 5169 bp, Bovine  19866880750506
  misc_feature (1)..(1): n is a, c, g, or t
nctccctggtgagggagctgagatccccgtgcctcacagccaaaaaatcaaacattaaacagaagcaatattgtaacaaattcagtaaagaattttaaaacatttgtggtggataattcacagcattcaataaatattattaactcttaagtgtgaaatcttttccgccagggaggtaaactggaattgtcattggcaatgtatgttcttagttgtaccttggtttttagtgggtgagaaaattaagaatcagggaactttaacatttttcacgtaaaagaatgtgttttgcagactttgcctgggcacttggttgatgctgcaggtctcgggctggcccgtcaatgattctgagcagaccatcatcatttttacggcatttgttgccaagtgggaaatggcttttcatttgaatggtgcttttgagttggcagcacgacaaggttcaaataacttgttgtgacttacagattatgtttcaacttggttgtgttttagtgtgaccttattaaaagattttcatcattctcactttggtccctcttttttttttccctttccccttttccagttcttcctccagtactggttccaagacacagcgaatacaatcctcagcacagcctcttagctcagttccgcaacttagggcaaaatgagcctcacatgccactcaacgccactttcccggattctttccagcagcccaacagccatccgtttcctcattctcccaacagcagttaccccaactctcctggaagcagcagcagcacgtaccctcactctccgaccagctcagacccaggaagcccctttcagatgccaggtaggttgctgcattcagtaatgtcctgtggtcagtgagacgcgtcatcacagtgccatggagaagccgggtttcctggaatggggagagctcgcaagccttgggacatggcgctgtgctctaaaactcaggatacaactttgaatggaaggagacacctcgtagccaagcaaggcggtgttttatttgtccggcacagatgcttgaatacgttttcgtgtttgatttttgaaaggttttgaaacagctgcatcattctgggagtggcatggttgttccagcctttgctcttgataaaagcgagcggaaaaaaaatagcacgccgcacacatttgctgttttcatgcaaggaaaaaaaaaaaaccctgtcataagtgcaacctcagaagagatatttcctgggggatctcacacacacacacacacccccacacacacttaattaaattcgtttaagtggtgatgtaatcctgagaaacacagacttgaacaacaaaggacttgcaacagaagtaccggtaaccatctgcttgtttaacttagcaaagacaaaagaccattatccttctgtaggcttctctgagggtgtaatgtctgtcaattaaatgattaattaggacattatatttttcgcgttataggttaataagccagcatctcagaacaataaaaatgattagtgccagattcctagccagtcagcctcacagagggtacattaagcaaagatacacttgacatctattaacatttcaagaagggaaaatgagtgggcaagcatgtttaacatattgaaatgtttggaggccaatttgaattcgatagcagagctagtgtcttctcaaaaattgaaagtggcccatacttgatattcttatcttttatttatgtccttagtgcttttttgcattttaagcctgtttatattgaactggcttgtttttcaatcagaaactgtttaagatgaggaggatgggagacagatttatttcaaaatccaactcatatcatctggtgatttcctgtcccctcctggacccgttgagtttgaggaacaggttggagtcaaagttagatgttttgggtggctttgaagcagtggcagactcagggtagccccaagagtggaaaatactgaagatcattgcttgaatttacactgtccctggctgtcagggattgaggcacaggccgagtagagaaaatgtggagcagagaaagctgaaggggtgggaggagggcctcacggagagagcagagcatcacccatagtatgtggtccttcccaccggagctgaggccacaggagggtgatgaagttttcaccagtctgcttgcagaaatttattggatttggtctcagaggaggctctttgtcttcgtttttggctggaaataaaacagaggcagtgttacagctgcaaggaagaagctgaattttaaaaaagcggtagaaagagtagaaaaggcatccggatcaggtccctgcggtcctgtctctgtgcttggtagcagctgagggacgagggggtggggggttggggagacggtggaagtggccagggtgtgattcagctggagagtcagtctgggaaatcactgagaaactctgcaagagccgtgttagctttttctatttgacggttgccccgagtggtgtcatccaggctactggttaagatgaagctgtgtttcctgctctgtcatatgtgccagatggtaccatgggctcgccggtggcccttgagaaactcgtttttccatcacaaagaattatttgtgggaaaaccataccctgtattttacttaagaaagtacaagactgggacttcgctggtggtccagtggttaagactccttccaatgcaggggctgtagatttcatacctggtcggggcgctgagctcccacatgcctcgtggccaaaataaccaaaacagatgcaatgtcataacaaattcagtaaggacttaaaaattggtccacgtcaaaaaaaaattaaaagtgaaaaatgcaaaagcacaagacttgtattagtgtcgtttcaaaaatcacgatgtttgcatcgtatttgccagttgattgtgaacttttccagaagaaatgtatacaaaaattctgaaatagaagatagttgtgacaaactgatttatttcctctaattctgttgctagagactatttgagtggataggaagttaggtggtcctagcggacttcttgaagtcacgggaaattcagagtttgagtcagtaagttggctgtcttgaaactcagttggtaaattcctaagagcccatagatttaatgcacgagaccctgaagctccttttctgaagaagtccttgtagctttcaaaagttttccatccaccagggaaatgacaaaatgcagaggtcctttgaaggtgggtcgtgtgcaagcacatttaaatactcctctgattgttgtaaaaaggagtgatcctgggtaggcagacagcttccagaactggtatacgatgctttcctcccactgagttttcactgcagtcatagaagaatatgagatggtagccatcttcacaaagcataccccaagcccagtgtttagtatcatctagtcttcagatggggacagtgaagtggccactcaatctcttaagaatttcaggcatggaagagaatatatgttttaagcttgtgtgcttgtgtgtttactaaggataaacaaatctttttttttttttttttaattttgtagcagatacacccccacctgcttacctgccccctgaagaccccatgacccaggatggctctcaacccatggacacaaatatgatggcaccatctctgccttcagaaatcaacagaggaggtagaatgaactgctgctgcttctctttttagagtctgaagttctctgtccaaatgttgctttctctcacaaattttttattcgtcttgaaaaagatagctatttgaagctataaaatatataaggagcacttataagagaatttcagtagaaaggattccttggattagaaataagccttttatatgaagaacagacacactgatttagctaatgaaagtctaaatataattgtgcagccatctgtttagagccttagtacttaatacttccaaattggtgataaaagaatatctttaagtgaaagacaaagggatgttgagggggaaaaaagtgagtataaagttgaagtagagttttcactggtgatttccaaaatgaaaagatcatataacaaggctttccaaaggcttcttttgttgtcaggataaatattcataagcctcgtcttccttctggccctcatctagaatagtggcagcggaaccaaactaacagcatttgttccctgcgcgcatgcttcaattaaggcaagttggaaggacttcacaggtggcacagtggtaaagaagctgcctacgatggaggagacacgggttcagtacctgagatcccctcgagtaggaaatgggcaacccactccagtattcttgcctggagaattccatgggacagatgagcctggcgggctacagtgcatggggtcgcaaagaatcaggcatgattgagcaactaacacttttttacatttcaataattagtgatgttgagcactttttcatgtgactcttggccatatgtacatcttcattgaataaatgtctagttaggccttctgcccatttttggattgggtttgtttgtttctatattgagccatcagttgttagccaaattttggagattaatcctgtcagtcacatagtttgcaaatattttctcccattctgtgggttgtctttccgtctcatttatggtttcctctgctgtgcaaaagtttttgggtttaattagatcccatttgtttatttttatttccattactctaggagatgcattgaaaaagatattgatgcaatttatatcaaagagtgttccacctatgtttttttaagagttttatagtattcagtcttacatataggtttttaatccactttgagtttatttttgtctgtggtattaaagaatgttatgatttcattcctttacttgtagctgtccagttttcccagcaccattcattgaagagactgtctttttctaccatgtattctggtcttctttatcatagactaattgatcataggtgtgtgggtttatttctgggttttctttcctgttccattgacctatatttctctttttgtgccagtaccataatgttttgatgactgtagctttgtagtacactctgaagccagggagcctgattcctccagctctatttttctttctcaagattactttggctattagggg

SEQ ID NO: 46274 - DNA, 1071 bp, Bovine  19866880804645
  misc_feature (1)..(1): n is a, c, g, or t
nccctacactcccttccctgaagcatgtttatggagtgattatgcctgcaaatatttgctatatttagtccctctcctcccctaaccccctcttagacttttttttaacaccccaaatgagcaaaaagccaagcttatggtcttgggaagatttgaaccctaatgacaaggcgcaggggctggaacaagcggtgcagaagcatttgacgagttgggaggcaattagagtgggaaggatgagttattatagcatcacccccacacgaaggtgctttgtggggcctgcggccagcaggtgagggccctcagcggggcgtgatgggttttgacaggtgatggccatagccctgagtgatgaatgcagatagatcccggtggaactttccttcccaggcaactttctcggcacaagaccgcgcaagccctcagatttgtcaccgtgcaccctgagggctctgggggcaggggttggtgggaactctgtgacctcagctgggtcaaggttgctggggtaacccgagtgggccacacctggtctctggctgggggcgctggagctgccctccatcagctgtggagaagcgagggccccctctggcttctagcttaacagctgcacatgtccgctcttggcatttcaggctagatctaggcttacttcaaggcccagtgcctgcctccagtcagcttggccacctattgtttatcctgggaagggctgggtcttggcaacagggcctgaagtggtgcccgcattttatttttagagatgggaaaatgcttgctttttggcagccactctttttctggcacacatcaggatggcgtcaaaaagtccaagcgagagattccaagccctagatccatggtgtgtgtcatcacaggcagtaggaccacgggcctctcaacagaagcttctgcagagcctgagatctctgggtcccactggcttcatcctggcggcacgaggcctttagtcctctaccctcttagcctggtcttctaatgagcccctcttcagagcctcagccggcttgaaatgttagagttcttacctctcttcagctcctt

SEQ ID NO: 46275 - DNA, 1652 bp, Bovine  19866880819605
  misc_feature (1)..(1): n is a, c, g, or t
ntgtgtctgcagggtgccctttcctcagtgggtgcacacatagggcaggagagaaatctctcccttcttcttatgaggccactaatcctctcatgttaggaccccaccttcatgaccacatttgaccttaattacttccttaaaggctccaggttccatctccaaatacagtcacactgagacttcaatatgagtttgggggtggggggtgcataattcattccataggacactaatacataaaatcacttaaaaaaatacctggcccatggcaattgtttaataaattgtgattttatggtacagatgattttaaacaccttttccccttttttcttttctaggtgctcgctttgggttccttttggaaacaccaggaatggtcatttctacttttcaggacctccgcacaaagaagctaaggagaatcttatgtagataaagtgaagcctctttcactgtcctttcacattggggacgtctatatttctccctccacaaggagcgtgcgtagcgccatcatgaatgtgacaagtttattttccttcacaagtccagctgtgaagagacttcttggctggaaacagggtgacgaggaagaaaaatgggcagagaaggccgttgatgctttggtgaaaaaactgaagaaaaagaagggtgccatggaggaactggaaaaagccttgagctgcccgggccagcccagcaactgcgtcaccatcccccgctccctggacggcagactgcaggtctcccaccggaaggggctgcctcacgtcatctactgccgcgtgtggcgctggcccgaccttcagagccaccatgaactgaaaccattggaatgctgcgagtttcccttcggctccaagcagaaggaggtgtgcatcaacccctaccactataagcgagtagaaagccccggtgagtgagtcctttcctgtggacgcatttagcagatttgtgttgtttctcgaaatcgtccctttccatgtttttttttgtcgttgttgtaatttctaagtattagggggaaagtcgtgtcagtcagtccttgaaagggtcgtacgttctaacggcatagtctctagttaactttatttcttaggagcagggctgtgaaaactgtcatggaggcattaatgcatctaccttttcataaattgtttttttgctgaatttattttttgtttccctttggttctgtgcatttctcgagacagagttagctatgatttttattgcaagggaagaaaatcgggaaagaagcatgatgttgctgtctacatacttgagggtggttgccagtgacttatatcactttatccttaaaaatagcactttttatcatctccagtagaattctgctatggcatactccctgtggaggatatgaaggaattatgttctgcagtggaatcatttgatactattactttatatgagatactcctagtttttacatgtgtgaccttggagggggtggaggaagcataataaaagatatacttttaacatttacttggttttgacttaaattagagtccacattctagacagtggcatcagctgggaaaatgattaggcaatctcaggcacttaaatatctcagcgtcagattggaatcaaatttgttgatggattagttattaata

SEQ ID NO: 46276 - DNA, 1453 bp, Bovine  19866880963524
  misc_feature (1)..(1): n is a, c, g, or t
nctcttctctacttctcatcacacctttccatttcttcttagggtgttctttgttttctttcccttgttcattcactcagcactatttattgagcccttgatgctgctgctgcttctgctaagtcgcttcagttgtgtccgactctgtgtgaccccatagacggcagcccaccaggctcccccgtccctgggattctccaggcaagaacactggagtgggttgccatttccttctccaatgcatgaaagtgaaaagtgaaagtgaagtcgctcagtcatgtcagactcttagcgacctcatggactgcagcctaccaggctccttcatccatgggattttccaggcaagagtactggactggggtgccattgccttctctgatttgagcccttactaatttccaatttaattactgatttaattgagccgaagaattgatgcttttgaactgtggtgttggagaagactcttgagagtcccttggactgcaaggagatccaaccagtccatccaaaaggagatcagttcctgggtgttcattggaaggactgatgctgaagctgaaactccaatacttacctcatggagaagagttgactcattggaaaagaccctgatgctggtaaagattgagggcaggaggagaagggggcgacagaggatgagatggctggatggcatcactgactccatggacatgggtttgggtggactccgggagttggtaatggacaggcaggcctggcgtgctgcagttcatggggttgcaaagagtcggacacgactgagtgactgaattgaactgaactactaatttctaagcctccatttggccagtagggctaccaagctgaacaagacagtgtcctttcctggtgaccctgtgttcccgtcccatcccatccccctgctcatgctcatgctgggttccagttattatgttattatgcagtgttctgctttctgcaccatctctccagcccttccctgccttctggaaacactgaccgatggaagagaagccgtcagggcttctcaacagagatatccttgggacacgattcagtaatatttagcaccacctaagaaaagcattttaaacttgtctgcatatactaaagcccttttaccatctgttagtggaaaatatttaaaagtttggtaaaactcttagtgattgaaataaaactcttggtatgcgccttcctctcgttgggcattaagggctcactctgctttgtcttcctcattgagggtcaggcaatggcccacccaccaccaggcagagatggaccttgctttttggtcagtttttttaaatatcagcaggacttctgaatctttcaggagttgtgtttaaaatctacttgtgcgtccccccccagcccaaccccatccttcctgcattcaggttcatagaagggtatacaaaggctataatcacaacagata

SEQ ID NO: 46277 - DNA, 1527 bp, Bovine  19866880999955
  misc_feature (1)..(1): n is a, c, g, or t
nataatttttagaaagtcagaatgctggtatggatcctacttggaggatggtaaattcagtttgtaatttacaatgcttggaggatgaaagcaagaaatgtattagtgagacccctacctagtgtcatttcaccagcagttgtgtgtttctggttgaccggtaggttggaaagtaagaaattaataattatttacttaaaattattgcatcagaacagttgaaattcctgtatttgccagtggtgggattaagaattctttcctgtgatgtgaatttaaaacacactggaacttccagggggcatgatttgttacagataaagcataatacaatgattacatccttatcatcaccccatttttctaaactgatggtgcagtttctcctatgtaaatgggaggtcttgcaaggttgtgctaattgctaaaagctgctagtttaaaagaaaacttgttcaggccaacatgctttcataatttgaaccctccctcctatgtcaaaagctcttggtaacatccagtaatctattggctttctagtcaaatcaaggaggtcacacagctctctcctccttctctcataacatggactggcatattatgactttaactctcttccaacagtgactcctgtcccctcctaatggtaagattctagcgtgtaatatttctgtttcagagtttgctgcatagccagcattgcgagctgagaaagctggggtggccccaaaagataatatgcaaacacaagatcgaaggaaagatgttctctaaggaaacagttttatcctaattcttttggatgatgcgatttgagacaatgaagtatgaaatcatttcctgggtagtaatgagatccccaaaatagaatacggctaggcggccatgcacatttaatgatatttgtggtcagtaatggctcttctgaatgcttatgttgagtgttagtgaatacacatgctgtggagctccacgatagttgaatcggaaattccctggcggtccagtgggtaggactccttgctttcatcgccgagtacaggggtttgatccccagcctgggagctaagatcccgcaagccgtagggtgcaaccaaactttaaaaaaaaaagaaaacaaaaaagacaacagttgattggatgacctgttcatatttccaaaggcatctcctctgcttcgtgctgtggaaatgaaaacttgtttgaagactaagataagcatgttttgccctgaaaaaatttcccaagcattctgtgcgctttgatttaggttaaagaaatacgtaccacagtccctaccttctagatacttgtggtctagtcagaaagtaatccagggcagtggaatgcattcaatcagtgctttgcacttggaacttcgtacttgtacagtctagcagattgtggccaggaaactgtgaagaagtctccaagtcattcctaaaaataggagtgtgacttgaaaataacaagtgtcttttcattcctaagccacaaaggtaaagagacctcaccttttattaggtt

SEQ ID NO: 46278 - DNA, 1194 bp, Bovine  19866881020113
  misc_feature (1)..(1): n is a, c, g, or t
ntgcgcagtacaggggccgcctcttctgttcctgcactcagagttcaccttgttctactcgtggaactcctttcctgctgagacctgcacttgcctcaagactgctcagcacagtccttgaacttggcatacggggagccagttcgctaaccgtgagttcactgttaacacagtggctcttcaggatggagcatctttgtctctggcctcagtggggtagccaaagtacttagcaggcactcagtgcaacttcgttgaatgaatgtcgattccagtagttaaagcaaaggtctgaaattgtggtcctcaacccccacctccaccgccacacacacaccttctaggataaatccatcagttctagagtttaaaatagccccaagtgattttgatagaaactcaccccctcaatttgaaaactattgactgaaatataaaaacgcagcttttggagttgaagaagaggacatacagggtaaggagaaatgtattctgttgataaattgttactagaggacaaggaaaaaaagttgtctttctcgttcttttgcacaattaacctttagtaaaagtaaataattatttcaggaggtacactctgaccaagtgtgactcttgatgatagcatagtgttttgttttctcttttattgttagacaaaaataatgccactttcaaagaactgataaatctgagtaaaactctttacagaagggaacaactgagtccctgtagcctattaagtaaagctccacccttggccttctaattccttcagggagctaaatcattcatcaaacatttattgagactctgatgtgtgccaggtatagggctctgctccaaagacagaagacagtcagatagaattcctttttcctccagtgaggaagtaactgttggcatgtgcagtttgctgtgacagcagtccatcataaatatccctttcagttctcagaatcagtaatgctttcccccttttattcctgttacgggtaatctgtgccttttcttttattgattagttttgctagaggaatatctggttttattagtattttcaaagagccaactttgattttattttcctattttatatatatagatatatttaatttttgctctcatttccttttactgtctttgggtttaatttgctgttcctttctttttcttttggtagatacatagaaa

SEQ ID NO: 46279 - DNA, 1721 bp, Bovine  19866881026322
  misc_feature (1)..(1): n is a, c, g, or t
ngccctttttgtggtctgggacagagagtgagcgaagagagctgtactgaaaagaactacaactgtactggaaacaaaccaacaagccaggtagcaagcgcagctgccacatcagtggtccttaggccttgctgcagttttagaaccatctgaggattttaaagaaaacaccaatgtttaggtcctatccaagaccaactaaatcataatttctggcagtggggctggaccctggcgtgtaagaaacaaaagcttcccaggtgagtctaatgtcagtcaaggtgagcactgctgctagactaaggagagatggcacagcaactgtagggatttaacctcctctcccttgcaaagccccagtcatgcggctactgaagccctcgccctgacatgagacagtctgcctctgtcttctggattcccagagagatctgggcaaacatgcaggctgcagcccccgaaggcttgtctcctagactgaaacgcagagcagagttttcataagtatctttgccatcatcccagaaagccatcagcaagggctgccccatcttctcctctgaggcagttacagtgctgagctccttggtcctagcaaacattaatcgcgaaggactaaggaatgttaagtgtgggctcaggcgggagaagactggatggtttggggaaggggtttgatttcacaatcacagacgctgggaaacctcaaaatggggatcgggatgggtggccttcgagtccccttaaaacagcatccccccagtgatttttaatactgctgtacatgtttagttgcacagcgagtctgtggttccatggactgtagcctgccaggctcctttgtccatggaattctctaggcaagaatacagaagtgggttgtcacttcctactccaaggggatcttcccaaaccagggatcaaacccactctcttgcatcacctgcactggcaggcatattctttacccctagcgacacctcggaagccctttaatcctcctgggttcccttaaagtcatttgtgtgttgaaggagcaaaaaagactccccttaatcaccaagcaagaaagaatcaagtgttttccatctcgcttttgaaaacaagaagatacggacacgcttgaatttgtcactgtgctccggttctgcagtgacgtggctggcagaggctcccagccccggtgtccacaaacagctgcaccctagggtcccagcaggtgcacgcacagagcctggctcaaaaattcaagacgagaacaatagcaccgttatgaggctgggggacaaggcccgatgctaacccgacatctgataagggaaagagccagaagctcagccacagctccctggggtctggccctttggtcctgggatcacagccacggacacagccaggtggagtaccccggcgagaaccgctatcaattataggactctgatcaaccagagagcaagtggaagaaaaaaataataatcgtcccctctcccccgaaaatgtattcctttccttttcacgtctcttctcctcccgtgggctgcgctgcactgtcaccaagtttacatttacatccaaatatgcacacacacaaaaaaattaccgatgcatctcactccccggcgactttgtaacaggttgctaggtaacagtgcacacaagtcaggtttcaggacctctagtaagccaccataaaatagctgcacgggcctttgcataaacag

SEQ ID NO: 46280 - DNA, 1282 bp, Bovine  19866881165468
  misc_feature (1)..(1): n is a, c, g, or t
naatactggagtgggttgccatgccctcctccagaggatcttcctgacccaggaattaaacttgcatctcttacatcttctgcattaaagaacctacagggggattctttaccactagtaacacctgggaagcatgtacttccaaacacactaaatttttcaaagcacactaaatttttatctgttctgaagctcatggacagataggagactgggtgggaaaagaaatccaaaatacatgaatttcaaattcgaaaccaatctgccaaaattggataagctgaaatgacgtttagatactaacaaaaatattatttgtctcaagaacttagattaattactataatattccattatgagaaatttctatttataaaatctcattgctactctattgctaatcacttcaagtgccgtcttaatggtttattaagttcagaaaaatatttttaatggttcgtaaagaaaacagtacaaaaacaccaaacagtgcaaggtcctctattaggaaggaaagacattttgatcaattaacagaagtgctttgcatgtcattagaacccatttaaaattatgacctacatcatcttagaaaagcagcagtgtttcccaacaatttgcagtcataatcaggaaaagaggagcgtatttaataagacaggtacacggctaacatccacaaacaaatttatacacgaaacacatgaatttaagacaagtaagccagtcattcctgactttaccttaataatgtgatattgctgccaacaggctaatgtaacccatgggtagcccagttggcttgcaagtgatggtatcagtatgtgaatattttagaagaaatcaagtacctgatagtttcatgagaagttccgatgctgctttaactgacatatcccgtcttagcacgttgccctttgcttcctggggcttaagcgtgtcctcagagatgctcgcggctgacacttcagactcggggctgaacacatagctggaccgaggcaatgtgacgcttagggtctcctcttccttaggctcctcttttattttaaaattgagattcatgggctccttctgatttgcagctgtcaaaagaagaaagggattacatacatatacatatacgagagaccactcctgctcttagctactcccaactgaatgaagtttggaatgcatgaacacaccgagctaataccggagggaccacaaccccatcaaaataggctgagccctcggcccaaaatacaagacactccatgagagcaggacttaggagagt

SEQ ID NO: 46281 - DNA, 1061 bp, Bovine  19866881229751
  misc_feature (1)..(1): n is a, c, g, or t
naataggattcttttgtaggaactccaatgttagaagaaaatttgaccctctcagaatagagagcgttaccctattaaactttcaattcctttagcctttctatatctctggcactatattttcagacatttggatactatatatgtgcaataagtgagaattattatcttcaaatatgtaaacattttaaaccccatcaggcaagttcttctactctgatagccttcacattacttagcattatgaatctacttattttattttttactggggtatacttgatttacaatgttgtgttaatttcaggtgtacagcgaagtgattcagatatatacacctgtatctattctctttcagattcttttcccttataggttattacaaaacattgagtatagttcccggtgctacacaatagatgacaaatggaaatatcttatgttccatgggatcaactcattcaaagcaaataatatcttcaaaatctctttcccattgaagagagtggggagtaagcacactgtaaaaaaatacgtcctgcccgtcaccttcctgagatgggactttgggggtgaggtgaggaaaaggctgtcaccttacatttctttcagatcactgcacgcattgggaaggtacccagtacctttggcataactgatgattgtcagggcatgggaagccaatcaatttgatgttcattgtcatcaacagagcagaagtactaccccaagggtgggatgaaatttccttgttttaactgagagaattctctctttgctgattcctggagtgggtagaatccaagacatatctttttctccctttaatacacatgctttaaaaagcttagctgattattataatccatcatttccagcaactgaaaaacttcgattatttcaatctgagcattttaaaattaacattaatgttggtggtggtgctgggcagggggatggtggaggggaaaggcaggaaaggtgatcttctattcataggaagagattattttgaaaatgggaattagaagcaacaaacggaaagatggggttcattcaac

SEQ ID NO: 46282 - DNA, 3137 bp, Bovine  19866881279574
  misc_feature (1)..(1): n is a, c, g, or t
nttgtgtccgactctgtgctaccccatagacagcagcccaccaagctcccccgtccctgagattttccaggcaagaacactggagagggttgccatttccttctccaatgcatgaaagtgagaagtgaaagtgaagtcactcagtcatgtccgactcctagcaaccccatggactgcagcctaccaggctcctccgtccatgggatttccaggcgagagtactggagtgggtcgccagtgccttctgagactattaaaaaacaaacaaacaaaaaacagcgtatagggagagacttgcaagtatcagttagactttatcctgagagcaatgggaagccaccagggtggacagtgagatgaagagatatgaagagatatgccttatagccgcaggatgggaggacagaagaccaaccagaggtcactgctgtaacccagaggactcatgatgggagacatgaataaggttactggcatttgggatagaaaggaaaatacttgtttaggagaaatggaggaggaagaatcactgtgggaagacagggtaactggctggaaatggagggtggagaagaggcaataacagaagatgacgcagcaaatgctgccgttcccgcctcccctccccgccatcacccaggcttcaccacttcagcacccgcggggcttcctctggccccgggagtctactctgccctcctgtgtggttgagaccagggtgctggggagctgactctccctggagcagcgtgaatcccagctctctcagcccctcaggcagaaaagccctgaggtgtgtcctccacaacttcccagagtcccctcagacaagaatctccgggtggtccacccaggaaacctgtctgagaaggaacgcggtgctgggtgtcttcctttccctgactggcttccacatccctctcccagggtctcctggtctcgctgccttaaaaaaaaattcttgcacaaatatctgtgtcaggatctgcttctggaggaagctgaacaaatggtattcaaccttaaacctcccgtggtttgtgccatgggaagatggtgatgctactctttaggctaggaaagaagacagagaagagggttttcatccattcgtatcatttggggaggggagggatggaggggaggaaaaacgatacatttaactggggacctgttgagtctaaagaacttgcaagaacccctaggtgggatgtctcaatagaacatgagagagaggctgtggggcctggatttcatggggccaatcaatgcaaagactacccataccgctgtgcttctagctcacacctttctttcctggacgataaattgagaacagaaatggtaagaactctgctaaaggaaacacactgcatcagagagaacggcccccaaataaagcccctaactgtcattccaacaactgcatggagaaatggctgtggcgtgacatggggtcggggggaaggcgggcgtctcttaccacggcgaggtccccatttggcctgcatgtgggaatataggatggatcagtttaaatgaaaaatagatagtctagtttgcaagtggaatggcttttctttttttctaccctggttactggagggcagttgctgccatgcaaaggaataaacacaaagaagaaattgcatgaaatgagaatatgtatttttgatagcaaaggaatggaagaatgtattgtatatacagaaaaggccttgtagattgaattagcccgtcccaaactgaagccagggtcaccacatggcaattttcaaacaaatactctccatcgtccattacacatacgcgaggatttgaccttttacagcactattcattctccaagcatctcaacagtctttgcaaaaactaaaaacacaaccatgggcactgcctcggtcttataaatggcatgcagaaaattttatgctctgctcacagggagatacgaggccagggccaaagtgttcacagccccaggggaaaagctgtacctgagaaataaaagttcttaaactgggtttttttctttcccatgtaataaacttgtgatagtttattataagatattgaatatagttccctgtgctatacggtaagtccttgttgtttatctgttttacatacagtagttcgtttcatgctaatcccagactcctaatttatccctcccgccccttccttccctggtaaccacaagcttgtttaattagtcattaacaaaaaaaaagaaaaagaaagaaagaatgccattagcagcaatatggatggacctagagattatcatgccaagtgaagtaggtcatacacagaaagataaatgttgtatgctatcccttatatatgaaatcatttacaaaatggaaaactgggcttaaaagggcttttgtatgtcaccatttcccacaaagtacaaacacaaaagtgttgatgattatcttcaataccaagtgactcaaccctagtgccatctgggcaaagataaagggatttggcccaaaaaccacaatgtttttttttttcctcctctgtctttgtggcttccatacacagctcaggtgaggcactgaagctggaaataagtttttcctttggaaaggttacccccctcaaaaaaagggagcctccccttcatatgtgaacaccacaactgctggtctgctgagattgattagttatatttttgagaagattaacttggacacacagctgactgtggttaaagcaagacctttcactgcaaaaaaaaatttcagtggagtcaacagctcctctttggaattcatctacactctaagaccaaattaggctgctaagtcgcttcagtcatgtctgactctgtgcgaccccatagacggcagcccaccaggctcccccatccctgggattctccaggcaagaacactagagtgggttgccatttccttctccaatgcatgaaactgaaaagtggaagtgaagtcgctcagtcgtgtctgactcctagcgaccccatggactgcagcctacaggctcctccgtccatgggagtttccaggcaagagtacgggagtggggtgccatcgccttctcccaagaccaaactaggctagtgaggggcaaacagggctaagtgtgcgcacattgttcttagt

SEQ ID NO: 46283 - DNA, 787 bp, Bovine  19866881339582
  misc_feature (1)..(1): n is a, c, g, or t
ncctcgaatgtggatttgcatttttaaaacccaagtgttgctgattcttcccttcaaaataagagttaacttttttaaagtgtgagagtttatataatttgtaataaaagtctgtcaagcaaatcacaggaagctctccacttccccctcaacacaccacacacagttaaacatattactctttgaggtctagctgtaacttgactaataaacccttcttaaaatatagccaagccaaacgttaagccagcaatgcagggcttgtatatacatcacaggatgctagctgtatgggtcacagcactctgacaggcaattcctaggcagttattttgacattagaaagtcacaatccatcaacttaacagcagggtgataatttggggaccggggagatagctattcaaaatgacactgtgggaagtaaacagtagttcaaatagcccctgtttgagaatgaagacatcaactaagcagaatttctttccacctctagaaccaggtattatgtaatatgtttttgtgtaagcatgttatttatggcgtttgaatagccctgagaggctaacaagcctgcaggtaccgggaccctttggagatgaggagaaatagatctgccaccacaagactaaagaatgacaaagagtggcttcttccccatggtttgtcacgaaccacttccaacaaccacgagccagtctcagaagatgcaactcggctctttctgaaatgaaaaacgctcagctctgcagccgtctgcatccatgacatgggttccttgcatgtg

SEQ ID NO: 46284 - DNA, 1330 bp, Bovine  19866881349564
  misc_feature (1)..(1): n is a, c, g, or t
nccgtgttgtgaacccataaagtttatgacacggcttgtagctgctcatttactaataccggtgatatttaaagctcttcatagcgaaggcctgggccacttgctgcctcgcccctgtgctgtcctacatcctgttgagacaattgaggtcacctcccttctcttgtgtgcacactcacattgaacacgacctagtggaaccggagcccgagccggccagctgggagctcccaacatcccccagacctttcaaggtcctttgcatagctggctgtgtgagcaaggaagctttttcttccgcctttcttcttagaaggaaattagttgggatgccttaaagtccggcaggtcaaaagggctcacggattttgtcagagcgtctttagaaagtcactttttattacattctcctagattggcaaatagcaaattagaaataagatttaaaaatcactatattctagggttagagaaggttctacaggaagggggacaattgattttattgataccaatggggaggaggagctcggttggaaattttaacttttaaacttataagactgcttttatctttcagtaatgaaagtgctgggaaagtgggtggcaaagtgtagaggaaaaaaagttttgttttaacagctttcaggctcctctttgagcctcatctgggcactgatggacacagcttctagacagtaaagtccacagatgacccggaaaaccctcttccgggactttttcaactgtgggttaatctgcagtggaaattcaaatccattcaaaccacaattacagaatccagaaagaaagtattgcttatagatgggctttcaaactgcttgatcagggagtaacagttctgaatgtctccttttttctgctttttcccttcgaggttagctagcatttgcaaataagtgaaccaacctccgacaccccaaagaagatgagataaaacctgaaacacttgagtcccacaatcagaggcggcctcccagagtttaggcttagggtaggggtggtcatcctcctgccccaccttttgcacacactaggttctggcctgggtgcaagggcccggagagactggatgggctctggaggaaaattgcaaagatgtaaaaagggaatttgtgaggtaccaggactgctttctgccaatatttgaggaatggtcacgtgagagggcagacttgcacagtgtagcttcagagggcagaggaaagagcagagagtggaaatgctggatttcttttttacattttttattgtagtaaaatatatataacataaaatcaatcatcacaaccaattttaggcgtacagt

SEQ ID NO: 46285 - DNA, 1035 bp, Bovine  19866881375958
  misc_feature (1)..(1): n is a, c, g, or t
nctgaggtgtgaactatgtcctcccgtggagaacactgccttcatgtaatggcctagaattgtgagttgttttctaatgaccctacttgttaatccagccaacctctctagagcatgaaacgcagctgtatttggaagggaacaaagtggggataccctgtgcgtaatcacgcagtcgctcagtcgtgtccgactctgtgaccctatgggctggagcctgccaggctcctctgtccatggaattcttcaggcaagaatactgcagtgggttgccatctcctcctccaggaggccctcccgaccaaggcactgaacccaatctccgtcgttttcctgccttggtaggcaggttctttaccaccgagccacctgggaagctgggacaccctgtgcttcaagaaatattcctgaaatgtgctgtgatttctcccttgtaggggaaggcaaacctcaaataacatcttactgggttttaatctgaccttaagaaagagggaaatcaaattatagtgaattgctgctttctgacatttataggaagagaggaatttcataatccagaaggtttgggttggctggaccgctagatcctagaagtgctgtgtaccagtggctactcaaatacatgttgctagataagaaaatatatacacaagaggagaaaagagtacatgtattttatttttctattatttttctttctttttattaatttttattggagtatagttgttttgcagtgtgttagtttctgctgtacagcaatgtgaatcgggtatatgtatacatagatctcctcttttttaagatttccttcctatttaggtcaccacagaacattgaggagagttccctgtgttatgcagtaggttctcattagttatctattttatacatagtagagagtacacatattttaaatatgatttatatactccataaagctggaaccgtggaattaactagttaatagtttattaatttgttttaaaaatctatattggttttttaatgacaagaagaatgcatattaag

SEQ ID NO: 46286 - DNA, 1291 bp, Bovine  19866881393058
  misc_feature (1)..(1): n is a, c, g, or t
ntttcactttcattgataaactactcaccaggccagaggcaactagcatgttgtaggctcttgaaatcatcatgtgaagaattagttattccatgttaagtacgtcatgggagtacttaacatgaggtggctcagacagtaaagagtctgcctgcaatgcaggagacatgagtgtgatccctgagtcagaaagatctcctgaagaaggaattgcaacccaccctagtattctggcctggagaatcccatggacagaagagcctggtgggctacagttcactgggtggcagagagtcggacacgactcacaacacacacacacacacatacagtatgaagaaaaagaatgagtggataaaagttgtgcatggtaactaaattcaaatatttgaagttctgtcaagtgaaaaagagagtagacttactctgaattgtcattcatcctaaattcttaccttgtgtctgatactttattcattcattcattcatccaagcagcagtaactgagtgcttctctaccagggattagggatctgcagagctgaatagagtatggtccgagcttgcaagggtctcagagccaagcagggagaggagatgcaaacaaataattaaaattcagcttgaaaagtatttccatagatttctgaaatgctgagcaagaaacagagcctaggaccaatagggaaaaagttagagggaaaataactttgatgtcttaagataaggatctattgaataaataaaatcgcccccaagtgtaacagaagatcttgtgtgttatgaagaagctggtttaaccgcatgtcaggggtgatttttttaaagattgcaagtaaagagggggtgagatggggagcagaaatgttgagaattttgttgagcaaatgctgctttgcttggtttctattataaaatgggaaatctgctcctctagtgggggggaagggggtgtggggggatggggagcatcctttcaatatactgaattgaaagccttttgagaataatacttgggtgttgacacacattacagccatgaggatttgattagttgagagttggagtccctacctggtgcttgttcattgagaaaaagttttgagcatttacctggctcataaaagttgtatggaatgcagtctctgctgacagttcttttaaacgttgacacaaaacaaccgcagagcataattacaaatcaatgtgctaacaggtgcgagccaatataatgtgaattgggtgtgtaaatgtttgaggaaactcagagtaacagtaggctagaagatt

SEQ ID NO: 46287 - DNA, 1368 bp, Bovine  19866881412568
  misc_feature (1)..(1): n is a, c, g, or t
nagagaaatgatttcctgctttctcaggcctggtagcactgaatggcaaagcaaattgaatggcaaaggcagagcaccgtattgtcagttttacagttttttgtctgttagcagatcaggtgaatgctgtattttttcttttcaaaatgtctttataaatttcatctccacgctttctgtggttttgaggtctacttttagaattatatctgaagttatatataaaattatatttaaaattttacttgtttaaaaggatactttttgcttaagtatgttgcagcttggttacccattactgccttttgtttactgctgtttctaggtgcctagaatgttgcttggtgcacttgactcttgagtgagtgaatgaatgaatgactgaatctcaatttatgaagtgtatttcatcagaaataatttctaaatgttttttcaggaaagattttataatttaccagaaaccaaatgtttctccttcacaagtaactgaaaataattttcctgaaaaggtaagaattgttccaagtttttctaaaggatttaagtaaaggaaccactcacttgccatcttgactgcctgagctataatttttaagtgacttttttttttttaagttcttattaatcattcacaagttttgttattttgtatttgtttttccgtacaaatgttgaactctgttgtgacattttattagagaaaaataattgagatgccagtgtatgtgattaactagactgtactgttttacatcagtatatacattagatagaaaaataacttgtgaaaataggttctactgcatccagaaacacttaactgtgatatatttcccattacagagatagtttactggctacggtgttgttatctagtcacaaagcagaaacaactgaaaaattatgtaaagcctagaaaggggtggcggggggaacaccatgattcattactagagaattttgttttcatgatctgcattgggttatccagcccaagttgaagtgtctcgtcaccatgtttatggtggcagggggcagggagccgaggtaaatacgcctttgtaaggactcgtgggtgtccaaggtgcctggctctggatctggcctttacagtgtaatttttggaacatgacgtagtctaagcaaagtcaatgtgtgttgctctttgcgtcagtgatcgattatttagaaggtacataaagctgtaaagcagaaaaaaaatgtacttttgattctgcttcttagaggtaagcatcattaaagttttagaatattttcttacagtcttctaacccttctcttgcaagtagttgaaatcatttgttcttacagattgtgtggatttttgtgatgcagtaagcgttt

SEQ ID NO: 46288 - DNA, 1981 bp, Bovine  19866881700706
  misc_feature (1)..(1): n is a, c, g, or t
naataaggctcaggatgataatagtagaagcagcaacaggagtaacaacagtagtgagtagaagaaaacgtgacttctgaaggaaggcagaaaatgacctggattcagttttgcagaaatacagactttgatcaactttcccaagtctatcaagataccaaattactctgtggacaattctaagatgaggtaaaccttatccagcacagtgaggaaagaaacgtctggattccagtggcagcgcctctatgctgctgacttgccgtcttgatttccccaagtacatgcttgttacaagataactgtatttgaaggtatactgcaactggccttaccatcactgctctatttgcactaaacaatgcgtgagaagcctaaaagccttagcacaatttctgacgtatgagattctgagaacgggctcccttgctggggcctctgactctacaacaaggacagaggacagagccaacttccagttctaccacttcttagtgatttggcagaggggatgctggagcctgactgcctggattggaaccccagtcgcaactctcattagctgtgtaaacatgacccagtgtcttagcccgtttctcagttttcatctgtacaatgggaacactaatagtgccttcctctagggttgttagaagttcaagtgggttcagcagcttggagcaggcgctgtgctaactaactagcatcactgactcaatggacaggagtttgagcaaactccagaagacagcggaggacggaagagcctggcggggtcgcaaagagtcggatgtgacttagcaactgaacagcaacaataacaaggcactaagcaactgactcttcaggaaaaaccttaaacaattaatcagtgtcacaaatcctccatccctggaagcctgagcacgtgagtgtgtgactccaggccccattttcttgtaataaccacctgttcccttctgtgactcagatcagcccttgtctcgtggagttgcaagtcactgaaaaacaggaaagagccacacactctctctcacatgaatcacccagttcggtaaaatccaggatttcaacacggagggaggccccttaaagtggcttctgacacgaggagttttagtcacatgatcagttgagtgctcatcgtgagaaaagccaggcagggttaagaaaggccacactgaagatgcaaaggaaggctgcccaaaacaaacctttctggaaggcatacttaggcatagggagagctccggctaacggcagtgaaacctgaggtcatgaatggcagaaaactgacttttctttggaagaaagatgctaagatgtttgacagccaatcagagtcagcaggtaataaggatgcctcgtttaccaggcatctcctggctcccgccttcttcggcagcacaaacaaaggtatcactggataaggagctgccctttacagacaaaccgtagtgtaactacagatgcataaaattctgggaaatagatggaggtggcacagcaaaggcccacgggaacccacaagatacaacacaaaccattcaccagctccccgttgttgattcaagaaaaccttggccattttaccgctgagctcctaacacatttgaaacaattcagcttggactcatttgcaagtcattgctttctgaaatccacctctcatggttaagatgttttcagcctcaattttatgaaattaatagaatgcgggagacagaacatttctttggccagtttccaaactaaaaatagttgaaatgacttgtatctttttattttcaaaaaacccagtacaagaagattaaaaagatattcccagccaacaactgaggtgccaagtttctgtcaactgcttggttctaatttggagagttagatttacatgtgatatcttgaaaagtgtggtttttcagaaagagaagtgatgtaaggccacagcaggcaacttttaatcaggcgtctaatgacgatc

SEQ ID NO: 46289 - DNA, 764 bp, Bovine  19866881860908
  misc_feature (1)..(1): n is a, c, g, or t
natctgtcttgagaactttttcatcccccccaaactgaagcctcgtacccattaaccaagaattcttccctccgctctgccctggtaatcattattctactttctgtctctatgaacataactacactagaaacctcatgtaaagtggaattttaaaaaattgttaatattcttttgtagctgcctcaatgctttttagaaagaagttgtagtatgtcataaaaatgtattactaattgataccactttcaccatcaaattatacatgatgtttcgtttagtgtttcccctccccatttctttaagttgtggaattgaatagggagtgtcatgatgccaaaggagccctgtttttcctgactttttttgtgatgagaaaacatgttgtgggcctgtgcagctcctcattatattttttaaagaatgattttaaattttaaaagagatgtagagggtggggaaaggtcggcagagaattgggttctgtctctcagtgaagacggcaggccccacgatgatttccaaatgccatttcagctctttggagattgacaatacccttttaaatggagaataattggtcaccaccttcctttaaatggactgtgagtcaaatttcactaaatgtcaccgccaggtgaattagaggttctgcttcactctgaaatccctttgctcagtgacgcgtcagtcaggtcttctggaatgttcccatcaccccaggtctgtgcccctcaggagtgctcagggctggttggaagaaa

SEQ ID NO: 46290 - DNA, 1512 bp, Bovine  19866881924810
  misc_feature (1)..(1): n is a, c, g, or t
nacacaggagtgggttaccatttcctcctccaggggatcgtcctgacccggggatcaaaccagtatctcctgtgactcctgcatttgcagggggattcttcacctgctgagcattcagtcaggaaatgctggaagttttagagtcgtggagtggcctgggaaacggtggggaagaatctagaagcagcgggtaacaaggatgggaagaagggaaaaataggatgttcagggaaccgtatggttcacagggagagaagtacaatcctcctggtaacacaaaactcgccccgatgttaggaggtggtatttcctgacatcacacttgcttccattcccagaacagaggaggaactaacataactaaataaaaggcttcccttgggacttgccaggtggtccagtggttaagaatccaccttccaatgcagaggatgcaggttccatccttggtccggaaccaagatcccgcaagccttggggcaactaagcccgagtgctacagagcccttgtgctgcaactgagactccacacagccaaataaataagtaaaaaggctctcctagagtccccacagctcgggaatcagagcctttctcactaaaagaaatttgcaaatccaacctcgccttccctggggctacagtggggctcacagggtgaccaaacatccaggtctcaaaggactgatggattccctggatgcaagactttggtttctttcttttctctttttttgcaagtgaaatatatttatcagcccacttaataatgctttttgacatttaagaaactgtttttacgcggtcctgtcccaagacacatttacacacacatgctgcctgcaccatcagaacttacagtctgagcaagaaccaggcagggtccagtgcgggctccgtggcatcctctactaacaggaaattagtttaaaatataacagggattgacacatacatatcaccatatataagatacacaaccaacaaggacctactgcacagcacaggggactcgactcagagcagagtttcaaagtctactcagtcgtagacgttgggctttaactggaacggttctgggcaaaccagctcgagtgggtctctgcacacacacgactcacatgaaggaaagctgactcttcctgcacaagttctgctggaaacttcccatcacccagactgaatggtggctgccacaatccctgtctctcagcagctttaggacccccgaaggtcaaggtcgtgccttgctatcccgtcagtgacctacgactttgcagccagggctccaccttgcagtgcctgggggagaagcctggtggagacgtggaatctcaggccctgcccagacctacaaaatcaaaacctacaggtaacaggacccccggacatctctagacattctcacaccccagagcaggaggtctggggataaagttccttgcttacgcagtccgtgggtctgtgcatatgccgaaaattttatcttttcagtatcagggtgtgtgtgtt

SEQ ID NO: 46291 - DNA, 4050 bp, Bovine  19866880366375
  misc_feature (1)..(1): n is a, c, g, or t
nataggctagtttaaatgataaatgctgcccctcttgaaaatattcttaaaatattgaaatcaagtccctctagtccttgcaaataacttttctcaggaagggaaaatactgatcagttcagttcagttcaggtggtcagtgatgtctgactctttgggaccccatggactgcagaaaatactgatcaaggaatgtctaaacagtgagaatggcagattcatggataccatgataaaaggctatttgggacttcacatttttcctccattgacctttactgtggcactgttgacagtgctcatctgatacttaataaaaaatgatcaccttgattctttgaaaaacagagaccagtttacataaaatcccaccacctgctccagtgtaaatggtaacacccacccacaagccctgtccttcagggattcaaggagaacctttgtgctatgtctttccagcccgtggtggccaggactccctgcaggtggcaaaaaaggtgtcatttagcgggtgatcggtaagtattattgaaggactgccttcaggcagactttcttccctgactcccccattccctttcctctaaccacgatcagtgttttctcctggtccacctgggctgctccaatagcaagaagcttataaacataaacaaagaaaagaagacgttcaggttagaggaattttcaggaggagaattaaaaactgaaaattagaaaacaatttaaaaattagaaaattaaaaaccatgtttcttttttaaaatttatttatttttagttgaaggataattgctttacaatgttgttttggtttctgccataaatcggcattgattagtcatagggatacatatgtcccatccctcttgaaggttccttcccccacctccccatccatcccacccctctaggctgtcacagagcactgaaaactgtgtttcttaaacttagcaagaagggatgttcaaaacaggaggcatatgtgcttagcttgaagtttgcttgaccttgtttggacatcacgtggaccctcttatctgcctcatgataattttttgtcagctcctgcaaaatgtctggactacagtgaaagctaatctacgctgtttggctcaagtgggttgggaaataaaaccatgtgaaaatcttggggctagaaaagaagtccaaatggattaggatgtgcttttaattcgtgagttctattgatacaggtaactgtgtataaactggaaatgtaagctgccttaattccaaaaggtggttttagcacatgtgtgatttacagatccgttcctgaatttttacagtgcatttttgagtctcagttctagagaacttataagacaagtcccagccacggaagtaggtacagtacatacggtagacctcttacctcatttcagactggccagagtgtaatgtgatctcactgctttgatagccttggtaccttaaaggaatgaatgttcagagatcgtcattgggtcctttgatgaaaagaactgatctagaagaaagaaatcccagccagcttgagaaatcaagtaatcagagaaaccacacgggcactgggacacttagcatctggcacagtaggcagaatctactctggtaacaaagcagcctttcccaggtcatccaatagggaaggcagggagtaacccataacgatggggcccagcactgggcgtattatataattagcactctgttactcaggggcttattccccagcagatgttctgtgctctttcctgctgcttgactgttagccagcttggagcttaacaccttcactagaatgttggtttttctataagagatgttagaacattttcacaagccacaatttaaaagcaagggtgataagtacacccgtgttctttattcctattatgacattcaaaacaatactttccgttttaatcatacctttgcttgactgaagaccagtgacagtccagaatttttatccagttctcaaacctcttactgatgagcaggagctcagtgagccagaagttaccacttacttttccttccttgaaattcagtctgactacaagaaagcgcttagttctgggagctatcttggtggtgtcagtgcttcacttgtacgttaatggattattgagagaaactttgtcagatccttagagctggagaggccttggggtcatcactgttttacatttgaagaagtccaagacaaagaaataggagtcgttatctaaaatcacaaggatattgaatgcaggaaagtaagatttgcactttaaaatatgttaagaggatagagctcatcttaagtgtttttaccacacagaaaacccaatccacaccaagccacacacaaaaaggaccacaaaaaacccaacctgcaccaagctattcatgaaacgacacaaggacatttttggatgtgatggagatatttagtaccttgaaaagtatcatgggaatatacataagtccaaactcatcaagatgtgtacattaaatgtatgcaaattttgtataccagttatgcatcaataatgggcttccttggtggctcagttggtaaacaatctgcgtacaatgtaggagaccagagttcgattcctgggtagggaagatgccctgaagaaggaaatggaaactcaccccaatattcttgcctggagaattccatggacaaaggagcctggcgggtgtcagtccatggggtcaccaaagagtcagacacaattgagtgactaatactttcactttcatacctcaataaaacttttcctcccgtttctccaaacaatgctttcttttttgaaaatccttttttcccacagctttattgagatctgtttgacatatgacattgtgtaaatttaaggtgtacaacaataaaagctttaaaaagaaaaaagaaataaaaagacgagcactgactgagagactgtaattacaattaatatattttccggaagatttgtatccagaatatataaataactccttcaattcaacaataaaagatacatagtccactaaaatatgcaaaagcacagatactttcaaagaaagagatataacaatatgagatgaacagcaacttaaaaagagattcgcttgaggtgtttagggccaggttcacagctctttttactaagctattcggaacgaaattatctagtcccatgggtggataatgcaatcgtcataatgcagtcattaacagtaagttatacccagatgtccaaaagactcagctacaagatagaaatttagtttagcatggtttccatgaacatacagctttaatgggttttcctcaaaccagaccgcttagttgattgcaatgcctggattggtgggctgctcgtcacagctctttgaggctccctggccaccaagagagtccagaggttcatgctgccttcttctgtgacgttatggctgagtgtattaatctacttcctcctctccatctgccagcaatatatgccataaaatctgagagatttgagaaatgaataaaatatacctttgttttcttctcaaactgggaatgagtatgagacagccagtatgagctatcctgcattatttgtttctctctagagcagtgtcggagttttcttcctcataaacagttaagtagcacctctcaggccaaagggcgacctcagtatattttaaagcaggagacattgctggtgtgatttaagcccagaggccttcttagcctgggcttctgtgagcttaaggaagaatttgtcatcttaagaaactttgtcatgagtctcctcccgctggtcaggtgtggaagtctgaagtctcctgccaggcgagataactgattggcagtgacactcaggctactctgctgatctttgtaaaggaaccaggaaaaaaggaggctgggacaataggtccaccgctctgcgtctgtgctgtgtgatgtggaatagaaaacgaacttcagaggttaaaccgtttcacaagcccacatcaagccgcgccacctcctggcagaccactgagaggctgtcacaacaaggaaat

SEQ ID NO: 46292 - DNA, 1596 bp, Bovine  19866880443336
  misc_feature (1)..(1): n is a, c, g, or t
ntttctgacactgtccttacatcttcttgcccattaatcaggcaggatcagcagagcccagggaacaattggcccagggctacacccctgggaagcagaggttttgatcagaatgcctctccatgatctcctgaactcatctgaggagatttcttcctttattccaaagaaggtttggtttctgaaaaaaattttggccaccttagttccctgaccagggatattgaacccatgctccctggagtggaagcacagtcttaaccactgaattgtcaaggaaggaagtccccaaaagaaggtttccattgccataggttattcatagcaaccgattacaccacaaaagctattattgttaatatacttttagcaaagtcaaggcacacacgatacatcaaaaatgcatcctcaaggaacttgattccctttccactgcacctgttattctttgatatgcaaaatgttatcagtgcacataggctactgtcaaaatatttacacaaggcaatgaaaacatgcttagaatgtaatagtctgcaagatcctaattgcctaatgacagttcagagtcctacaatacactgcttcaatctctggaccacccagatagaatgctgaggtatactcttttaaatgaataaaaatagttggagttataagcacaaagatcttaaaaacatcaagtcatcattgccaggttctctgaccgggcttagaaacacatatgctttcctagtggccttaaataaaacatctgaacttgatggtgattttaatatagaacacatttaatttgatgaaacccatctattgagttgctaatgtttccattagctgtttattgttttaatagatatatactacttcagtaatatgaaaaggaaaacatgctacaagataaataagtcatggggtgtgtatatatgtatatacacataagaaatattatcaataatactgtaataactttttatgggggcagatggttattagactttgtagtaatcattttttggtgtgtatctaatgtcaaatcacttcatggtacacctgaaactaccatagtactgtctgttaactatgatacagtacaataaaaacagtgtaaaaaaaaagaaaagcatgcaatgcttgccttcctatatttttcttacagttaatttactcatccctctacatgttcacacaccacactgccacaacttgtagacatatatatgtgtatgtgtactgctgctgctgctaagtcgcttcattcgtgtccgactctgtgtgaccccatagatggcagcccaccaggctcccccgtccctgggattctccaggcaagaacactggagtgggttgccatttccttctccaatgaatgaaagtgaaaagtgaaagtgaaatcgctcagtcgggtctgactctacgtgactccatggactgcagcccaccaggctcctctgtccatgggattttccaggcaagagtactggagtgggttgccactaacatacagtatatatgtagatagacttatttacttttatcaaggtaaaattatgatttgcatatcattctgtagttattcccactgcctacaacatgttt

SEQ ID NO: 46293 - DNA, 2236 bp, Bovine  19866880540798
  misc_feature (1)..(1): n is a, c, g, or t
ntaatggtgaaagtaggcacccttgccttgttcctgactttagaggaaatgctttcaatttttcaccattgaggataatgtttgctgtgggtttgtcataaatagcttttattatgttgaggtatgttccttctattcctgctttctggagagtttttatcataaatggatgttgaattttgtcaaaggctttctctgcatctattgagataatcatatggtttttatttttcaatttgttaatgtggtgtattacattgattgatttgcggatattgaagaatccttgcatccctgggataaagcccacttggtcatggtgtatgatctttttaatgtgttgttagattctgattgctaaaattttgttaaggatttttgcatctatattcatcagtgatattggtctgtagtgttcttttttgtgggatctttgttaggttttggtattagggtgatgttggcctcaaaaaatatggaacacttcacaaatttgcttgtcatccttgcgcaggggccgtgctaatcttgtctgtattgttccaattttagtatatgtgctgccgaagcgagcaccctatcccacttttcatgcatactttatttcctcattttctcagtgaattgagagaatgtaacaattgctcaccctaaaataaatgaacttttaaagggcaaaatccaaaggacaaagactgcaggtgaattcactgtgaaactaatgaaacatgtttcagggcacctcttcctgggctctgggaggtctagctatgtgttcatgttgtcatatatttttgcaagatttgcagaagtaagccttttgtttttgtttaatttaaaatgctgtgtctttctaccctgatttctccttcaccacagtgtgccttatatttgatggtgactgtggtcatttttgagattgggctaaggaagtttatttgctccaggatgcatattcctgtgttcctttttccttctacttgaaaagtagggagtagaattctttttttatatttagtcatctaaaaataagaaaacctgaatatatacattagctggtatattagccttggaatcacctttcctgtgcgtccactgacagatttttagttcttatctgtgcacctgttcttaaatatttggtgtcaaatagctaaatcattttaaataaccaactcagttttcagtctttcaggcagatactgtggaaagaatctctctggatttgacagcaacttgaatttcaatgacttgtattgttggtaaattattccatttgctctgattcatttatcctgggagagaaaatgcagtgtgcctatctcaacctccccatgtacaacagtactgattattggtattgaccccttccttttctatcattctgcactgcaatggaatcagtttcaaaagctttcaaatagatttttatttactgaagatttttggcaactgctatctatattattttatgctttcacctcattaaataattatactgcttgattatttattatattcctataccaaatgtgttggggattaaggaaggcagtgtttataacatactctttatagctaattaggtaatctattgttgaattttcttttgcagtattttcattgacttttcttgttagaatacttttcttcttgggacattccaagtgtaacacagtctctctttgtcccttttatgaaaatgtcaatagaatagctctaatatttccttgaagttcacccacattatatcattttggttatatttccttttgtctgaattacttctttgaataaatatgacttttcacaatctgatcagcaaaaaaatatactgaagataatgtgattgattgatacacatgatggttttatcactctgattgccatgtaagtggtccacagcaaatgcttagtctcagaacagatactcctgaaccagggactaattaaagcaatgatcagagtatttttcagatgattttcttatgtatttaaagtgtgaattgacatgactaaggaacactccccatcctcccagtctacctcccactcacccttaccttcatatatatataaaaaacccttccatgatatcttctctgatattttatcttaatgcaaggtatatctctgtatcttgactacaaagacaactagtacctatgtaacactgtggtcatgatacagataaggactgaagcgacaagctctaggcttaaacagcccaatggaa

SEQ ID NO: 46294 - DNA, 1916 bp, Bovine  19866880597846
  misc_feature (1)..(1): n is a, c, g, or t
ncttattctacctctgatgaaagagagtaattaaatgagccccaaatgttgcccagaatatggaactctgcagctgaaaactgatcccttggtgaaaacagcatctcaccctcttgacacagtaaggcatttacaactgccacagtgcaactatctaatgatccaaaggacaaatgggaacttggactttgaacgtatgagaccagtcagcattctctccattaacctccatttaccttcatgggaaggaggccctgcagtggcttttgatccaagggcctgaatctacaattgccacatagccaatcagaaccgtgaatctgccacaaatactagttgccaactaccaccaaagaaactgcaacttgattcatgcctctccagccctctactacccctaagtccaagcttccatcatctgttgcctgggttattgcaatggtcttccgagtttccttacttctgctattatgttccaccaatttatctccatatattaaaccagtgcaatctttgaaaacatggattttctatgtcacctcccaccataccccactgaaaagcttgtggttttttaactacatttagaataaaccccaaactccttggcctggacaagtccccatgaagtgacctccccagaatctcctcctacacatggtgttccagacaccaaacttgaacatgcagagttctttcctgttgcggtggccctatcgtggtggctgttgcctctgtctggaagacattcacttctattctgggcataaactgctccctctcatctcagagtctccactacaatatcacctgctcagcatagctgtccctgggcacctgtctcaaggatcctctcccatcactctatcaaatcagcccctttatttcatcttaagaccacttattacattctataaatatcctttatgtttacttctgtcttcctacatgaaaatataaacttctgaggatgaggaatgttgtttctcctttttctaacctagaatatttcctgaaaaatttggaaaattaattgaaattcattgggaagtgctgtatgccattaaaatccatcaatcgaaggctaccggtgtcagggtatgaggaaagctgaatgaaaacagaataaagcagctgatcacaacccaggtgcccatcagcatcacaattatgcaagcgccctctgacctgccaaatcatagtcttcaagggcagagtgaacatccttagtcaggaagttccatgggtgattctgctgcacctttgtcttaaaatgatcagaaagaacctttccttttcctctggaatcatcagggctcataatggactgttatgggattatgacacacggtcagaacaatgcttcaacggtcctgtcttaggagatgcagtgagcatagaggtaccctggcaggaaccatgacaagtgaaagcagagctctcagaagaaatgttttgccacatcccaatcttccagggaagtgtatgaagcaactcagatcaaaagacttctgtgggggtgtatgtgagtagtatgtgtgtgtgtgtttcaactagctctttttataaaagtaaaatattgtagaaaatttggaaaatacagaaaaaatataaaggagatattttagtcctgaggaacaaaaagctatagccactaatacatgtattgagtacttacaatctgtcaggcgtttccctatatgcttcacatgtatttatttatttaactcttacaacaacccaatgagatgttttcctcacccattttactgatgacaatacggaggcacagtgaggtcagaaaagttgccccagatcatacaaccctaggattttaatttagcaattttactccagaactcacgttcttaactactatgcaataaagctctgtgtagttgtgtatatttatattt

SEQ ID NO: 46295 - DNA, 1353 bp, Bovine  19866880606574
  misc_feature (1)..(1): n is a, c, g, or t
ncttatttcctgcttcctgtggagaactctagaatggaagaaaccaaggctgtgagggggtggagaatgtggcagggatcctaactttcttgctgaaggaagctcttaataagcacccatctgccttcagggaagaaaacatgattctctttagcctttcaaattcagtgttgaggaccaaatgctctcagcggcaatctgtgtcccagtgccttttcctgtggacttagtttcaaatgttctttcctaaaaaatccattgaagatgacataaaacccagatacttacccaccacattttatttccttagtgagtaattaatgacatttcttcagctattttaatgtgttctctgagtcaggtaaaggagaccataatagttaatcaaagaactaattcctgggtacttaaaaatattttaagcacttaatcatacttaaaatggactgttaatgaagcttataaaccctttggcagctctgaaagtgaatttctctgaaggcttagagagtattaatccacttagatttttaccaaacaaatattattcatgctttaattaatgggaaaagatatttagaagggtgaggttcgtgttccattgtccttcactgggtctagtaattacttactccacgtgggaaaccctgagcatggattaaacattcttcaagttattctcaaacttagagaaagttagtggtctacttttttttattaataaagaaaaaaatgagaagacaaactgaagataagaaagaatgattttgctctaatgttggcatctaaggtaaataggtcacatttgctttttctcaagattactggcccataagaaaaaaaaaaaaaatgaaaaaacagattattccattttagtggcttgtttcaatagtagtattaatataaattgccttctcacttgtttttaaaataaaggaatgaatgaaataatttatttaatatagatagcaatatattaaaagtcattttttaaaaaagatttttttgatgaccattttaatctttgttgaatttgttacagtattgcttctgttttatgttttggtttttttttgcctgagaggcatgtgggatcttaactccccaaccagggttcaaaccggcaacccccacactagaaggcaaagtcccaaccactggactgccagggaagtccccttaaaagcctttaatttgatagcaaggctaaagtaaaggatgaacgaggatcaagatgaaaaatagacagaaaatgaatactgtcaacctttcccccgagaaaagactgatactgctttttaaaagtaagcaattttttagagcaggtatggaaacttttctgtaaaagagcca

SEQ ID NO: 46296 - DNA, 1280 bp, Bovine  19866881020153
  misc_feature (1)..(1): n is a, c, g, or t
nttataatatcagtttataaaggaaaagtaactttttgtagtatactatcttctgtctgaaatcaaaatgactagtaaattcaattacaagatttaattcatctttatactttcttactatgtttttatgagacacagtcaacaaacagttagttaaacctatctcctgctatgcagatctaatccagtggattgctcctgaatgtgtaactgtgtttaatgctaactttgggaagattctaggagaatatggccactcatatccctctgatcaaagtatttcttttgaagtctttttagagtggtaatatatttcatgttagaactgttaaggatgagggacccaatggcacctttgtctggaaagaaagaggatacctaataattaagtgaaatggcaattatacctaccatctcacactaatattctacagccttctgaaagtcataaatcaactaagaaattactccgtgtcctgtgatgtcttcattttgaatatgattagaaagtattaaaaatatgtgtgtttattttcttggagtattgggtaatctacattataatatataaaataattttcaataaagctggtcacaatattccttacctcttctgataagtagaattttacatcatagtggtttgaattttgttttgttttttcttgttgtcttttttattctttacggtatgacaagcttgtttttcaacttagaaaaaatagttggacagttatagatttttggaaaaatgaatattggaaaacagtagaattttgtatgatatctgctttaggagactaaataatttttacctgtcagcatatcaagtagattattgaagtatatagatagctttttagttttctttataccatctgtcaactaggtagagagattgagaattgtatcatttaagtgagaagtggcttgttttaatttatttcatatgtgagttgagcagacaattgaggtaataatttttctctttcttagaataattaataattttaattaagaatttagactgttatttttcctatattattaaataacttaatctctaaaacttgattatttctatagttctaaccattttatgttttctttaaggggggtaacaatggatgttggtatgacaaagtttgagaccaaaaccaaagttattacattaatggatgctccaggccataaggatttcattccaaatatgattacaggagcagcccaggtaccagatatttccttaaccaaagtacagtgaatgtaaataaaatttc

SEQ ID NO: 46297 - DNA, 1256 bp, Bovine  19866881036371
  misc_feature (1)..(1): n is a, c, g, or t
ncctgaatactgaagtgggttgccatttccttctccaggggaatttcctgacccagggatcaaacccatgtctcctgcttgggcaggcagattctttaccatcgcaccacctaggaaacccagtgggatgagggggaagatgtaatgtgacagctgctgtgggcaaaagcagaaatgaaccatacttcacttccccattttctatcaggagaaaatggtgagatattacaaaacccatggttctcagatggggtatgcttgtatgatatggtggaacattctcgaccagcagcttaaagaaaatataaataagaaagaaaatataaaccagtgtttaagtcaaatgacacaccaagtgccctcagctttaggaaagatgtttgtatgcatattaattacagattgtaagggtgttcccaagagtatgatccaacttctttatctcatccacaaacaagttgtataaagggcttggacctttatgcttatggcactgtgtgtgaggggtcaggagtaaatttagaagcaatttgaagacatgaaaagctataaccatttattttataggttgaaaatattgaacagtaatgtggatataaatgcaatgagaagggtaaatattgtgtaaaatacttttttagattttcttgaaaaacatgtttcaaaacaatgcatcaaatatgaaccatttaattgaaaactgaacaatttggtgtttcactcaatctcagaagctatcaaatataagccagtccaatttcagacatgttaatatgtgagcacaggtacactttaaaataggtttataaaggttattataaatgctatttatgattatttttaaataaatgtttttaaaggcaggaagagtataagaacaatatattctaaaatgttaacagagaaatatactttaaaatgttaaaaaatacctctacaagaggggagtgagcatgtaatgagagaatttttgtctctctgtgtgtgtataaatgacatcgatgtgagtaaagctatgtgtaaatttgctagtcaaaaaattttgtgtatggagcaaataggccaataggttatgatttttattagcacagcaaacattcacataattcagggaaggtcaaagaaattttctgtttgtgcttcagctgcacattcctacctgctgtgaaataaacccagccttcctgccagggtctgttgattcagctttgccatcggagtcatctagcactcacattctaaaggaataaagctgc

SEQ ID NO: 46298 - DNA, 1449 bp, Bovine  19866881120081
  misc_feature (1)..(1): n is a, c, g, or t
ntgcattgacctacgcaccctggttttattgtgatacaacagatgctgtttgacaagcctgctgagttaaaaaacaagcgaaaaaacaaagggggagaaaaacagaggacatacctggttggcaaagctggacctgacagttgtcggaatgcactcggccaggttggcatcttcaaagatgacggcaggattcttgccccccagctccagcgagagcttcttgcagtggggggcgctcagctgcatgatgcgctcggcggtgggctggctcccagtgaaggagatgaggggcacctctgggtgggacaccagggcctcgcctaccctgggccccgttccaaacacaatatttaccacacctgggggaacacctggatgggaagcagtaccggttacagccattcttctcagcgtgtcaagggcttcaggttacacagggattctccttcacagtgtttgtttgtttgtttggggggtggtgttttggggtttttttggcaaaatgattgctgtcaatgttgtgttcgtttctgtagcttgaatgggggtgagaagggacgttaatggttgtctctagtcaatagcaaaacagagacgacagcatcatctctgcctgtattatgccccaggtggaatttctctgggtgctttgccctaggaaatgcagggttaaatgtcctacgtaattcattccagagtattgactaagcctcaggggctgaggatgcagagataccctcaggcaggtcagggcctgtgagagaggacagcaaaggttaagttcagggagcatccacactgcagaagccagagaagagaacagctacctccctaggagagagacggagggtcccccggggaaggtgacttttgagatgaaggtcctgttccccatgatctggatgcaccatcaccctctaagactgagtgtccaagaacacccccacgtaggtgctccaggcttttctgttacaaaaacttactgccctatacctgcacgtattcactgtgttttatggatttacctgttcactacacatccaccaccagaaggggcatcagccaagggcagacacgggtctgcgttttgccctctgttgtatcccctgtgccatggcctactttgccagatagaatgaatactcaatttaaaaacaatctttttttggccatgctgtcggtatatgggatctcagctccccaaacagggatcgaacttggcacccactacatttgaaatgcagggccttaaccaccagaccgccagggaaatccctagaaaaatatttttaatgcatcacatttaaaacagatcaatgagaaaagaagatataatgctacttatatatgttattaaaataattttactaataataaaaataaaaatgtaaagagataataccagtaaatgctcacatttattgggtgctcactgtgaatcaactgtaa

SEQ ID NO: 46299 - DNA, 1137 bp, Bovine  19866881158941
  misc_feature (1)..(1): n is a, c, g, or t
naaaaaagaggagatgtatgtatatgcacatctgattcacttttctgtacagtagaaactaacataacattgtaaagcaactatactccaataaaaattttttttcattattttaaaaatgtcagtgaccctacagtggctgaagcctacaaacatacatctccaaagccagtcatgtgcctctcctctgacaccctaacactgattacctgctttctccaggagtctgcacatcatccacgcggtcacggaagtcagctcgctgggcttagctatcactgtgttgccagcagcgatcgctggcgcgatcttccaggtcagcagatagaggggcagattccagggactgatcagagcagctaacagaggagaacagaagcattgccagcaatgacatacccttcaaagcagatgggccagacatgctttactaatgaaaactccttcgtgctacaccaaatgtcagattgctcttccaaaatcccaatcatttgtggaatttcaatgcttcaaaaaattccacaaagaatctccaatcttttgcagaatttctgtagaatttcagagaaataagtctaaaatatattacaagcagccatacctttaaaactatagtcaatacagcttactcttttcttgatgactttcaattatatttatgaacaagaacagtataagtaccagggctaaaatgctgtcacctctccctaaacagtctcagaatgtgatcagttttgaggtttgtagactgatctttgcactgtctcaacaatcttttttatctttaaatggtctaggcactatttcttctaaatttttccacctgtttttctaattagctgtagattgagacataagatcttaaatcgttcacatttgtaataaataagagcaaataggttctgagatgtgaaatccattttagctaacccagggaattttttaataaataaattatctctaggttctcacctgtatcctaatcagataggtttgctggctaagtaacatctataacatttagaatgtgtcttcatgtaagaagccatccagatttcagaccacaaaacgcataaaaataaaacccatgttagaataagtaaatggagtcactttattttatactctaccctcaaa

SEQ ID NO: 46300 - DNA, 790 bp, Bovine  19866881175770
  misc_feature (1)..(1): n is a, c, g, or t
ntgtatgttagccactcagttgtgtctgactctttgcagtcccatggactataggtcaacaagctcctctatccatgggattctctaggcaagaatactggagtgggtagccattcgcttctccagggaatctgtctgacccagggatcaaatccgaatctcctgcattgcaagcagattgtataccgtctgagccacaagcgaagcctttgtttgcagtaataggaatattaaggataatcaatattaattcttcattttatggattaggaaacatttccagagaactggtatgactttattaattctgctaaagaagtaaatttaaaacctaagaatctaatatattggtctagttccaagtctggtcatctttctatttaaaccaattctgcttcacaggtgaagactcactttaagtgctcccaagactatatcagaaccaagtaatagactattcctttccctgttctgtaagtggccccttggaaagacctctccaggtatgggggaggtgggcatggggagcagcggtcccctgcagtgctttataaagccagaggttcataaagagcacacaactgccctcctctctgggattacagctaagctttctctctgctatattcaagtttttgctgcatcttttctgctatctactagcagatttaggcaaatcaattaacttctctgtgaatcagtttccccacttataaaataaatacaattctacccattttgtaaggatttaagaggatggaatgagcaaatacacatatctaatttcatg

SEQ ID NO: 46301 - DNA, 1509 bp, Bovine  19866881227303
  misc_feature (1)..(1): n is a, c, g, or t
naatttgcttttaagttaaaaagtgtgctgtgggccagcagcaggggagatatacttctgcattgtggggaagagaaagcctcagaatttgctctccaggccgcctggaatgctgctcatcatggtgctggagaaggccagtgtggcttcagaatggactgtctgcatcttggcacgtggaatcttccttttgtttctgaagtctattgtctaagagagagctgacattaacttttgtctcttactttatgaatctacagcttcctcttagaaagtagttaagatgattgcaaggaaggcatgtgtatgtgggagagagggacaggcttttcagtgacttaaaggacagaattctcagctgagagcagcaaaaggaagagaatgtccaaatgagaccaaggggaaggtggttttcaagtcaaccttttcttatctcaagccaactcatgacttcctgatgaagacatttgtccaccctccggtgctggtgtttctaactattcccatcacgcagtaacaattgtcaacacctgcctcaggttcaggagttgggaaaaatcacaagtgggcaagagacataagcacacaaccaacatgaccattttaatgacggaattggtcacctcagataatttgctgaattgaagcattaaaagaagaagccatatagtgtctttgacatcgtgttggctgaataatcatttaataaatataattggatggttgcctacgtaaagaaaagagtcatatctgctattcatacaaacatttggcaagtatttggccctatccccaaagaattctgatttcttttctccccccaccagtttggttcttgaagctttaaaatcccaaataaagttgattcttaggatttgagcatattgggctcacaatagagaccctgaaccactagacaaaggagggagggacatagaacagaatggaaaaaattattgaaattttccacccatgaactagacacaccctcatgcaaacaagacttttaggctaaggctatattttacaataatgtgataaaacacttgataagcccacagaggataagcagtagtttttgtttttttcccaattctctgaaatccagtaccacatgctgagcagttggacggaaaagccatttgtcatctctgtttccaaatgtctatttcctttctggagccccagcagtttgaggtgctgtcaaaggcgagaggacatcgtgtcagtggctctgatctcgcatccacccttgtcctcactgagtccatctccaccacttgctagccagctctgacaagaggtgctgggctgggaggtcatgggaggagctgtcaggcgtgtttctttctggctctgcagttggctcttcatcacgcaggaaaaggcagagagtcagagacaagcttcttgagtgctttctcccctttgtaggcctctcccagtgctcttgaacaggggccaagtaacccagtcccttgaaaagttgactcagtcctcaataccttg

SEQ ID NO: 46302 - DNA, 1177 bp, Bovine  19866881279929
  misc_feature (1)..(1): n is a, c, g, or t
ngtacttatagtcaaaaaaattccattaagatatagcaagtagatagctagagttcacttttcactttgtgggataggcttaagaaatgattcttagttgaatccacacacacaaaattgcacacacttgcctttcactatcttggtgaaattttcaatgaacatcgaattccagccccacagtgcactctgaaatattcaggcagcaagatatcctgataactcatgttcaagcgggaatagcccttggtttagccacatatacatcttcttctttttaatgattaggtatagcttgaggttacaaaccacaacctgatgtgtctggttatgtattttaaagatctgtatgaaaactcattacgtctggttttgtgtgtacatatgtttgtgtgtttctgtgttttttttgttagtgttctctttttgtgcaggaaatataagtatatggaggaaccgaactggttatattttacagaatattaagtaaaacttttgaaccatcaaactactaatttcagaaattcattcagtgaagaaagatttatggagtacttttatgagtcagatgctgtggtcagcgctgtgaatacagtaaagacaaagctatgtggtggtctgtgtctttgtaggccttccagatttaaataggaacaaacattaactaagtaaccaggcatgtgactcggtaatcacagatgctacaagtgctatgaaaaaaagattgggtactttgagagcatctcataagttgttcccaagtagcttgaggtcaaagaaggtgtcccagaggagatgatatttgaactcatatctgaaggtcaggaagagtgtcagatgagggaaagagaagagcttgatttcaaggagaaaactggcactctggaaggagagggaggccaggtagcttgagggtcaagggtggagggagactggtgagccatgaaggtaaagaggaaagcccaagctgagtccatggaaagaatttggtctttatcttaagagcaattggaaagtctattaagggttttaagcaggggataacatgatccgatttacacttttaagaaaattactttgactggagtctggaaaatggattagattaggcaagagtgcctgctgccctggagaggcagtgattagactattaggagccagtctcttggttgtaaat

SEQ ID NO: 46303 - DNA, 806 bp, Bovine  19866881303755
  misc_feature (1)..(1): n is a, c, g, or t
ncgaagagtcagacacgattgagcgcctgagcatgatgttggagtagaagactgggagaagaggcatggcaaaggggggaaagaaagggaaagaggggcagagaaggaagaataagaatgagacaaaggaaaatgatggaggggaaatttaggtcaccccaaacggagaaaagagtaagagaggaaatgagatgggatcagggagggacatattgccttcctgtctcctgttctctggaagcttcactgttagctctatagctggcggcttccaagccacagccgagtctgggtctgtgattgcatctgcaggtggcagctggcaggtgagagcctctcagcctggtcctcttgagaccccacccttcatctctctgattcactccaagtccagctctggaagcctggcttggtgtgacctgagggaagcccctttccagtgagtacatcagccagaggagtcatcagttgctattttttaccatttctagacaatggcttaatctatctataaatgtgttctattaccacagttgtttttcctttttgagctggggacatcttggggaaattttttttttttttaccagccctgttactgtgtcccagagaagatcagtgaaaatctcacatgtgtgaaagagctcttgaatgttctggaagatctgaaaacacagtctatctgactgaccagcattcaaatgatctgccattcgagttttgctccaatgcacaaaattaatgtgaggcgtctgaattgtgagattgatgaattccaattagttctctcttttaaatagcagtgt

SEQ ID NO: 46304 - DNA, 2023 bp, Bovine  19866881342930
  misc_feature (1)..(1): n is a, c, g, or t
ncaacttcttgtttcttttccttagattcaacaacatgattgctggtaacaactgaatagcccaggtgagcagcattctccacaagcctgtgcagtgcctcactaggttcacacttaatactacacacaaaaatagagcaaaataaaatatttatacattaaaataaagccattaaacaactgaaagaaaatataggtttgtttttttttaaatcttacaacagaaataagctttttaagaaaaaaaaaaaaaagaaaccttagagtgaacactgttacatttgaaaacataaaaaacctttcagaaccttcacatgtctataaaaaatctaaaattgatttttaatagcaaaatgattttgaaaaatattgtagcatatgtaactgattattactatcattttgtaaaagacttttatgaattaacaacaaaaattggaagatacaaaagtattgaataaagatattatagttaattgacaaatgaccacatataaagagctaataaatatcagaaattcaggctcaataatcaaagaaatgcaaataaaatcaatatgatattgtttttgtcccatcaaattatccaaaatttaaaaattataatgttctgcattgggaggcactctatacttttagggatatagatacagctttctggaaaacaatttggaactcatattttaaaagccttaaaaaattgcattttgatacaaaagttgtacttttaagaatttacccaaagggaataataagagacgtagcaattatttttgtgtgagtatattcatgtgacattttatcttttgatgcaatattaagaaaacacaaatattcaattaaataattaaataaaatttgagagaattatatcatggcctattatgcaatctttagaagctgcatttctaagaataatgacaaaatgaaatgccaattatatattcttaaagaaaaatcagaatacagaacaatgtgatctgaatattggaggaggtggtggtggcagggaaacaaggaaaaagaatgtgtttgtttataaatttaggaaaacaaaaataacaacaggagggaaagaaatcagaagttatctgtagttctttttcctatgttggaggataatggatattttaatattttaactttatatttttatggatattctaaattgtttttataggcagacatgaatcttacaacaaatgctacatttatttatttatttatttatttttggtttgtttttgttcagagcacatggaaacacatctttggatgctgtatgtgataagcttccccaggacagtgtattcctgtcctgtgatgaacagggcttatatgttctgcctagcgggaccccaagagtaactgcaaagttggtggggctctttctattcaagtgactctactacatgatacatttaacttggcagtttagaatttcaataaaaggtttggttaaaaatgaacaacatgaaaaatgaaacatggtcagtgattttgtagacctcgtcctctgttactctgtctggctcctcccctttcacagtgtggggtcacgaggtgagcgaggtggactctggccttcacaccttttgaacatgcctgtccaggggtgggtctatttctgtgatagttaaggacagaaatctcctgatggagagctcatccaacaggaattgctgcctggcacagcgaaattggctagtgtcctgagtgtgtgttaataagtgatcagatacttctttcattccagctcctctgtgtctactgttcccatggagttgtcatcccctctgtgttagtgaggcatcgccagtggttatacttgctgctctcttgttggcatccatatgcatcgtcttatatgtaccacttgtggttcaagttgtaacaggtgtctgtgagtgggccctgggcttcctgctaccagatttgtttctgttacgctttggactatagttgtggacactagcacctgaaatcttaaagaataaggctaggataaaattaaatattccca

SEQ ID NO: 46305 - DNA, 1882 bp, Bovine  19866881370325
  misc_feature (1)..(1): n is a, c, g, or t
nttacatcacagcttccatgaagtttcatttgaaaggaaaaaaaaaaaaaacttaaaagttaaaaaaaaaaaccactgagctacagaaaggataaagtggtgaccaaatatacaaaatattatgcagatatgatttgtttgagaaacacagggatatattgtttgatgatcatctaaaccaattaatttctgaaatggagctcagagggataaaaaggaacaaaactgtcatacaactgcagttagaagtggggctattttactgccctgattcactgacagtctcctattcaactgaataatattcaaacactctatatgggtctcctcagctgacgtcaacagtgaccttttcatatattttttattttaattctatgtgtcatgaataatgtacaatctcagagcacaggcattattttattcctgtactatgtttctaggacttggctacacaatggagtgggcatcatttctttcttcaaaacacagagggaacaagtgaaaagttagaatgtattaggtgtctttcttcttccaaaattactttccagaaaatatgggataaaatgctaaaagttgaaactgttgaaccaaaagaaggaaaccttggggtccctaacttgtgaaatggtatgtaatgttatcctgttgccactgtgcctgtcttccacttcttctaattctgtctctctctcaaagcacagcttattctcaccttcttgaccattttcaagagtgatctggtatttctctgccagtgtacacatatagccttgattgtgtgtttacgttccactccctagaggtcttcctagctcatttgaacacttcaaatactaggacctatcttatatttattctcttcttttaagttttttaattggagtacatttgctttacaatgttgtattagtgtctactgtacagcaaagtgaatcagccatacatatacatatgaatatatcccctcttttttgggtttccttcttatttaggtcaccacagagcactgagtagtgctccctgagctctccataagacccagcaatcccactactgggcaaatacacagagaaaaccataaatccaaaggacacatgcgccccagccttcattgcagcactgtccacgatagcagtacatggaagcaacttaaacgtccatcaatagggaaatggatttcttttattcttgaagtggcatgttctacatgcttaaagaaaacattgccaatgctttcctggcagagaccactaagaatctgcctgtgggtggacaagatctatttatgactcattgccatgaaagaggacacacaccatggggaactgtggaaggtggtagaaatgactagtgatgggatttgggcttgtgttaggtgatttgggtgagggcttgaggaaatagggctttgctgtggattggacactgtcaggaagtagaggtaattttgtgatgggatattgtcatagatctgatctagaaggaagggagactagactgaggctatagctataatcagtaaatccacagccataattaacagccataattacattaggcaagacaagagagttggttcatttttgttgtttggacagcgtttctgtttttgttttgaaacatcgtcgtcttgtgtctgtgctgatccatcatagttacagagtggacttccctagtgctggtgctttgtgaaatcttttccatccaatagggaacacccgaacctacctgtaagcaccaggtcagctcccactgtcaggcactgctctgctctttctcgacatggaattgaattggtttttagcaacactgcatctttatcaaagttccctgtttgataccctgggtgggtggagagcatcccaagacataggac

SEQ ID NO: 46306 - DNA, 2011 bp, Bovine  19866881400745
  misc_feature (1)..(1): n is a, c, g, or t
ntttaataaatggagatctaagggacagagataggaggtctctgccaggtggaacaggattcaagtcaaggctgtctgggctcccccacactcttttcaccatgttaaggctataggcatccacacccaactttttgttcaaccttcaggattactgagagcagagttcagtctgattcatgcctgtgttccagagaacatttaacatagtgcctggggcagatctaaaaatcaaatcattaactaaatagatgaatagcaagtaggtgaagatggcatcaaggcatctgggcttagatcacataggatacacacgggcttagatcacatgggatacacacgggcttagatcacatgggatacgcacgggcttagatcacatgggatacgcacgggcttagatcacatgagatacacacaggctgatggaactggagaaagatgtcctttctctttggtcatttcattcccacgtactgcccgcctgctaccttccttgggctgctgcactaaaaagagttaaaaagtatgacttgcaagggaaattgtccactgcaggatgacagcagctcttgatgaaactcagaagaagaaatgtgactttgttgctttttcttccccttctattttgttcttccccaatctgggtggctcccatgtgaagtgacctcgtcttaggttgatgggtttgggagaagtcactgctgggttgccaggaagagaacagtctgaccacaccagtgggacaatcacctgaacaatctacaggcacatgctataaaatatatatccactcacacgtatgattcagcctcactcaaatgttccctgcagtttagatttgaatatttgatttacccttccctcataaagcaccataaaatcgccttagtgcatgactcactttctttcatttactcacatttcaatgatgataattaaccttggctaatagttttcttcactggactgactcagaggttgttaaaaccagcaagctcacataatagacagtggaagatagaaacacgcaatgcagtttggctcatgtgttcccacattgacatctaacacatccttgggaactctcagctgggaggtctctcggtcaaaagcagggaccctggagcccaagtcctccattttggtcagtctcatgacagaagtagttcaagagccggcaactgggatagaaaaagcaagaaaaggaatggaagtgttttcttgttattattatattttataataaaacagtgtatttgattatctatttggctttaaattacatgacttgttcctcaaaaagttaaacatagaagtaccatatgacccagcaattttactcctaggtatgtacctaaagaactgaaatcagatattgaaaccaatatacccacttgcactttcagagtggcactattcccagtaactagaacatggaaaaatcccaatgtccatcaacagataaatgggtaaacagactgtggcatacacatagagtagaatactgttcattcataaaaagaagtgagtgctgatacatgctgcactaaggttaaccttgaaaacacatgctaagtcaaagaagccaaacacaaaggtcacttattagtgactccgtttatacaagactttcagaataggtaaatccacagaaacagaaaatgcattaatggcagccagaggctgaaggaaaggagaaatgggagaatgattgcttaatggggaccatattttcttttaaggagatgaagatgcttgggaactagataaacatgatgactatatggcattgtgaatgaactaattgccactgagttgttcacttaaaaatagttaactttatgtgatgtgaatttaatgtcagttttcaaaaattgcatgccttcccattgagatattggtaatataaataaaattataaactttccattcttgggtaaatcaatttggcatacagcctaccatataaggatgatgttcaagatacttaataacagcaaggacacat

SEQ ID NO: 46307 - DNA, 2257 bp, Bovine  19866881431349
  misc_feature (1)..(1): n is a, c, g, or t
ntcccctggggaaggaaaaaaggtccgatgccataaagaatgtggagtgtgttctgaggatcaaaggaatctcagtccttccctttcatccaaggctgcttttctgcagaaagtctttcacagtccacttaagcgcaacttcctgtgagcctgggacccctcaccagtcagggagcacctgcagcctctgctggcaacagcccagttctcgacaagttcttgttcacctctgagtcgagccttagggcattgtccaggtgccaagcacatcgagtctctgcagcagggaaatcgtgtccattaatataataagattaactaggaagacaggtgaggtcacctgtaacttggcgccaatctggcaacccaggttggtgctagtgagattaaaaggccctgcctagcaacaactctgatgtcgtgtcaaactggctggagctgcttgcttaacaattgttcaggaagtcctcagtggctcagttcagaaagaacattcaggtaagattagaggaaaaggtcatcggtccccgaacttctcttcaggagatcaaatagctaaagtcacacaggattaagaaaaccctttgggaagtctaaaagagagtacaataaacaagcaagcaagccagaggagatctttcccttgctggtgtgtttcagtgtaattgataaatatggagccatctctccagatgttgaaaccaaaagactagcccccatgagtccacagctctgaaatttgcacagaggtcagtttgtcatttaatctgagcatcttctcctctggagtatttctgtgtctgccctgctgacctccgtcacagccacctgagagaaaaacttgcctaacacacctgctcctgggctcctggatgatccctttgtctgagcctcccggtcaaacccgagggaccaagcgagcttgtcaattccttttgtctccacaataggacaggttcttcacagaagcagactgaggaccccagcctcttgtgtaggatgccaacttgttattctgcagggttgtggtgacacttataaatggtgcatgtcatcagagaaaggtgacgagtgggatgagtaaccaagtggtgggtaaaagcttaaaaaaaaaaaaaaatggaccggcaattccattaatgaaatcagagcaaatgtcctaagacagaacaccttcctctgagcacagccaggtcacaagcagattggatctgggatcccagaagctctcagaaatggggccactgctttaccctttctccttgcacggctgtatctcatgggtctgcttctcctgcatgccccttccatcttcctcgctgcagctgcctcctgggcttcctaagagaaaagccaatgcttacaagattgtgcagacatcttacaagattgtgagaatgaccttacctgggttgcctcccagctcttatcagtggtgcagtattaggaaagatatcacatccaaatctttgttcccttatttcataatcaagatggtggtattacccacccaataggattcttgtctggtgcttggcgcatggaagcttctaaggtgttatctactcttcttgctgttgctgtgttactatttctagtcactacttccatctaatgctagtttgcctgtgactttggtcagctgcaagccacttcctcggtgaccttgcaatctggtttccccagagaaccaccttggtcttgttacatgctgtattcccaatcacactgccattgtgcttcacaccattccatcagctgtagccggagacagtggttacactgtacctttatagtcacctaagccccaccttcagaagggtctgttggtgagggatgatcctaaggaagcagacgttgaatgagacacacttcaaacctacctacgaaattctttcaggaactttaaacaaagctattttcaacctcccatttttcctattaagagttcattgtattgtgaatgctatcagtaaacacttttaattttgagggtctcatgtatcttttctagtgttagggtgaatctctcaaggctgatgctggccccaaatctctgtcagacctgaggatgcattctctttcctcttaaaatccacttggtcaaatcaatgaacctctttctgctggacactcagacgctatcattggtgtcagacttatcccaaagcactgttgttatttctctttttaatgatggaggaaaataacagtttttattaatatatagtgctaagttcaaaatcctccatcgtca

SEQ ID NO: 46308 - DNA, 960 bp, Bovine  19866881469975
  misc_feature (1)..(1): n is a, c, g, or t
ntttctctagcataatcataccatcagttacacagaagcatgttcaaggccattcacactggccttcacagaggagacaaagttatatgagttaacatttatgcctcaatcaccttcgcctttgttttcagtgtcgtaagtcagtttgaaacatattgctgtctagatagaaagaagttatgtggcttagtctataataattttgtgaaacccaaagtacaatagacatctgaatgactgtcaaaccaatgattaatttccaatacatgctggaatatatttattgatgaatagttatatcaaatgttggaaataactggactagctatttatagtcaccaaagttcctcagtcacttgaggttagggcttccctttcagttgctataaacacaacttcctctcaagactctgtttatacgtctgcttgtcaacccagcgccagtcaccggcgctcccgtttttactgccactgccccctcatcctgtttataggcaagagggggtgccgtggatgcagaattattttaactcatcaaagccttggagaaactagccacttttgttgtgttttaaaatgattcattttttagttgggcctttagcttaatattgcttttccaagagttcatcggcctgagcaaacaattttaaggcaaattatatcaaaactagatacctatagtcacaaatcttccttgacctcctcaaaggataatttacattatcaactcagagcaaaggatccttttactcttaagaatgaatcttgttaaaattgccttaggaattaaaaaaaaaaaaagatgatagatatgatagatgtttgaaacccatactaatcaattaaaccagtttttttttttaaagctcccctttgattttgttatacagccaggattatgaaccactgctcaaaagtcagtatccatgacaaacaaatgaccaaataaacgtttta

SEQ ID NO: 46309 - DNA, 1199 bp, Bovine  19866881935911
  misc_feature (1)..(1): n is a, c, g, or t
nacgctggcttgccacctaggtagaattgactctgacttaatgcacagatcaagagaactttagaattgggatttggggatgatgacttttgttctgtgctacccaatagcactcactagaaatgagaagcagatggtttgcaacttagcactgtgagcaaaagttgcctgtttttgcattttgaccattgaataccaaagcctgggttgagccaagaattctgagcagtctgtccaggctgatttgattctcagaagtcttctaataactgtggagatatgggctcaacttcaaagattaagtcctggaaaaggggccccaaattcccaagttctgtggtgggagacggcacaatgctcatcacaccactcttcgaggcaatgctaattgccttgcatccagatgttttctttctcagagccagagatgaagagtctgagacatcgtgttacagatgttaaggaaatcgtccatgctcctatggcaagtgagtaggagtgggagatgactgccacatccaagctctactcactagaccactttcattccactcctttcaaaagataattatcaattagctaactctattctcagaataggatggagaatacgatttccaagatgacctagaggggaaagtgaaagtgaagtcgctcagtcgtgtccgactctttgcgaccccatggactgtagactaccaggctcctgcatccatgggagtttccaggcaagagaactggagtggattgccatggccttctccaggggatcttcccgacccagggatcaaacccaggtctccgcattgtaggcagtcgctttaccatctgggagaggggaaaggtggtttaaaaactgaagttctgaaggcgttatttatcctgaagccattcatatatgcttctattggttaaataaataataatacagggaatactgcactgtcattagaaataatgatgtaggagaacactgaacgccttggggaagtgaggtatataatatcatagagatatgattccattttagctaaaggaaattatagctgtctatttatacatgcacagaaccagaggatgtatactaaagtgctaacagtatctctaagtgaagtgattaggcatacatttttaaaaacttgcttctcttggctcatttttctatcaaaaatttttaaaagataaacaagaatggaaga

SEQ ID NO: 46310 - DNA, 1104 bp, Bovine  19866881020474
  misc_feature (1)..(1): n is a, c, g, or t
ncctagtattcatggtgataaaaactactctctgaatgtagagagatgtgaaatttgtataattctagacatgtttgtcttaactgcagaagtcccagaagaatagattttctcacgtctccatggggtgtttcttaaatctattactttatgaaattaaatattggcatatgaaaacctcagcagctcacttattacctaaattaaaatgtgttataatttgaattttgttcattttaaattgagtgaagattaacagcataaaggaggtttggtaatggaaggtaagaatgtaaaaagataaggaattggcaggatatgcgattttgtaaatggttcagtgatttactctttttgtcccttttgtataacagtgaattgtaaacagcaaatgatacttaactattttttagagttagttctccataagattaggtgtgaaagcccatttccttcacactgtaggtaccacctcagaaacagcttagtttcaaaacgttactgttccaaggttaaaaaaataaaataaaacctaagaaaatttaacttctgatatcctataaatgccagaaaacatgtttcaagttttagagaaaaaaatcaacagttttgtctctgtgggagatattatttcataaaaccactttctaccacctacacctctctctctaccaaattgtggagagattcagggcaacctgaggcttggaacattctatagggccaggcaggaaaggcatagaggtggtctcttgttgctagagtgcccaaggcctggaaatcaggtgctggaataattcagctacagcagaatatcagctgctacaatttcctagaaacacagcagggggtgagaatcttgtacaagtgaaaaatgttagtaatgatgtctctgaacaacaatgttcgtgctttgtgtcttaaacattttttattttatcctcataacaatttgagagcattaattccattttatgaataataataacaactttattatgtgctattttgtctgcatatatggctgtctacattttctcctgtgccagtatggtatagataagcaaatgaaatgtactgaggctaaagattttccaaaaatca

SEQ ID NO: 46311 - DNA, 1525 bp, Bovine  19866881048443
  misc_feature (1)..(1): n is a, c, g, or t
ntgatccttttgtgagtgtgcgcagaaggcttaacagtgctgagtgctggtttcctcagctataaaacaggaacaaggctaaccaccctacatattgtgttgttcagaatagcacgataatgcaggtgtaatggggcagtttggctgattgagtaggatacatctgtcgatgcaggcggctcccctggtaaacctgcctttcctccatatctcttttcattctcttataaaagaggagctttggttataaaataaggcagtggaataagggatgggatgaaagttcctggtgtcagtcagacttggttaaacacatgaaatgggacatgacaaccaaaaagcttctcaaactgggtttgtgctcttgtgactagagtaaagttgatcagacaaaaactgatgcagtttcttggaaacttgtttgatctttggcgctttcatctcttgaagtctgcatacccatctgaggaacggtgatgataacaatactatttcatagaggtgctggttggattaaatggaactgtaaaagtacagtgtttggccaatgattaataaatatctattattatttttttatcatctgtgagactctatacaagctagcctatttcagaacctagatgacaagcataggaaagaattgggtaggaagctactttcccacctgtgttcttaccttccaaaccaagtagttccaaactatgagaacatagggagaccacactcctcatgtagattggcattttcatgatgggaaatgatactatgagatttcaccaaatgtatttgtggacagagacagaaataagtggagccagagcaggagtagatatcatggtagcttccagatgagaaccttctttggtaagcacagaatgctgaagtttaggacacctggattacacacgcaaaggcctgaacacagtgccgtaagcattcaaaaaaccgattgctataattattatcattgggtccattttccactcgctgcaacagccagatagctgaaaaagaaaatgaactcctgaaacagcttcaatcatctacaatagtggttttcttggcatgtcgacagtttacaatcacttgggtttaaaataatgacatagtgttgtagttcagcctggttaatgaaaatagagacaaccataaatcctgggggattttctcctcggtgagaagtaaagaaagataagtcaaaacgtgttagaaatacaggatacctatatcactttgctcaatacttagtatttcaacatcttgaaggatgtgtaggattccaataggcaggcatatacattctagaaggaagtaaaaacatgagaaaaccaacaataaaaggaggaaaatgagaaagaatttatggaaaatgtgtgtagtccagtttgtctgggaacaaggctctcctttgtacccaattcagttatttattgatgcataaggaaatacccccaaacagtatcttaaaacaggggatttttacttcttgccattctggaattaactgctcagatcttttgat

SEQ ID NO: 46312 - DNA, 822 bp, Bovine  19866881215262
  misc_feature (1)..(1): n is a, c, g, or t
natcagaaaagagtaataacggcaactagcagtgaacacatagagacaatgcagaatgtatctagcaaaagtcttgataaaagaaaacaactatctatggactctacaaggtctttctcacaggcagttccagaaagttcaccacccaagaaaaaacctatagcacctctcataaaatctcattcatttccagcaggttcagggcagcaaagtccaaaaccttatatgagaaaatttaaaacacctttaatgattgctgaagaaaaatacagacaacaaagagaagagcttgaaaaacagagacaggggagttcgggctacaacatagttagaaaagagagccaaaatcaaaacatatcagagttgaaaaaggaagtgctgttacaaaaaacaaaggaggaggtccccctaactggaatggattcagaggtgactgcagcccaaaccaacccagtctctcaaagtctttctcaagatctaagggtctgtactgataaccagctttccacaacaccggcagtgacattctctgccaagaggctccaacatgttccagcaaccttggaaggcaaagatacgcatgaaaaagggaagttttgcagagctcaaaggggtatgatccaatctaaatcagcttgtgaaattaaacagagtcagcaagaatataggacccagcaaacacaacagaagcatctggagcagttgcacttgcccaaaagccagccagtttcccccagtttcaaagttaaacccatgaaggttccaattctaggtcataagttagatgaaacaaaccacagctaaaaagtcataaaaagcaat

SEQ ID NO: 46313 - DNA, 1252 bp, Bovine  19866880369412
  misc_feature (1)..(1): n is a, c, g, or t
nacactcctgtgttcttgcctgggagatcccatgaacagaggagcctggcaggcttacagtcctgaggtcgcaaagagtcagacatgactgagggactaagcacacagtggttttgctagcagggcccacacttgctggctgcaaaccacagtagcgttacacccagaaaaaccacactcagcactggcttacaacgtaagtggcctaagtaattgcatctgaagccccatttgcagaaaggggctgactgacagttcattctctctgagacattgagattgattacctaagaaagacaaggaaatcgcataggaagccccattattggggcaaagtgtgtaactctgtaactcactaactgcactgcgtccacggagcagggggttcgacgccgggctctctgggaagctctagatatgaaatgactttgcatgatgcagctccgatgctaaaagcgcaatgctcaggactacatgattcagtgagaaaatataaatggaaaattactggagctgaaattttattgccaagttatttatctttgttattactttccgaatccttttgtgcgttttgttcacggcgctggatagaggcactcttacttacactttaaacagagattaggagggaaaaatattcctcacgacaccacaaaataccagattaagtctcagccaggcctgtgacttctctcattacaatgaaatatctagacactgaagcaacaataatagtaaaaaaaaaaaaagttctgcagttcttttcacagacagttcacatggcttcctattgatgccacttagcatttcttattagaataataatgtgagaacagggctcccaaagacatggcctggaatttcctaatttcctaattccagcctccagctcatcaggcaggtattctggatcacttccaggaggggatgggtgacggtgacctaggtgaatcagaccagtaagataatatcaatattaataacaataataacctgccttttcctcttacagagctctgtttcctttttttatttaattaaaaattgcatacgattttattaaattgaaactgattttctttgtaaaataaaaaagacatttaaaacaaatgatacataaacatacatatttatgtgttctagcagaagttcacattttttttgcattcattctttgagcaatgatttcctgccacattcagagaaaaaagaatacgctttttgcttttgggtctcttacttgattttt

SEQ ID NO: 46314 - DNA, 3991 bp, Bovine  19866880449447
  misc_feature (1)..(1): n is a, c, g, or t
ngtggctcagaggtaaagcgtctgcctgcaatgcaggagacccaggttcaatccctgggtcgggaagatcccctggagaaggaaatggcaacccactccagtattcttgcctggagaaccccatggacagaggagcctggtgggctacagtccacggggtcgcaaagagtcggacatgactgagagactttacttcacttcacatgaggctgttacttttcttttcatccacatttgtagaccagaaaatataagttcatagaaatcataaggtgtatcaaaatgccccatctatcattggtagaactggtgttaaaatctaagggtgcccagcatgctgaccagtgctctgagtcgttgctgctgttggatcagaatcacaaggtccaggggacaccccccatctaacacttactagaagcaagtttccgatgatctctctctctctcagcctggtttccactaggtaaggctggaattcaatacagaactgttttcagggtcatatacaatttttgtaaatactgccgcaatgctaaaatttgcattgttattaaagatgataaatcaccagtcccaacagccttaggacagttttctgtagaaacagacttcacaacaggaatggacatttcctgcaaagagcctcatgctggagagtcccaaagagtgtgaagagttccctttgtaagcagatttcctttccccgatgcttgaaagatataggcagtttgggtctgaggcctctctgaccccagaagcatctccctgttcctctgcattatactatctggtgtggagggcaaggggccactggaaataactgggagtgtgagagctggggtgtgtggttatgacacgctctgaactttctcttctatgctggtcaccaaggcacctcaaccacagtaagctcatcaaccagaggcaattctgccctctccctccagggagggacatttggcgatgtctggagggacatttggcgatgtctacagacacttctcattatcacaactgggggtgctgctagcactggcgtgtagtctggagatgttgctcccagacatgcaacaaagcatctaagggctttctcatagctcagctggtaaagaatccacctgcaatacaggaaaccccagtttaattcctgggtcgggacgatccactggagaagggaacggctactcactccagtattcttgggcttcccccgtggttcagatggtaaagaatccacctacactgtgggagacctgggtttgatccctgggttgggaagatcccttggagaaggggacagctacccctccagtattctggcctggagaatcccatggactgtataatctatggggttgcaaagagtcggacacaactgagcatctttcattttctctttcactgttgtgtcactgatgggaaatggacaggatttgaatgcccatggctgatgggtagcaaaaaccacaagggagccctgatctccctgaggcactggcttgttgctggccctggagccccaaccgaattttcagattcaagatatccaaatgatgagcttcaaaacgccccatcccaccccatttcctgggacatatcacatgacctagaaaaatcccacccggtgtgagaaatcagacattttcaggagcaaaaaaaaaaaaaaaaaaaaaaaaggcctgtttttcactgttgctgctttagtgtttatagagaacttgggaggaaaatattatcagtcacaaaacttcacaagaaactcacagtgttaatgcactgcaccagcctgatgctggttgaataaaatgctcaagaagtggaacatttcacgggaggtgtaggcaggtcctgagtcatttttcttcatcatctggtcatgtttccctggggcaggaagggagggggcacctttctttgaagctattcatcttctttcacctagaagatcatgttttgtagctgtgaagcctaaacacaccatttcataatttcagcaagaagctttctggaaatagtagtcatggtattgattaatctgtacattcaaatagaacagagcctccaatatggaatactgttatctaggcagtcactgcagatggattcatacaccagccagacatgtcttgggtgataatgaagtcccaacctgttgttttccccatatctctgtcttctggcttgaaaggttggcacataaaggcatgcagaattctatcactattaaaattcatcaaacccaaactcagaccctcacctctggcatgcagtatgcttggcactgggggttggcaggaagacagtgaaagatgaggaagaattaggtagcttgctaggcttcctgccctcaatatcctcagagacctcgaaggagaaagaaggcagcaccaagcatggaaggttatgcaagaacacaaaaagaaatgccacacagactcagtgcacacgcattttcaaaagatctcgtttctctacagttgatctttgttttctgtagacactctgcatccatcacacaccactcccatcctttgtaactgtaactccatttcttctgggtgacttgcccctctcctgatggccttgtctttgtaaagcaaagttcccatcagtctccagctgacagggagacaagcgactcaagttagaccagaaaacctgcctcctggacactggaaatggcacagtgagcctaaggaacagctcacagatgtcctttcagtgactattcactgagcacccattctgtgtcagacactgtgctgggtgctgagggtgcacggggaaggagaccagcagacccctggcctcaggaacccgagactgccatagagtggcgggggttggggaggtgatatagaaacaagcaaaatggcatgccatttgccccaaggtggtgataagtcttgtgaaagaggaggaggagaaagaggagagggagggggaaatagggggaggaggagaaggtgtaagaagggaacaggagttgacagatcccttcagggacagcctcctgcaggggtggggcatgttccactcttcattcctctgtttgctttctgttgagacttaggggtggttccaaccccctaggtcaggggcagcaaatattgtcagtaaagggacagatggtaaatattttcagctctgggtggcctgtagcctctgtcagaactctgccccttatgaacacagctgtgggcaatgcatcagtgaatgggtatggctctgttccaataacagtttatttataaaacagatggcacgtaggatctggcctgcagaccagagtcagctgacctcagctcttgatctcaggatctgtgcttattcctaccttttcagagtcagttctccagttgcagctcctattaacctagggcagtccctgatttcttcaaataaaccaacctaacatgacacatcagctttcccttgcttgcaaacaagtgaacctcatggatctagaaggtgcttctcattgagaaagggcaggtgttacatctgtgttattaacaaatagcaaaaggcgcaaagggtacatggtgtcatcaagtcctctcgccacgttttataggttgttacactggggatcagagagggcgagatgcctgcagaagaatacttaccaaaccccgaacaagggccagaattcaagtctattgcttccccaggtcagtacccttatcgtgggtccgtttcaagtggaaataacagaaaatacaaccaattttaataaaagagggttaattttacctacactacaagaagtttgagaaggtagttgctgacatcatttcaggggtctaatggtgttagggctgcagtctccacaatttcccctggccttccttcatgagtacaaaatggctgccacagttccagacatcacacagatgttcaaggcaagagggagaaggaaagggtagtatataaataaatcctttctctccccagagccaaagttttcaagcaaccactcagagca

SEQ ID NO: 46315 - DNA, 1657 bp, Bovine  19866880526137
  misc_feature (1)..(1): n is a, c, g, or t
ntaattaaaatggagacgcattgcccccagtatttctgcctattctttaatgaaagaaactctagtctctgtctgtttcttgttaccacagttataattacttctatggctttgtggagagttttctggaagcatagaggcaaaaactctgttttcatgaaagctcttccttttaaatgaggctgttgtttcttgtggccagaatgccaccctaatgccaccctaattgtcctttctggattgaatggctccctattaattgctgcacttgtgtctctgcagaaggtactttcttgggctgccgacaaagtggctggtgtgctgtcattgggctcagctggcttttagctccatcctgaccaatgtccatggagcagggactaaaagagcaatttacatgcctcacctggtaaaggtctcatggtcatctgatgagacagataccattgttgcccccattgcacagatgcaaaaaccaaggcctagagactgaacaatcaacccaaagacagacaagtagtcagtacaactaagaagtatctgagaaaggacttgagtgcgtctggtgtgtgggtaaaccagctcgctgggggaacaaaacagggaggggtgggtttttgcacttgctagcttccatattcggagaaggcgatggcaccccactccagtactcttgcctggaaaatcccatggacggaggagcctggtaggctgcagtccatggggtcacaaagagtcagacacaactgagcgacttcactttcacttttcactttcacttttcactttcatgcattggagaaggaaatggcaacccactcccagtgttcttgcctggagaatcccagggatggggggagccctggtgggctgccatccaaaggggtcgcacagagtcagacacgattgaagcaacttagcagcagcagcagcagcagcagcagcagagtgactcagcatgcacacatgcatgtagggcggtggcggggttgtgcctaagccctcagtccctcacaggtgccaaacccctccattactacccctttgtgagaggctgagaggtatccactgtcagctgagacagagtgcctcagtgtagtcctgagaagacttattatctcatcatcagttcatgttttatactgaatatcagcttttttcatctcggacagcaaattaagagcagattaaaaggacaaagagtgaaaaaaggagggagtctgacgtcacatactccatgtatgggtctccagcttgtgaactcatgctggtgaattgaggtggagctgatgtaataataatagaaataaaaggcacaataagtgtaatgtgctttaatcatcctaaaaccatccccccaccaccccagtccatggaaaaattgtcttccatgaaaccagaccctggtgccataagagttggggactgctgcataggagcaagctattgcctactgtaaagagacccaagggactatatattaccaaagtaataattgcacatatttctacatcactctatctatccatctaccaatctatggatcataaatctatccacacataccctaatgcctatttgactgtaaaccccatagggtagattgcccccaattcttcaccatttctttatttgttccctttgccatgtgacttta

SEQ ID NO: 46316 - DNA, 2100 bp, Bovine  19866880531799
  misc_feature (1)..(1): n is a, c, g, or t
ntggttttgttgttgttgttcagtcgctcagttgtgtttgactctttgtgaccccatagtatgtagcacaaagaaggcaatggcaccccactccagtactcttgcctggaaaatccatggacagaggagcctggtaggctgcagtccacggggtcgctaagagtcaggaacgactgaacgacttcactttcacttttcactttcatgcattggagaaggaaatgacaacctactccagtgttcttgcctggagaatcccagggacgggggagcctggtgggctgccatctctgggggtcgcacagagtcggacacgactgaagcgacttagcagcagcagcagcagtatgtagcacaccagacctccctgtccttctctttctcctggagtttgctcaaacttatgtctgttgagtcaatgatgccatccaaccatctcgtcctctgtcatccgcttctcctcctgccctcaatctttcccagcatcagggtcttttacaatgagtcagctctttggatcagaaggttagacttggaaaagaggagatgggtagggataagaggagtggtggtggggcagggtttcttggccaaggaacaaccatggccagaaatgtagaacgaatgaggggggacccagatagaagccctccccagaaaccatctgagaagcacaagttgacctgggctgtgaagacaggatgctgaagatgtccaagggagacacgaggacctggtaccattacaaggcgcaacacttgcaatcaatgcctagagctttgttcattgataattgacacccttggccccgactcagaagcacagaaatcaaataaaggctacttggacgtttcctgcagcttgtgaattgataccgatttaacaaagtgcttgttgtcggagaaagcagaccagcagatgggccacataggtgctgatggaaaatgtcttcaaatagacgactgtgccgtttgccccttgaggaggcgtgatccccgattccccttccaaattcatgggtgacgcccatcactgggcaagctcatagccctgctgactcaggcctttaatcgcaggcaattagagtgactgacagcgctaattaagcccttacctgagcaggcacctccactagcatcactgccgagagcagccagccataactttgatctctttgatttgctgttttctcattccggctgtttcaggtcttatctaaatttcctcatcacctttaatgaacatttttctcccatttttcctaacgattttaaggagctggtgcaagatgttctctgaaaacacatgcacagttactatactgttagtcaagagggctcatcagtacagaaagagggattttgcatcaaaattgctgggtgcttggagcagcctgcaatacatcagcttctttttttttttttttttccagatatgacattactgccatttagctgcagaaacttctgatgccaattcttcttattctattaaaaatataagcctgttttttgaggctgaaatacaaactagactttttagaagggactaatggaagaaaactgaagaaaaaaaattacttagcattttactcacttctaagatcaaatgaattaaaaaaaaaactaacggaaagtgaaatcttgcataatttcactttgcctgaattttgtgcttcactccagttcagtgttgtaagattctaaacacacacaactgtcttaagggtgttctccccaaatcccttcttcagtcaacatgcatttctttactgatactctattttgtgacaggcacagggctcttgtgtggtgtctgtttttaggacaaagaaaatatgagaaatactctttcctcagctcttgtgtgcaattagagtgacttttgagttcgtggttcactctttccctgctgcccaacctgcctggcctcttcgatcttcctctcctcttctctcgctgtcctgtacccaggctctctgacccctccttgcctggcctggtttcctggactgaaagacagaggccaaactcaccaccctgcattcagaggcttcatcctgttgttgtccagtcctctgatccagtcccatcccaacct

SEQ ID NO: 46317 - DNA, 1978 bp, Bovine  19866880695305
  misc_feature (1)..(1): n is a, c, g, or t
nacaggatggagcagtgtggaaaaagcactgacctataggaacaaagggcaagcccactggttcttgggggcaggattgggggctggagaaatacttttttttttttttaattaggggaggcaaggtgttaactgtcaggtagggaatgggtggagagaggtgaaattaagaaatgtttctgaagggtataaaatgcaccaaaaaggagcttgagtaattctgaagtgcagagatgagaatggtggccagtgtgaggacccaaaatgggtgagtagtagcgagtgttggggactagagtggaggaataggaagaattcccaagggggcttgactcacctccagccaacctgatgctccatgcaaattcagatgtactaatttttagtgaaactccagaaatctgaatttttataagatatatgtttttacctcatattcctatctttctgttcaaaacagctcacaggcaacaacgagaccaagcaaactcagccatcagattttgctgcatttctttgaagtgaggtttaatcagaaccaatatgccaccttttatggatgcatgttccttttcttctattttatcttttttatattaacattttatataatgcaatgctctgcttttgattttagcaatcatctcaactaagaaatctcaaagcttctattaaccaagagaaaacaaaagaggctaaaatgtaatatagccaacactgtacacatttactccttgcccttgcttgcttaattctcttacttttccaaattgagaaaacaggtattttcatgacattcacataagaatatattatacttctcctataattcgggaataagaaagcataaaaatattccatctgagatctgtttggaaaccaaaccactgagtgccctagaagatggtattattcaaataacattattcttcctgtggactctattaacggctgttctataaacgataaaacctattcacccatgaaatccatctatgtgaacgtgatcattatggagacattaaaatcaagaaaacgtatgctagaatttgagtgatataacactgcatattattagggaatattccttgtcgaaagaacaaatattggcagaaaacaaagcccaattcaaatgccgaagtgtgagaggtgctatagaaacggaactttattttctctgggtctgatcattttcatgtaacaggagcaaatatgagacttctgatttgtctcctccacattattctgtttggtcgatttctattcatctgtttccgggtgacttacagtgtgtggggccccaggtcagacccagcctgcctgagaggccctggactgggagaactgtggaaacatcacgtccccctgggctgcacaccccacacaggttccctttccattgagacatatggaagtcaaactatgactgtcaacaaccctttgattattcacattccattttatttctggctggaacaaaagtccactctgttcctcagaagacccagctggcagagcccagagcctggggaacagtactcccctgacatttcctcggctgacaggatgctcacctgagtcctcaggtgtgcctacaacatccacgagggacgggaagctcacaagttagccaacctccctttaaaaaaacaccaaaagaacagattgttgtcccctgtctctttgcggagtagatgcgatactgtttgtcttctgtacaaatgcttcaaaactcagagaagacctgcaccaaataagcagcacaccctagtcacatcctcttaaaagaattataaagaaaatgtacaacatacatggaggaaaacatgccatcaaaggcgggaagaacttcgagaatgtgacataaaaatgtgtgtcttttgcagtataaagttgactgatttgcagagcctgagtttaacctaatatataatggcagctcagaagaaaggagagcttctttttaaagtgaagggtg

SEQ ID NO: 46318 - DNA, 1456 bp, Bovine  19866880762148
  misc_feature (1)..(1): n is a, c, g, or t
natttttctgtctctcagttatcaactgtgggtctctgattaagctttcttgtcaacctttgcttgatttctcttctttcctcttgctctgtctgatcattcctttatatcaaggtatttcttctctccagttcctccaccacgggtctttggctcaatcgtttggagagcttcatttcgatctgctgccggatctcctgcctctcctcatccgtcctctggggggaagatggtttcggtcctccagttcctgcctgctgggccggttcctcagcttcaccgctagaagctccttcttgcatttcctcggcagcgtcccagagatgatagagtcgttcagggcctcttcgtcctgatacaagagcaggtcgtccttgagttcagaattcaggatcaggttctccttattctcctcagactccttggccacagtccgcttaccgtcagaggccccgtcgaagctccaggcctcctcccgctccttgccccgctccacgctgcacgtcctcgacagccggacgtccacgcgcttcttcggggaccctttactgtccctgccttggaagctgaatcagagatgcagcacaggttattcactgtccccgtcacctggacaccctgcaaagttgacctgaagacttataacgggctttgcaaagacggcccccgagtgtgtgcaactgatgctcaggaaaagaagtgccaggggctcacagggctttcagcccaaggctgctcagaatgtgttgctctgaatgatgctgacacgcatgtaacaaaacctgctgagacagcaccgccaacgtgcagatcaaggatttcctaagaaccaagcagggcatcttctttgcccaatatttctgccaagccacgtacgtattctggtatctgttttgccgtccaatgactcactagtcttcagcctatgaggcatgtgaggtcaagagtaagagtcagcttccgggcaggttacctgtgctctcgccagatgaaaatgggacgcgatcagagtccccagacaacataacggctacttctccctctcaatcctctcgtgtgatgctcccactcgaccctgggtccctggaccttccaggggaaacacaggggcttttgtgcctggttctcatgtgtacaattcccaccctatccctctcagaatgtggccactgagaccagctaccaaccagctgcagagcccggtgcaaaactgaaaaaggaagcaccttgctcaacaactgagaattccaggatagtgagagcagagctatgaggccagcctggacccatcccctgtgactgcccccagtgagactggccttggatggggggttcaggcacacaggtccccctgccaggggaggggcctcacctgtcctggcggtgcttggtggccagtgctctgtgcagctcctcaatgacgcggctggggggcagaggccggtggacagtggtg

SEQ ID NO: 46319 - DNA, 1059 bp, Bovine  19866880799551
  misc_feature (1)..(1): n is a, c, g, or t
ncctacggattaatgaagataaaaggaggccaaatgcaaagtggtgtactgtgacggctcagagtaagtgcttaataaatatttcctgtcattataacactattcaaggctctgagaagtcttgcaggaaagcactccgttcgactctagctcagcctctccccactgtagctgcctgcagtgccaccatggaaccgagcaagatgcatcgtcacacaggaagcatttgtcctcatcagtttacacggcttcctgaaagccacgagaacctcaggccccacggagacagaatcagggcaggaacctgggccggtggctccgagctcaatgctctctgctgcctttacaacatctctctaccccgaaggcacttcttaccaccaataaacaaaagaattagaagccattctcccagactcccaaaactaaatatttcacatttggattctgcagtgcttagttgtcagctttacagaccacaggcaattaagagtccaagcccgggaagccggttgttaataattctgtcattattctcaattttcagcaccaccacacatgaaatacccatttccaatttctgtaaaggtgctaaatggcttttgcactgtgtcgtgaaagtttaccatcagccaaacggctgcaaagaggacctgcggtccccaggcccagggctgtgaaaactgctggttggcctgcctccgggcgataccctttctctgtgtttcatgctcaggacaggtaacctcctgagacgcggcagtcgttggtcatgctcaggcttgcagggcgtcgctgtccatccagatttcacaaggctcaaagcgcaggatgtgagccggaaaccactccttcctgctggggcaacaccccagagccagatggagaaagctagtgaccagcctctccaactggtctgagttgagaagagggaagtgcgtgggcatcaggccatgtctgcagagagagcaagtaggaaaggtggtctcaagggctgctgaggctgaagggctgcgtttccttctcatgacgaggaagcccatgaatcagaaagcggat

SEQ ID NO: 46320 - DNA, 1445 bp, Bovine  19866880829448
  misc_feature (1)..(1): n is a, c, g, or t
ntatagccatgtattgttagggaggtgtacacactggagggacttactactgtcagagatgattattaaaactacaaaattttgcctgcagactaaaacaagcaaaagaaagttattaaaactcatttttgggagtcttcttgtgtccttgagctgggttctgagcagaataggaaattgatactctgataattctcatttactttatatttattagcagtaaatcctttctctccaccaatgaatctttgcaagtttttctcgtttttctaactgttcatttgtctttttcttgtgatacctacagtgcatgaaaatgtttcttaatctgttcttgcattgtgtgtctctctaaagaaactgactaaacttcaaaggggtcaagtcaacatattccaccaccaaagtcttgttagggagagaaaatgcattactgctatggtaatcatgtgacacttcctctctcgatgagaacccttccagcaaacagacgcctctgcagaacccctgaaggccctgagtaaccaattcgctcttcagatctgcttatcccatagtgaaaaggaaccgacagctccagagatggggatactcagtcacattggctgatcgggagagaggttaaacttcagggaatcagagcatctttaagcctagcaacttggaccagagcattcttccaggacaacagctaaaataaaagttgcttttcccaataaatgtaggctttggtccagtgagaaataccttttaatctagaaggtccctgagcagagtcaagattgtcctgactgctgacagaagggctgaggcatcctctggattgctcattttcatattcctggaggcaggcggaatctccatgaggttcctgctcatggaggagtagttcccgaagatggtgatctccaacatgctcgtggttaccctggaatatctgttaaacctcagattctagggcccaactacagcccatttgaaacaaaagtgggcaggaggtattgggggtcagggagcggctctgggttcctgaagtgtatctgggcaggtcagaacctctagagtgacttaaagctgatgagaacactcctggctaggagtggtcttggttgttttaaagacaacattttgtatgcctcaatgcagagtcaaacttttcagttaaattctctaagaaatgggagcttacatctatttgaaaccatattaatcatgacttttaacgtgcagtgccagtcagagccaagagccactgggatgcgatagttgcttccaggacagaaaataagttggcaaacctcgctccatttattctgtggatttaaaatgccagataagggttacctgcttcaaacagaggaactttctaacaactggctccttcttccacctggactatttacagagagcaattgtaagtagcatttcctcactctgttggggaa

SEQ ID NO: 46321 - DNA, 1853 bp, Bovine  19866880884846
  misc_feature (1)..(1): n is a, c, g, or t
ntcccaaagcccccaaacagagccctgggcacccctggtttcctggtaaatgtcacacgcctagcgctggcttccttggctgatctgctgtgacaagcacagttggctgcttgagtttctctccttccttttttcagctgaagttaagttaaggtctccaaacggagacattgatccaggatttcattttcctcctctgctgtttcggctttatgaggacccaagtggttactgcggaaactttcgatgggcccagcagtctggcaaattaaatcttgcagccttggcaaatcctgcccttgcgtctccacacagtccccagtcttttctgtggattcatctttctcttctgggacgggtattcgtttacccccatgggtgcaggttaaataataaaaaggctgaagacaaaccagctcatattataggcaacctactgctgctattgccttttcattacagtccagagaaaagggaccactaaagaaaaaaaaaaaagcgttctggaggaaggggaaaagaaaaggtgaagaaggagaagggagtttgcaggtgggcagcactgacctgccatgagatcactcagggagggaagaacatagcagactttctgccgtggatgggcggcaggcccgggtaaagcacagatccccatgaccccgaggactgacggggcaggcggccagccaactggcagagttgatttcctgcagggggacacatcctttttcattcacgtcggcctcaccgttctcagtagggagatagagcagcagcctaaaaatagctgcttgcgctggcctcatggccccagtcaaagccagaggcgtctctcccgtgacacattcccgccacctttggccccgggtggagcggggctggcctcttgccaggcttgatgtgaggaggttaagccgagggtccagctggagcagctgggtcaaagacagtcacaaatctggatttccaggtcatgtggggtcaggccagccgtgtttttgtttgtattatttaaatatatatatatatatatatgttttttttcatgtaaaaatatggatttctggtgaatctagagaaactaggccccagctgcatggagcgtctaggagctgagccagcaggtgagtggcttcgtctggtgggccaccctgctcacgccacctgccctccactgttgcctgtcatcctgaggtgtgtctgctctgtcccctgcagatgcagctgaggaagctggtgacagcttggtggtggcgtgaccctcagggtggacagccccagcccccaactccaatggctgccacccgggggggccctggtgggggaacacaggggagggccgcttcatccagggctaagggcggtgacttcattgagcgatcagggacctgccagtcctccccctgctcagaatgtgggtgcctgtctgtgggcagtgggtccctgccctttgcttccacaaggcacttcccacctcccctagcaagacgctcacacacattattgtgttattgtaactcactggatggcctgtcctccccgccacccaccagtcccgagagaccaaggccagcctgtccatacccttcccaggctgagcccagggcctggtgcacatcagacactcaggaccgttcgtttaatgaaggagccagagacaggccgcgcctccaccagcccccagccctgggcatttgatggcagcttcttgataaaatctgaacaaaatttcaatggcacctaagccctgctggccggtttgtactttagcaagggatgtcagggtcacacagaaaagtcataggtgcacctgggccccggagatggctgtgagtgctgggcaagcgggtccg

SEQ ID NO: 46322 - DNA, 1480 bp, Bovine  19866881020519
  misc_feature (1)..(1): n is a, c, g, or t
nctgtgactccagctcttcttggtggttcagggacgctgcagcttttgcggccgtgctgcccccctgaatcagggcaagcacgaccaaaatgaatctgctgccatcatatccctattatttttctgtatctccaatttattccgggaacacgagagatatttaacaattacttagcagccttctttacaaaaggagaggatgaatacagataacactggaaaagattattgagagcagaatattgaattatctgtgcctgggagatagcacatgaataatgcatcaccctaccttgggtagcatcccctcccagacctgctgggccgagtatggacaggggggtagggaatgtgttgacattttggccctccccattttgcaaaatgtgcagagttccacatggaactcgccatgtcggtgtagctgcatgtcaaccttggtgcttttctgcagagcatgtctaatttttgcatggctgtggacagtaatcagtaatgaagtcattaaatgcaagaggggtggagagagaactgtctgccaaccttctccattaaattcaggtactttggcacatctctaattaagatcaggaggcttgagttccaattgacaaagcactccatccccatgataagcagtcaagagtgctcgagggcagagttaatacagtgagcggggtaatggcttggataattccaataaagatttccagttatacgagattctagaggttaccggagctctccagagaaggcgctcactctaggtgtgtggctagggtctcctagaactacagagacatgatagtcacgagggcacagctgagtgattcacctggagtccaagggtgccaccttagatccctgggactcagcacccctcttatgaaaggggtggcatctccctcggagctctgagatcttcagcattaagtattcccaactggattcactctaggaaacagcaaatagatgccttgtgtctatgggaaaatggatgtccaagtaattcctgggagagggtggggggctctattgttttattttacactcatttagaaatctggaggaaacattttgacatttgctgattatcccccttttccccaaagaaccaagcttgaatacattaattttagattcgtatctaagtaacacatctcatatgtgagtaggggagtctgtgggggtgtggagagagagagggactggtaatgtgttggctactgtagcttcggaaaagcgtttctatttggctgactgggggagagaggcagggagagacaaaggcgagggaggaggtgcctgcaggatgttggttaggggaggaggctggctgcccgccagggatgtcagccaagtgcaggcaggctctctgtccatcaggggtcgctctccaagcccagcttattttccatccacaggcgtcctgcctgcatacaagttaaccagctacctgtctgcaggcaagaagcagaca

SEQ ID NO: 46323 - DNA, 1258 bp, Bovine  19866881083862
  misc_feature (1)..(1): n is a, c, g, or t
ngggtctgccttgtctaatgctgtacccgattaacctcatgagaagagttaactcattggaaaagactctgatgctgggagggattgggggcaggaggagaaggggacgacagaggatgagatggctggatggcatcacagactcgatggacgtgagtttgaatgaactccgggagttggtgatggacagggaggcctggcgtgctgcgattcatggggtcgcaaagagtcggacacgactgagtgactgaactgaactgaactgaattacctatcacagtgtctaagctgcacctgatgtttgtggaatgacttgagcaaacttggtcccacagatgttctatgtaaaggagacatgttgataatagcctgcttcatgtctgactttctgccacgttcagggactgtgccagagagaagcccctgaagtttaaacagctctgggagggcccctctgctgccccaaacaactgagagatcctggtgcctccagaggtgcgtgcacagggctctgccctggcctcccatccacatggagaaggtacattcctgtgtttttagggagccaccacttcacatcttcccttttccttttttctttctgagaagctggggaaagcacagccggcctgcatgaatctcaggataaaccaaggatcacaaccagaccctctggctcatgacatcagctctaggtgagaactcccaatggcgcagcccagaaagggaagtggccctgagtttatcacagacacttcatgtccatgaaaagacaccacgtttcctgcgtacaaatttttcctacctgtgaggctctctcctgttggagccagtagcctatgtgtgctccaagggaccgtggcttaaaaatgtccattccaggtaaaaaccttagacatggtgagcaggttgtccagactcccagcccctcccacatacaggtgacataaccaagatgctatcacctctgacccatggctttgcctccatcagttcttctgtggagaacacactggaaatcaaagcccagcttatctcctgcccatcctgatcactgaaacctgatgtcctttcttttaagagataacctttgggagtaacacaccagctgtattggggggattaaatcttgtgctagcagaatgatttatgctccaataaagccaaacaaaacctaattgggtaggatgagaccaccaaaaattatgttcacgataaaaacaggacgagaactaattgtctgggtgcagtgttccat

SEQ ID NO: 46324 - DNA, 1800 bp, Bovine  19866881169753
  misc_feature (1)..(1): n is a, c, g, or t
ntgtgttactagcattacagaaaaaatatacagaggcttagcagtaaaggtaaacaccaaaatacaagaatttgattttatctaaaatcttattgcttgatccacaatttggataaaacaataaaaacatatccatttgcaccctgcattattttcttaggcaagcaagcagagtagtgtaaaaaattttactagatcacaacttagtccagctatagctaggaaagaattctagtaacaaaaatgacacccgagagcttccctggtagctcagtggtaaatccatctgaccatgcaggagacacgagtttgatccttgcgttgggaaaatgcactagagaaggaaatgacaacccactccagtattcttgcctggggaatcccatggacagaggggcctggcaggctacagtccatagggttgcaaagagttggacatgacttagcaactaagcaacagcacattttaatagatatagggaccacttcaatgggatcatgcaatgggggagagatgttgagctcatctctgaatatagcataagcaagtgagtacttacagccaaggagtggggagggaggcagtgggtgaaaaattaccaagaggaaacatcaggaataaggggaattttggctgaagctatttcacagtattgctgaaggcaggttagagtgatcagacttcacctgggggatggtggaggataaggaacctaactatgtatcaaggatgatcagatatcaagggtaggggcagtactggtcaaactgacttagcaggattcttgctaaaactggacaattcagggatgaacatgaaagttcaaaaatcaagcctggttgaaaaagaactcaaagtaaactgaatagagtttggtcaatgacagactcgttatcagtatctttcattgactcactctgaaattattttatttcacaaatacagctgtccattgcagaaatatttgaaaatattgataaacataggaaaataaaatattttataatcatctataaatatatactggcttccctggtggctcagacagtaaagaatctgcctgcatgcgggagacctgggttccgtccctgggtcaggaaaatcccctggagaaggaaatggcaactcactccagtgttcttgcctggagaatgccttgaacagaggaacttggtgggctacagtccaaggggtcgcaaagagctggatgaaactaagtgactaagcacgcaagcgagcaggtgaatcacaccctcctcctctgcatgggaccactgtttgggtggagagactgggaactatgtcaatatgctttctctccagggaagtggtgtacttttgaagggctgaataatggatacaaaagactagaccattttaggaatgattctggccatggattggctctttcttccttctttcctggataatgtggtggttttaaataacactaggcagccccacgacaaaagttgtcattttcagccacattctccattcggctgtgaacagttatgccatcaacatggatttaacaatggttcatatttgtcaccatcaaaatggagagcagaaacagcagtgctcaaagacgtgtgtgtgtttcggttgttctgatcagatatctctggtgctttcaaacctcccccaccccctcgcaggaatgaggcacacatgggggtggctgcagagggaagccctgcaggaacctttgtgaagagggacagcaacacacagcaccacaaggattgttctggagacatggtattgggaaactcctcagtacggggaatccattg

SEQ ID NO: 46325 - DNA, 1292 bp, Bovine  19866881206672
  misc_feature (1)..(1): n is a, c, g, or t
ntcacatgagctattgcttgacactcatcaaaatggtgatagtttgatggagtaatagcaccgagagctgatagagacatggggaagagagaggtcctgctgctccagtggctggtggaagacccaatgcctccctgtcacatggagagtgctgcagctgctgggtccagaagagcaggaatgtgactggggtctctgcccttcccttctccttcctgccagtgtggattaaacatctttaaccttgttcattagtgtaaaagtcttctttttgatgcttttgaactatggtgctggaatagactcttgagagtcccttggacaccaaggagatcaaatcattcaacctaaaggaaatcaaccctgaatatttgctggaaggactgatgttaaagctgaagctccaatactttggccacctgatgtgaagagccaactcattggaaaagaccctgatgctgggaaagattgagagcaggaggagaaggggatgacagaggatgagatggttggatggcatcaccagctcattggacaggagtctgagcaaactccaggagatagtgaaggacagggaagcctggcatgcttcagcccatggggtcacaaagagtcagacacgaccatgatggaacaacaacgacctccaccagtcagttctccacatgggtcccatttccatctttccctcccacacagccccattatggggaggaaaaagacctcagcatgcccactccccatctccctgtaactgtacctatcctgaaatatatgcacatccaatcatcacaaccacagcctggaaggtgagtaccttcatatctctacttccccctgaggctgggtggaacaagtagcctgcccaggtatgcacaggcaggataactcttacacaaggcacagtgactggtacatacctagcctcactaatatttgttgagtgaaagcagggatggaagaagggaagaaaggagggttcagaacaagaacctgcagcaacatcaattttcctgctcaaaatcgaaagacatggtcaactcagaaaacccagacctgccagaacattagtcagatgcataactcagcatataacttatctgcaggtcataaaagttagggggcacctccctccatgtttgaatttcatgcataaaatctgcacacataataacccctgtcagatgctcacaggtgacgggcttacagctcttatctgtctggtgagcacagcaggtcacttccccaggttacggtcagaaaactgtccaactgcaggacaagcattctac

SEQ ID NO: 46326 - DNA, 3984 bp, Bovine  19866881295846
  misc_feature (1)..(1): n is a, c, g, or t
ntccaatagcttaatttctgagaatcaataggcatttatctacaaaagaaactttcaaaacccgcccttaaaagtgatgacaagttctaactagagattaaaaaaaaaaagttctttcttgatagttccacttcttttcaactctgctctgggccaagtaaccactgaggttaattcagattaagtgttaatgtttgatccgaagtcaggtgttacctctcctagctactctttgcatttcattggaaagtttaaagttatcccaaggggagttttaggggaagcacagacaggtggggacatttttttgatgcccctccagcccacagagatgacccccttggctaccaaccacctgacactgtcctgtctgaactcaggattgctgacatccaggcaaggttggaccagctggctgcctggccaagggtcttgctgaggtgcagtgggctctgcttcctctgtgactcacatttaagtctgtaacggagtttttctcctggcgaggctgctgtcttcattcctgcctcgtctgctgggcgttcgatcttgaggatcaggttggaagttgatgctttgattgtctttgatgttttcaaaggcaggaaaggctgtcatcttttcaagtggcactcagctctaggtaaagaatgtttctgatttctggagtgtctatcagaggcaattataccctgattgacccgtttgccattcaaatgtctcctaacacttgctcccatgttgggagtgaagatcttatttctattcttctactcaagcctgcctgctttgagagttcaccagagttctaaactttggggatgaaaagcaccagatggttggtattttttttctgcacagctgacatttttcaaaatcaatattttaagcccaatacagagaacacagaatcttgtctttatttcaaaacaggtatgaaaaatagccaatctgcatagatacagtgacaagtgctagatattcaaagacagaaagagacgtggctcttgcccatgaagaatttacagtctggatgtgtggtagggtggggtggggcagtgagggtcccgaagatgaacattatgacacacaatgggcacacagagtgttgtggttgctgtgttcccatgtccttgacacttagaggtattaacttcaagggtgccttcacccaggcaaatgatactcctcttaaaaattaatttgtaattgattattaatcaggatcggagaatgcaatggcaccccactccagtactcttgcctgggaaatcccatggacggaggagcctggtaggctgcagtccatggggtcgctaagagtcggacacgactgagcaacttcactttcacttttcactttcatgcattagagaaggaaatggcaacccactccagtgtccttgcctggagaatcccagggaggcggggcctcgtgggctgctgtctatggggttgcactgagtcggacacgactgaagcaacttagcagcagcagcagcattaatcaggatatacttttctcccacacccatatgattttattgcctgctttccctctggggcatttcctctttcattactggttttttgtgtgtgtaattttaaaattctctattggggagtagctccaatgcactaagacctagagttttaacctccctgcacattcagatttggaaggacaagaaatgttgataagatgttactaacaagcccactctccccctgtcatttattttccttctctctctaggagtaaccagggtcctgatgtttaaagacagtttcctccgtatgcttctttttctattttttatatatgtatgttggagaaggcaatggcaacccactcccagtactcttgcctggaaaatcccatggacggaggagcctggtgggctgcagtccatggggtcacaaagagtcagacacaactgagcgacttcactactttcacttttcactttcacttttcactttcatgcattggagaaggaaatggcaacccactccaagtgttcttgcctggagaatcccagggacggcagaacctggtgggctgctgtctatggagtcacacagagtcggacacaactgaagcgacacagcagcatgtatgtatgtatccatcacatgtagtttgtatgttttatttgtaactaaaataaagtgtatcagattatttataaccatttgaagtttgctttttctcccacaccaccttatgcttttgatgttttttagatggatcaatatttataccaaatcgcttcagtctctaaagcaaaggttggcaaactttctgttcaaggatagaaggtatgtatggaagactttgtggccatagggagcttgctgatgtctgctcttcagtattccattgcagaccagaatttgtatacatttccttattattttttaaaaatcgctctcaatattttatattattaaaaaaaatgcatcactaaacctacaaacacactgtcttctcgtgcaagtgtaaagaggtggagggtattcatctggaaattgtttgtttgactttcctttccatgaactgtgagagcagctctatccacagtagatggcatgtcagcagaaaaatgaatatcattggttttataccagccagtgcaatcaggacaagaaaaagaaacatttttttaaggtgttgagatgtcaggggtaatttgtaaccatagtgatacagagattatgctgaaggatttaatccttccatcattccttcagtgaggatctgcaaatgtaaaactggtagtttctttatgtctgaaaagttctttatccaccctcatcctcaaacaaaggtgtatctgggtacacattgatagaaacttatgatttcacaattggaagctttctttgtcttctagcttatcgtgtgcttgatgaaaaacatgtagtacctaattgttatttcttttaaaatattttcgctatgattgcttttgagatttccttagtttctttggcatcctgctgtctccgcacaatacgattaattgacatttatattatttatgagcctgtcagtgtgtagattcttgttctttgactctggaaatttctgaagcacacgctctgattattgcctctcctgcaatctctttattgccctagctgaaaatcctactggatgtatttttgaacctactcaatttaccctactggtctcataacgtctgcctcttcttttttcatctctataaatccctgtagtgcattctgggaaattgtctaatttgggtggcttatgaagaaggtggaaattaaatgccaataataagaacattggaggtttaggaaggaatgatcagagttaaagagttctgaggtctatatgctctttgaaagggtaatatacacattaattaattgtagactttgaaggttaaatatctaatgttaaatctttaagggttactaataaaagaatagaaatagaaggcaaatctgatgaaaggttaaaaatcaaaaggaaaatgaagattagtccatcaaacaccataggaaggagaaaagtcatcaagacattaagatcatataaacttacccaaatatttcaaaaaccacaataagtaaatatagattatattgtttagtcaagtaagcaattttcagactgcattaaaaaatccaaccaatttatctttacaaagataaatttaaaatgtaaggcccccccaaaattcaaagtaaaaggatttaaaaacatacaccatacaaagactattcaaaagaaaaagactaaggtagcataaatctgacacaatgggctttggggtaaaagaggttattagggatgaaaggttataacatcttgagaaatgtgattcaccggaaacaccatacacacacaatcctgaacttgtagccccagacagcataacttcaaaatgaattaaaaaataatatagacagaaaaccgagaggatgacaaatcagcaatgatgatgagaa

SEQ ID NO: 46327 - DNA, 946 bp, Bovine  19866881442944
  misc_feature (1)..(1): n is a, c, g, or t
nattgttaatgtatgtaatccaaagcctgtttgaagatcaaacactcccatagcactttgtatttaaaggagttaaacctcctttcttactgaagactctcttgccttctttcttttgccgttgggtcctgagtgagtctgtgtgtgtgtgtgtgactggtggggcagtcacagagtttcccaaacttgtttctcaggaagtatctcatgaatgtggtgtttcataattcacattttggggagtgctctcctattccctatctgcataagaagcgccagtgtacccagataagacatttgtaagtatgctgattttagatgcctagaaactaaggaagaagaaaggaatctcagtgggaaaaatgtcaaagtaagaattctgattcaaagctggcagatgctttttacagagtcaaaaaaaagtaaatcagaaagggaaaattccagccctcaagctgaaaacaagctgaaacaaatgaacctaattttatatcaaagtagtaacataataacacagagaaaaattactccatgtaatctctgaaaacagcaacctgaatctaaatccttggtgattataattctaaggataaaaagaactatagagaaaccataacattcactctgtgtttttttttaataataattttgatatcataatttgacaccatttaatgtaccttttagaataaacaagtaacttaatattactagtgcaaacgtatacaaatatatatacatatatatgaaatttaaaaagacaagaaaataaattctgtgatgctaaattgaaatagaaaaggaacacacacatcctatttctctccagtgagagggtttagaagcagtatcttggggctaaaactcagatcttgttttataaataccacttccattagaaggcagtaaggttcaaagacatattatcatgtgtcaaaagcaattc

SEQ ID NO: 46328 - DNA, 922 bp, Bovine  19866881815333
  misc_feature (1)..(1): n is a, c, g, or t
ncccattaaaagaatgaagtgttaggtagatttgatgcactaatagctctgaaaatgtgtagcattttcacagctaaaatcttttctggtgtgattttctttcaacctttttgtttatgagcatgtgtgaattgataagttatcaggagctagaaattaaattagctctcaaaggtaagaaaataataggagaggacaggtttacatatattttgggaaaatgctcaaattttgatggtttagagaaaggtcagtttcctgtgctagaatttatctatattcctgctcatttagggtacatatagggcaatattcccaagataaattgtttatttatgaatgagggtccccctgccccagctcaccaacagactatctccaagtcaagtatggttatttactttttaaaattgtgtgtgtgtgtgtgtggctggattgggtcttcgttgcagcacgtgggatcttttgttgtggtggaatggctcagtagttgtggcttgcaggcttaattgccccgtggcatgtgggatcttagaccagggattgaacctgcatccgctgcattgcaagctagacttttaacctctgaaccccagggaagtcccaagaatggttatttacttttagattctcttgtcttcatgctcgtatacccacttcctcagatttctggatctatagaaagggcaaggaacgtgacagcatgtgcccccctctctactaagatgtctcatagggcacccagctgaccaaggggaatacaactcagcgtccaagtgaccgagggatgacagagcaatgcctgcatcctggtgcttggtactcagagatagttagctcaaaatacagtaaagtaggccatttaacgttcgttgggagtgaactgttgtgtcagccaataatgaacctgaaaatgacactt

SEQ ID NO: 46329 - DNA, 778 bp, Bovine  19866881854438
  misc_feature (1)..(1): n is a, c, g, or t
ntgagcgagcaatagcaggtccgatctcggttttgaatgcagccgtgcattctgggcagccatgcttgacaggcttcccaacctgcagacactgggaatttatttttccatctatattcatgacactcatgatctgaaatggccattctaatgtccccccacccctctttgcagcaaattagtggagtcaatggcttctggccccaaggtctcatctgttgtgccaaatgtaagctggatgccaaattcccttccagcatcagagggacactctggtactttatggcgctctggacatgaagggatcctgacaggccttctccacagactgggacggggccagcttcacggagcagctgtccccactcccgtccctgagatgtgatgtccgtggtgaaagtggctgctggtggttcctcacagagcagggatggccagaggggaggggtccatggggctctgcgtcagcatggagattatgcttggttgtgggggggagtcaacaaatttcaaactcttgctttcattgtgattatttatgcagtaacctaaggttgttgtgtatggctttttctattcaacaccattttaataatattaaacgtggtatacacaatatatgatttttttctttttttgaaagaagactatgtctttttctttttttaaaaattaataatttatttatttggttttgccaggtcttagttgcagcattgggggtatagtatccgaccagagactaaaccccagccacggaccaccaagtccccaatat

SEQ ID NO: 46330 - DNA, 685 bp, Bovine  19866882054536
  misc_feature (1)..(1): n is a, c, g, or t
ntggacagaactgcctcttggaggcagaattacccccaaggtgaatctctgggctagcccacctgtgatgtttgggctctcagctccagtgccactcaaggtcatcctgaagatgatcccacgaccctggttttagtggcagggggcgaactaaatgtctttaaactgacatctagctctgacactcataaacctttaatcaagaagctatgaccttgtggaagaggcagggtgaatgcagaattattctgctttgtattcaagttttccctccagggagacactgaattgagaaagttgcaggtcctctctgtcctggagaagcaaggacgcacttttaagggtccagttacctctggctttcatgaggacaacccatgaaaggtctagccagttccatgccaaatctccttggcacagccttgcccttgtagggcttacaggatccctcagccctgggcaggactaggtggtgactttaaggaaggaaggcctttgaacaggggcctgtcctagccacacacctgcctgtccagttgagggaccacctgctggctctcagcctgacataaggccctctgcaaccacctacatattcagaagatgaaaccaaacacttgaggattaagcacttcggtgaaactaaaattgcaattataatatattttttaacagaagtgaacag

SEQ ID NO: 46331 - DNA, 798 bp, Bovine  19866882180963
  misc_feature (1)..(1): n is a, c, g, or t
naattggtgatggacagggaggcctggtgtgctgcgattatggggtcacaaagagtcagacatgactgagcaactgaactgaactgaactgaactgaagctctactgagtgtaccccagccaacaaattcctacatatcctggcttcttccctacctcttcagagcatggtattcagagctcctgagtggctgtctcccagactagagtcctcagtgagaccccaaataaaactcaaatcctcagctctcatggcatgtttttctttaggctggcactggaaaacacatgacccagttatgctaatgagaggtgggtgtttataggcactggatggtcagaagactggatctgagtcccagcttcacctatctctgttttccagaaaaacaaaacttgttccctctgcctcctggtttgcatgtgcatcgtgtgtacgaaagagctatgaagattgcaagttgctactgcaaatgctggttacttttcagtaagaaaacaattcttaatggccagcagcagttaaataaataacagtctaggtaacgtaagacctgtgcagatattaacttcttggaaattcctcacaggttcccagtggcctcaaccaacaagaaagcttatcttcctgggttttgaggtcacttccagtcctcggttccccagttggtgatttctctttccaaaggtccctatttttagctgttttcacaagggcacctggaggcaagtattatacagaaaccacgacgttccacctgtgatactccacacctgcaggtcgcaaagttaacttccg

SEQ ID NO: 46332 - DNA, 1505 bp, Bovine  19866880188183
  misc_feature (1)..(1): n is a, c, g, or t
nggcttcccaggtggctcagtgataaagaatctgcctgccaatataggagacacgaggttcaatccgttggaaagatccccctggagaaggaaatggcaacccactccgggtatttttggctggagaattccatggacacagaaccctgggtgagttacagttcatggggtcacaaagggtcggacatgactgagcacagcacagcagtttttgaaattatacacaaaattttgcatatgcggtcacaaattcagttttctaggtttgaagctccaaaaacttttattatcatcttctaggaaatgtggacccgatgatgttaaaccccagatgatgattgtgtgcttatctctctagttccccacattggttttctcccaacgtatgtacacccatgattctggattctaccacccctgacaatgatattattaacacttctttctcagtgtcaatttatgtataatttcccttccaaaccacacatgaataattccaaagaagcaagcaaccataaagaagatgttgctttaagggtttgaaattccagtgttctcctcaaacattgagtcatgtctgttgaagtattatctttataagtgcaaatattgccttatgcttgcagaagtgtcttgtacttcattagcccagaaaaaatataccataaacaggcatttaggggataagggagaattccatgggccagaaagagagtgtttagtatgaacaatatacatgtcatcacagtgcatctgttaggacaggaagcatcgtgatcatctgttttacaagccttctctggaattatcttttggatgatttcatataaaagatagtttctggtaaatctggctcaacaattaatatgcaagttgtgattagaggggttgaatttggaagtgataaaggtttaaaaatagaaaacagatgtaatattttaaatgacattttctttgtactgtatttatttctccctttcagtaattagtaaaatgttttcagtttttagaaagagcttatcactgtgagcacaataaacccatatgtggaaaaaaaaacaaaaaagctgcaagaaacagatgatacatactttgggttctgtggataagaaaaaatggcgaaagaatagggtatcataaaaatatagggccccaaatataaataaataaaacaattcaaacaaaaagaaccaatattcaagcaattctttgaatctgtcatttgaacattttttaatttaattgagcatgaataatttatgttgtggtgaggaagattataaatccataaataaattttattggggattaaaaaaaagtgaataatttaaatattgaaaaaaatcacctatagtcttgtctcttatctcccatgatggcattccttagagtccagcacgaccagctggaagtccagagtgtgcttggaaccacttggagccatcggaagtggaagctacttcttcacccctggctgtgccctgttagctggagggcgttcaggt

SEQ ID NO: 46333 - DNA, 3162 bp, Bovine  19866880520489
  misc_feature (1)..(1): n is a, c, g, or t
nccctgagcaggagggaggcagcctgagaaactgtggagttcccgaggaggcagaccccagcgcaggggcagctgccagctgaggatgcaccaggttccgtgggtgccgttgaatgacgtggtcctggcctgggccatctccccgtccctcgtccagcagcaaacattgcgatgtctctttcatgtccactggccacacactttgcaccatgaaatcctcagcttctcgagttatttggtacagaagtgaccagtgattggacgggagtcagctgacgtaacaaggacccatgtgtgtaaacattagtgactatttctgtacatatccacctgcgtcgtgagctttccatgggttgcactgatgtccacagctccacgtaccaccacaccatcgctccaacaaggaacctgcctcccgcccaccctccccagccaggacactgcagagcagcctcacagttgtcagctgctagaagcagggatacacctggtgcccaggtcaggggttccaatacgatggtccagccaaaagaacctgcgttgcccgagacatagctcatcccagaactcgggcaggacacatgcaagaggacctggaatggcttgtagggtcacaaagtacggacgtgctcaaaaccagagaccagcgacagggtgagccaaaggcaggaggaacaactgggggggccagggccaaagtgagccctgcgaccaggaaaggaaacagagcactgcagggtcggcactccagcaccaacgcctgcaccccgtgcagattaaagccagtggctgaatgagaaagcagcagagaagagacgcgcctcccaggcagaaggactccatggaactgacacagactcagttctcgggagcgagagcctgaccccagggctcaggcagggctgctcagcgtggctgccttcccaggggttcacaggacacacagctcctctccacagtcaagttcacactgacagcaaaagtcactttggcaggatgtggtatgaatgactctccacctctgcatcttctgcccagactcccacgtccccagcctgattcaggaggaaaacactgtacaaaattcctgaccactgttactcaaaattgtcagcatcaaaattaaggaaagtctgagaaactctcacagagctgaagaggcttgggagatgtaggactgagtggaagcgggtcctgggtaggatcctgggcaaaaagaaaggacattaggttgaaaaatatagaaatttgtataaaacatggtcattcataataatgtatcaacactggtgagacagatgcactcagccttctttatggtccaactctcacatccacacatgactactggaaaaaccacagctttgactacatggacctttgtagaggattgtgaaataaaggatgttgcccactatccagttctgtaagaatcgagtcattagccactgtggttagtgaccctcagtacacatcacagaactgaagacactaacaacacgccgggctacgtgtggggcatatggggtatatggcagctctctgtccttcttccacgatttctgtcaaactgtagaactgctttcaaattgaagttttgtgagttagctatgggacacacagagggcttcgcgtactaggtaaagaggtctgggcagtaggattttgagcacactgaattgataaaaaaaatagcccaccaagaagccttgacagtcccctgtgggaccttgagcaggctccagcccaggtcagggactttcagcggacacggatggagccctccacacctcaggctctagtctcagctaacgattcgaagaatgatttagaacaaaaccattcaggtgcatctggatcctagttcatgacagtataacttaaattcaaattctctctggtgtaaaacatagggataaaaattcatcaagcaataacgtaaaggtccaaaatgaatatttgagtgccttcaaggagatacgatggtgagaattcacagagccattactcagatgctgttttctggggcccccagagcatggagcccacagggagaccgctaattgggtcaaacccttggcttacaaatgagaagactgtggttccttattacacagccaggtgtgggagctgaggacccacactctggccacgctctcctttcctgttgtagcaccccacatctcggaaatcccttgcttttttacagagcttctttaagctgcttgcaattctgaagagcgtttcagtatagtaccaatgttacagaaaattagggagctggcaccttgctttttgaagagttccatctcctttgtgaatttgctggtgactaggagaaatcaacgtaattgatttcaaaacaaaatcacctttgtttctaccgtagatcaccaaaccacccggcaacagaactgctagggaagtcaatatggctttttgttcagaaggagtagtcttcacagattcctgaggacagtgaaaagcaaagatggagaagactgtgttttcaagagtttctgcgaacccgtctgaagtgttgtaggcatgtgcacagaaaaccctctcctccggcatcactatctcctctgcccgcagggaactcagcttctgtatttccatgtgtcatttccccagctaaatttggggaaaggaacctgaaagaatctgattgctaaatatatagacgtttggggaggaaaaaatgaacttgggttttagttttatagcccaaataatttttagctgaagaaaataatagaaatgaacaacagacataaaactttagcctgtgtaaattaaatggttctgcagcattaacttcataaagccataatcctctcctccataaactattacatgcacggcaacatatctgatttatggggtgtggaatcgatgggaaaaaattaatgcttgaaaaacatattagagacattattgaacagattttaattgagatttgatttcaatgccccttatccacatgattaatgggccctacccttccacggctgcagcctgcaaagagtctttaatatgacaattaagtatctgtctttaggttttatgtagcaccccacccccaccccggccactccatcagtacagtgggcttttgtgcagattaaaccgagactcaattttctctattttccggca

SEQ ID NO: 46334 - DNA, 1411 bp, Bovine  19866880766176
  misc_feature (1)..(1): n is a, c, g, or t
naaggaaggacagataagacaggtggtcagacagaatagcagaagatagcaatgaaaatttcaaaaatttttacagctgaaactggagaaaatcccttaaggaaatgtaagctttcaaaggaaaagccgttgttttttcttctctttgtgttttgttttgtagttgaaagtagataaatgagctctaggtgagtagcagcttgggagagaatctgtggccagtcacaggatccagtgtgtttacccctcgtcattggtcacgatggttcctgaataggacgcccagactgggggatgtcagtgtggatgtccccagctgggtccaccctcgccaccgtgagagacagagccacacatgtgtggccggcagtcagtctgcaggtgtaggcgcgggcgctgttgagggtgaccaccacgttcccttctcacgggagaaacagtgaaactcgggtgcgtgccagccacactggatgcccttcctgacgggcggctccaggccctgcctggactctacctgtgatgcatccctgagcgtcctctgtcaggtggtcctctcctttcccgaagcccctcgtcacacggcctttcccagtgtgggaacagggcggattctcccagctggcagcccacagaaggcccgaccctgggacgtagctcgagtgtcttcccgacgtggccccggggagcccaaggggagggttgacaccctcctgctcctctccctgcagtgtcgtggaaaagcctcacgcctgccggcccttccctccacccgcactagcacagtctcctccgaggacccgtcgtcatcagagaagaccctccccagggcgcccaccagcttatttcagaagcaggggaagtgtccggattctctctgctcccctcgccctcagacatccggcccctcagtgctgcacgtctgtagcgtcttctcattttcattgtgcctggccgtgtaaaacccacagacaaactccattgtgggtgtatttttgaaaacatattggatcattataaacttttcaatgcgagctaaaacaaagcaactcactaaatatttcaatttgcccacctgttcaaattactccccacaatggggttgccattcacgctgctcctccactccttcccctgctattgtctgggctttaacaatagatgcgagttaataaaacccaattaaagatgagggaagcagtttgcaatggttcagatagaatacctgctcaggaataattagcataaagatgtaggcttgttgggtgaaggatttccagaagcatctgtaccactggcgcctttatggccgtccgcagtctgggtggccatggcctgatcacagaagcaacagcttaaaacgtgtccctgcaaagtaaaaaatattagcccagatctgcatttcgattcacag

SEQ ID NO: 46335 - DNA, 1538 bp, Bovine  19866881079429
  misc_feature (1)..(1): n is a, c, g, or t
nccacagtaaattaggcttccctggtggctcagatggtaaagaatctgcctacaacgcagaagacccaggtttgatcctgggattagaaagatccccagaagaagggaatggcaacccacacccgtattcttgcttagaaaattccatggacagagaggagcctggtgggctacagcccactgggtcgcaaagagtcggacacaactgagccactaacacagttacagcctcaatgaattaaaggagaatccctactttcaaggagcttactgctgaaaggcacaaagctgtaagaataaatgcactcataataaaggattcatccatatcacccataggagctgaaggttctaattagacctttaaacacacagtcaatgtgaccagggtgtgaagtggtttcacttatcgttacaattagaacattggcatttgcatttactgactgttttgtgctcacattggtaatctgaactttgctttaacgagtttttgtgttttatttcttctccattttttgaatagcagaaagaaacagacagtacttattagcgtttgcatttcaatcgcctacttgggctgggaagttaccaccttggtgagctgagccatggagggaggaacacaggctttgctaccaggggttggttttctaccttcgctgcagagggtggggttttgttctgttgactgaaaatttgcaactgaaacctggagactactaatttctaaaacgtttgagatttgacaagtgaaggacaagagtgtaaacactggagtgaaaaatactaaaatagcactccttccctagatcaaaaaacacttttgaaattgtggagaaagggtctaattgttgagcggctgatggcgatgggattggatcagggcaagctgtctgagttccaggtgccgctggtgttaggagaatttcaatagcagtgtccgaccgaccagaatccaggaaggacccgtgcactagatcggcctgagttgacagttgggctgctctggttctgttcggatcttgagaatctccatctgaggatgtgacctggtgggtgaccctgaaccacagtccagctgggggctcctggatcaaactggcctgaggaggtgggtctggggcaggtgtggccacacccaggagtgggctcccctccaaaccctccacttcttgcctctgttcctgcgacctttcctctgtctcacagtccctcccttctccccttgatcccgcatcctctagggccacacagggccccgaggagcgggggccggggagaggcagctccggcccgttttgatgctgcttctctaagtttggtcctcaaggagctaatgtggcagctgccactcacagcactggacgtacttggggtcctgactgcatctccccaccaggggacagggctcaccgtgggtgtgggctcagcctctgctggccgggcctcagacctgtggcctggtagggctttggagggagagccaggcagaaagaagggagaggaagacgtgcggcctgtgagaccttcctgtg

SEQ ID NO: 46336 - DNA, 1795 bp, Bovine  19866881103874
  misc_feature (1)..(1): n is a, c, g, or t
ntctgatacgaccctgctgatttcgattcatgcattccttcctattttggtttaaaagcatatttattttggttttaatttaggggaaactcaagaagatcctcatgggacaattgctcatccatcacagaaatgggtggcctatttgaacgttttgagaagctcccttgcctggtgaacgtccatccaggaaacatcatagtggccccagcagaagacacttggagaacgctcgtcattcaacagggtcccttctcccctcctccacctccaccacacagtgttttcacttttagccagcagatgccatggctggacccggctccatctttattccgctgtgtggtctgttggtggctctgttctgagggtgttcgggtgcttctgctgtgattagcatgctggcttctctgcactgcggtgggacagtgactggagcttgggtcttgcaggagcatcgcagctgcgaagagtgatggaatgacctcgtttcaggctttctcttagacaacaggcagtaccctatgaagattgatacagaagggcgggctgcctgggccggaccatcaaatggattgatattattctctagcagaggatgaagacagagtaaccgttatcatactcaatacgcaggcttgtcagcagcagaaaatcatcccgtgtcactgattatgggagcgtttcatgactgtcactcgaatttagtagcacgacagcgtgagcaggctactgggtcagaaactccccatttgtaagaaaaggaaaggctgcccgcaaacccagcccccacgaaggtgcccctgatggaagggagaggctggcaatttgcaatatgcatttgcttcttgtctcatagaacaagggtggcaggtccccaggctgggggcgtctgtgggttcagttccccaacacaaagttgctgcatgagaatctgtgccggggtgatcacccagggggagtaggaagtacttgcattctcgaagatagctgtgatgtacccatctcgtacagtcatgtgtcattcactcttcactcacgctgtggacacacccactcacagacgcagacacacacgagaaattaatgcctgtccactgtgaacggagaactgaggttcggtggcagctcgaggcacaagggaacacctggcatctgatgcccacgggggtgaggcagtcattccccacgtggcacgactggggctgcaagtgatcgcgagccaggccctgattccagcttctgaaactgagccatcattctctcattctttgtttcccaccccttgtgagaggcagaccccatgggaagcaggcctggcaagctgtgtcacctcataacgaaagagtgtgacagctggggccctgatgctacgagacggcagtggccaagcgtacatgctccaagtaggtgaggatgaagggagaagaccctcctgggcggcagaatcccgtgagacccaacacacagagcagatcacacacaagactcgctgagtcagtcactgcttctcaggacagaatcaggaacacacgggccgtcacggaggaggtggggaggcttcagcaggagctgagtcgaagggcgcggggccttcggaagtgttgatgctgctctgcaccctgtggatcaggcggcaggggggctgcaggatggtcccatgggtgaggccccacatccggagtgtgttcagaaatgaagcctactgccactgcgtggaccagaggtcacagggcaaccagcgaagagcatctcaggtggggaggggctggggagacctacaaagaggacagag

SEQ ID NO: 46337 - DNA, 799 bp, Bovine  19866881209625
  misc_feature (1)..(1): n is a, c, g, or t
natattcaagcccataaatttgaagggaaactgaatacagaaaattcttgttaatgcagtacattttctggcaattttatagtccaattttcagtgattccccacagaacgaatgcagttcaaaggcaattttataaagtactttgcagataactattatctgctaattattagaaattgcatgttgttgttaattgcataaataaattgttttatctgaaagccattaaaaaaaggtttggtgtttgaagcatatatggttttgatgttcctgtataaaaacgttaaactgtttaactctaaaataatgacatgctgcttttaagacaatttcttagactaatggattatggggagggtgggggtagggatccctaaacatgtattttactttatttctgtgagatacttcacctgattataaatctgcatgggaagcaagattgcaaatattcaccaaatgtattagaacaacatccatatgatgctatagttttcttttttaaatccttagaaagaagttaatataaacattccctttttttccccaaaatagtcttatttttttaatgttccttttttaaaaaatatatttcattcatgattggctataagaagactatatttgtatgaacagttccctttgattttctatgaaataattcagaagagtgtaatggatactctcacagaatttgagggcaggacgcctctggaatgagtgggtgcctcaggggtccactccccgggaggcaccagttgaggccccaggcggcccggacgggcccgatcctgcctg

SEQ ID NO: 46338 - DNA, 1184 bp, Bovine  19866881344294
  misc_feature (1)..(1): n is a, c, g, or t
natcatcactgtcatcatttttcactttattgctactactaaatacataattaagagagaaaagcagttctcgcatctgtccacttccgctggcagagtgtccatccggtttacacatcttacatgcggtccccagggctgcctcctggcggggggacaataattctaaattttttggctgttccctgattagaagtcactgagcaaaacataaatgggcagatccattatcccttttataaaatcagagttgagcacaagttctcttataagccaggtgcttttggaatcaggaaagctgcccactgctggctctgcctctggaggaaattgtgggcttgagaagtcctcttggtttcttagaaagcatccttgctaacagacaggaaatcttgcccagcagcattttccagctatgtgaaggtccttccagaaggaagagtgtgtcctactcagagaaagacactgggcgggggagtaaatatgagccacggctcatctttctgagtttggcaaagatccatgacgttccttctctctttttataactctgatataaatctcactgaggtcttccagatggtgctgaggataaattctacatgaactcttttctgtgtgtgttccaggctgtatcgacatcactatcacaaccagttaaaacttgccttttaaaaaaaattgcatagtgctaaaaagctttgatttttaacttcattgagccttttgccgactggtcaaataaacccaacattccggtcccgtcaactcacaatatttgttcctcaaaacacgttccagggttttcatttccttgaaaagaaaaggaaataactgtagcataagaagatgatatgaagaacctactcattggaaaagaccctgatactgggaaagattgaagggaggaggagaagggggtgacagaccatgagatgattgggtggcatcactaactcaatggacatgagcttgagcaagctccgggaaatggtgaaggatggggaagcctggtgtgctgcagtccgtggggtctcaaagagtcggactcgacttagtgactgaacagcagcaaacaagaaggagatgatggatagatactccctgttgacccaggtttgaatcctagctctgtctcttgcagaggcttttggaatccccggtcttcaacaatgagggggaag

SEQ ID NO: 46339 - DNA, 673 bp, Bovine  19866881453926
  misc_feature (1)..(1): n is a, c, g, or t
nggtcgcggaggcggggacacagagccgctcacacgcgctcatcgcttattcactctgccggtcctgcggcagcggctcggtttacaagacacggagagttaaatgtcacccggagaagacagacaaggcaacgccgcctgtgtatgaaatatgacaccagggtaattagcaaacttcgtggccccatccctcatctccttttggtcacttggccttcggacgctgccctggtgtcctccacccacatctcagctgagttggggaaatagtgactcctccctctttacacacttgtttattaattctgtgtcttttctctctatccttctggcaaaaaaataatgaattctgttctgtaactttcacgacaggcagacttccaggcaagtcagcaaggttggagtttgtcttgacatgtttcttcatcgctttctccggaccatccacccaccgtgcacggagtcttctctttcaactacgaagatgctgaggaggaccccccggcccgcggccacgtccagtcacttcccgattcctccatgaaccccctccacccgccccactcctcatggagcccctgctttccaggctccatgttttccccgagcaattccacacaacgagatggtaacagttgtttgtctataaagcacgtactatttagaacacaga

SEQ ID NO: 46340 - DNA, 1879 bp, Bovine  19866880426930
  misc_feature (1)..(1): n is a, c, g, or t
ncgtttggttgaaccaaggcataaggacttgcatgcatgtccggttctttgcaatgccaagcactgcagcccgccaggctcctctgtatgtgggactttccaggcaagaacactggagtgggttgccatttccttctccaggggatcctcccaacctagagactgatcaagattatgtgtcctgcaagtctgtactgtgggaagattctttaccattgatctaccagggagagaagtatagaacacggtcatatattaaagcccatgataatatttttagggattatattgctttgtatattttgaaataatatttgggtatattgggtaaaatgtattatttaaaattaatttcatttactttttaaattattttaattgaagaatgaaagtgaaagtgaaagtgaagtcgctcagtcatgtccgactcttttcaaccccatggactgtagcccaccagcttcctctgtccatggaattctccaggcaagaatactggagtgggtagccattcccttctccaggggatcttcctaactcagggatcaaacccgggtctcctccattgcaggcatattcttcttactgttggggccaccagggaagcccatatatatattcacttacaagtatatatacacacttatatgcacatacatgtgtatataaaaacacacaacatatgtataaaggtcatatatgcacacatatgtgtacatatcgataagtagatacatagtcttaaagaatagtagccaaactcttagttgcttctttctttccaataattgcaaagtcttaaaacgtgcacttccttgcccagaattacctctaaccacattaataactaagattacttggaaattgagatcttaaatcataggaacatcagttataggaaatagaaatttcttagatactaatcaaagtatccatctttgtcccatatatttgacattttaactttcatgaaaatctagctttccccaagagatagccctgtctctatagcctgtcaacttccagccttagtgcattcattgaaattttagtgtcaatactgtagctatgtaataaagtttataactcatagcattttagtacagtcatagagaacaaagagtgatatcataattgcacaaagggatcattaagtcactggctagagtgaaaatgcttctgaatgagcccagaagaaactctgtgagacaggtgaaggattccatgctaaaaggccaagggatgtgacactttgtccttcttgcctgaggcttgtgcaagtcagcttttaggaggcacttatgaaattgacatttctgcacatggtatccatgtggctacgttgcaaatatgctgaattctggccccttttgcaatgttgaaaaagtaaagtcatttcattactgatttacatgggagttattatctgcaacatctgtacacccaacacaagttgatttaatttgctcaaatttgctggtaatcatgcacattgacatggaaaggacattctttccctccttactgtcttgaaaaaaaaaaaaagaacaaccacccatttcctccacttgaatttaatgcacattcaccaatggcagccttggagagtagcttgttgaagagttagaaggattaaggcagctttacttggcatcattctgggaaaatagaatcctagcatttttgcctttagagtttccttactggacagtgaaatgcaaaactcaaggaaggtaaactgtcagttttgcagtgttgctatatgaaagtgggaggatgtgtaatcactgaagagatgaactgtgtcatcttttttttttttttttttcccctccgttaaattcaggattgttccctctggtataatcttcttttttgc

SEQ ID NO: 46341 - DNA, 1463 bp, Bovine  19866880447381
  misc_feature (1)..(1): n is a, c, g, or t
ntccatcaccaactcccagagtttactcaaactcatgtccatcgagtcggtgatgccatccagccatctcatcctctgtcgtccccttctcctcctgcccccaatctctcccagcatcaaggtcttttccaatgagtcaactcttcgcatgaggtggccaaagtactggagtttcagctttagcatcagtccttccaatgaacacccaggactaatcttctttaggatggactggttggatctcaagactaaaaaagaaacccaaaataacaaaaacaagaaaaggacaaaattttttttaaataaaagactctgttcttggatggtcaggttactgagatcacctacagagtacagttcttccccagttaaactgtttcatgactcttgtctctgattaaaggacaaacaaaatccactatatacccttttctctcttttgaatggactaacagtgccttcacacttcctaagtaacctgctccttcagaaaatgagaatggtcccaggaaagtcatttcttttttgtgtgtcttaactttttcacttgggaactgaagaaagatttaagaaagaaatatttgcctaacacttcagaagagctttgcggacagtggataatgaaataatgacttctaaaacaccagcagatttgcagataaaagttgctaagagatccaagatgatgagaattttagagaaacagtgcatttaacagccattcacaagagaggtttaattttgagaagtgcttaaagaagtgcttcgatttagttcttaaagtccgagtgattattttaggactttaaaaaatgccagcttgggtagaaaacaaataagcaagtcataaacatgtcacccttgctaaaaatcaaattctttctcctaaatttaaaaagtaataagatcggttacttagcatggaagtaaaggaaaaaatgccaaagaaagcagaaataagcttcataacaacacaaaatgtagttacagaaagaataacaaaataagagcataaaacattccatttccaactgctttgctataacttttaagtatcaaataacataggagatagtttctatattaaatataagaaaagagaatataataattatgtgctgtgcttagtcgttcagtcgtgtctgactctgtgactcaatgaactgtagcctgccaagcacctccgtccatgggaagtcttcaggcaagaatactggagtgggttgccattccctcctcataataattataaagatgggtacaattactatcttctgtttttatcatgttagtaagaaactgcattgacctaaatttcccttcctcatagagtagtttgctttttaagactaacagatttttagagaatgttttaggaatttagttatttagcttggatgaagatatatttccaaactaaccttttcctcaaagagaatgagtttttactaaacaatagataa

SEQ ID NO: 46342 - DNA, 1843 bp, Bovine  19866880488509
  misc_feature (1)..(1): n is a, c, g, or t
nactcttttgttgaccatgatggccactccatttcttctgagggattcctgcctgcagtagtagatataatggtcatctgagttaaattcacccattccagtccatttcagttagctcattcttagaatgtcaacattcactcttgccatctcttgtttgaccacttctaatttgccttgattcatgaacctgacattccaggttcctatgcaatattgttctttacagcattggaccttgcttctatcaccagtcacatccacagctgggtattctttttgctttgggtccatcccttcattctttctggagctatttctccactgatctccagtagcatattgggcacctactgacctggggagtttctctttcactatcctatcattttgccttttcatactgttcatggggttctcaaggcaagaatactgaagtggtttgccattcccttctccagggatgatgttagatattaatattcaaatgactgaatatatccttggcttaaaaaaataacccctaaaccaaagataactaattatacaaaattacttttattacaaatgttcattaacacactatttgctttttttttttcttttttagtgactactgtacttcacatccaatgagcataaaatgtagcatctatcattgactatgtacatcgatttcaaggaaatagaaaatacaggcaattctattcctaaaaacttcaagccaaactacatttgtcatttatttgtctattcttatattcaacaatgcatgtcatgaactattcctatattttccccagaatagaaatggtaactttgtggattaaaactctgtatgtattccaacacatatttttttgacatttcaaaataggcattgcattttacttttagaagaaaatgataaaagggcttaaatgtattataacaacattaaaatccaagatataatgatataatatggagagaaagatatgggtaaaatgtaagggaaataaaggctatatatatattttaaaccaaagacattagagaaatcctgaaacaatgacaagccataaaagtatgggaaacatcttttctccggagtgttgaattccttgtaaaaactgaaagcagttctctttcagctagtaactcagtttaaaagtgaagtagtgtgaagtgtgactgaacattgtaaggtacatactctgccttttttgtactgagaaaggaatggatatgatgactcattcctcaaactcttcctggtacttctcaccttggtaccgtttgaaaatgtcaaaatattttaaccacactgactactataattgaatggagaaaaaaaatcatttttccatcaaacatcttcatagtacatgacaatgtcatatgggtcctgaacagtttttctgaaagagatctcaatatatgtctatagcattgaatgtgtctcaaaaatagaaaggcatctacctgctctttagcaaatttattttaataaataccaaaatgagcaagcaagccatctgtgttcttcctgctgataataaaaaaggcatttgtttgatgatgacatatttctcagagtgtaccaagtactttattttatgatggaatttgtacagcttcctctaaatgaaataatgcaagatgtttattatttcagcatctgttcccatattctcttagccacttgaagagtgactcatatttctttgcaaaaaaatcacttgattgtttcatcttatggctacacagatagttcctgttttcttttagcacatcattcactctcaatataacaaatgctgtaaaagagaaatgcagtctttatgaaggaagggaaagagaa

SEQ ID NO: 46343 - DNA, 2151 bp, Bovine  19866880633310
  misc_feature (1)..(1): n is a, c, g, or t
ncacaaatggaggaaaatttactagtggtattttaaagtcatatttaaagtttatccctggatttatcagttacctgagccaatatattctttttaattaaaaaaggaaataagaacaaaaatagtacaaagaacaccctttagtaagcaagtacttttagtaagatttgtatattattaacattttataccataacttctttctctgtccctgtctactttctctgtccctgtctctctaaagaagatatacagatggcaaacagtacattgaaaaggtgctcaatgcaaaggcaatgtaaaacacatccattaggaaagttgttagcaaacaccatgggattgatgctgtagagcatatggaacaaatatcctgtagagcatatgtacattcccattcttgttggtgggaatgtaaattggtgcagccagtatggaaaacagtatggagattcctcaaacaattaaaaatagaactaccatacgaccaagcattttcacttctgaacatatatgtggataaaatgaaatcaatatcttgaacagatatttataccccgatgttcactgcagcatgatttacagtaaccaagatacacaaactaagtgaccagcagcagatgaataatcaatgaagacacggtgtgtgtagaacattattcagctacagaaagaaggcaatctcaccatttgtaacaacacagatgaaacttgaggccactgtactaagtgaaataagtcagacagagaaagacaaatactgaatgatctcacttacatgtggaatctaaaaacatcaaactcatagatacagagagtagataggtggttgccagggagagggtagggaaaagttggtcaatggtacaaactttcagctataaaatgaataagttctgaagaatctaacatacagcattataactatagttaaccatgcaatagcaacaactttattgggtacttaaaagttgctaagagagtagatcttaaaagttctcaccacctcccaaaaatggcaactaagtgagatgatatatatgttaactaattttattgtgataatcatttatcaaatattcatgtatatcaaatcatcaccttgtatactttaaacttacacgttacatgaaaaaatttttaattttacttcatgagattaagtgaagataatttcatagataacatatctggattaacaaattgttatttcttcatgggatgaggagtttacacttcattttggaaataaaatcaaagttccataagacagttttgtatttggactcctgattattaatttcaatatttcttcaaatgaattccctctgttcagtcattaagagtaatgattcctctccacacataatttctaaatcatttaaattaattctttggagaaaaaaatctcccataaaagtgataagggtgccccatacatgaaactataaaggactttctaattaaagggtgaagcacgcacacacgtttgaaggcactttatattagtgttctaattatcttggctactaatgatgctgacccaaataatctataaatatagtgtagacagataagcattatatttaatttaaaacatagtttaaagtaatctattgaggaaaaaaaggaagtctagagtctggataggttagcattatcttcaagtcatcaaattataaaacaacagaaagttaaagaaaactttattgagggcaatttgtacctttctctccaattccaggaaaaagatccttcatcaactttggtttagtatctgaaaaatggctttggacttatcttgtaaatttcaatgatatgggccatctgctccatgtgatagtataaaggtggtgatttattccagggcctttatcatatgaataaaacacaactcagatttgcatcaaaaagcaaaaccaaaattaattatacagtgagatgaataaaaacacaaattttccaacatcttaatgaagtagaggtaggcctccactgattacgtttcaaatcagattcaagtcaggttactaggggtttttataacttacatgaaattaaaacaaaaaagtacaaaaaaaatctaatgagattctccaacagaataaagtatctgtcaatatatgccacaatcactaagttaaaactgga

SEQ ID NO: 46344 - DNA, 2181 bp, Bovine  19866880634209
  misc_feature (1)..(1): n is a, c, g, or t
nttttcaacaaacgaacaatctgagattcagaaaggataagtgatttgcccaacattcatcttggaaactagggtattttgatcaaccaattaaacttctccagaccttaattatttgttgctgtgtggttttttgtgtttttcatctgcagaacgcagagtcagaataggtgacctctaaggtatgcaacggcaccccacttgcaggcagttggagaatctggcaatatgatacactgagaatcccagggacgggggagcctggtgggctgccgtctatggggtcgcacagagtcggatgcgactgaagtgacttagcagcagtagcaaggtattttttaactctgtctttgttttgtttggcaggttctctcagccctgcaaggtgagttgtctctctgccatctgagttctagtaaatcagttctgctgccccatccactgggaaaataagaaagaaaggaaaataaagcacatgatgtaagggaggtttctccaaactatgacttctggtagcataacatctgggcttccctggtggctcagatagtaaggaatctgtctgcaatgcaggagaccctagttcgatccctggatcaggaagatcccctggagaaaggaatggcacctcactccagtattcttgcctggagaatcccatggacagaggagcctgatgggctactatccgtggggtcacagagtcacacaaccgagcgactgacagacacacacatacagcacagcacctaggacagagtcagtattgagcgctggctacagtatcagctggtgtttcacttcggtcaacttgcttagtcttaattttccacttagttcaacactgactctgtcccaaataatcaaaatcagacacagaccagaaaaaaaaaattcatttactctgcctttctagttccctcctccttgctttgctttccaagggaatctataaaccacatgtggacatctttgttctcaaagccgaactttaaagaaaattacagaaaggaatatacaatttggcaaattttactgatcaggtagaatttttgaagtatctttgaaattcacttgaaaggttatataaatgtgagattacaaatgcaaggatgagggggaacgagttcagctctagactttaagaggactgtagagcattctgatctgctttccactcataagcagctttaggagaaaatggcaattcaccaaagaacaaagaacaatgatgaagtgttggctttttttatatgtataaaagtaggagtaaactatttgaaataatggagaaaaggaaggctacccactccagtattctgccctgaagaattccgtggactgtatagcccatggggtcacaaacagttggacacgactgagcgactttcacttaaatactaggtttttaaatctgttttgttgtgtgttttgttatgtttatggaagaacttagatgccacacggaagtaaattatcatgcaaatcccacaaactcccatggaagagaaaaattttattttcttgaaactgagaataattcacagtctcaaagattgcagattaatctttgatttgctgaaagcttcttccgtaataatggaagaactttatgtcctacagctttgggttcagacttgcagttgagttttgtttgccagagttcaagattgggtcagggtagaatcaaagcccagttcctgctcagtaaccttagctttctcccatgaactccgtgccatctgcctgtcccttccaccacagtttttctttcccatgaaagcaatctgcctaaatagctaccaactaattactttatactgtagaaatactgctgaatggtacaaataattcaagaagtatattaagtctcttaaatggaaactcattttaagatatcctaaaagttttaagatttgttctcaggtattttaataaaccttagaattccagttcagaagcttagaattccagcttcagaagctttttttagttggaaatctcttcaaacttaaagaaatgctatgagatattagaaaggaccctgatgctgggaaacactgacggcaggaggagaaggggatgacagaggacagggatgggttggatggcatcactgacatgagtttgagcaagttccagaagacggtgaaggacagggaggccctcgtgtgctacagt

SEQ ID NO: 46345 - DNA, 818 bp, Bovine  19866880677797
  misc_feature (1)..(1): n is a, c, g, or t
nacaaaaaagttagactataagtttcagcatacactgtgatctaaagcttatcaagtccctttcttgggaggttgaagaccattattcatatatagtatggatcatgctccttaaattgattagaccacacttttctacagtgaaacacatgtaatattcagaaacaaaatgtcaaaatacttggctttcaatgacccatcagatcacttttgagatcacttttgattatttgtcattagagaatacaaaataaaacctcagtcctctacatcaatctttctgtagttctcagcacaaaaaatcaccttggggtggggagagatttgtttaaaattctgtgatttgaaatttaaaagtgtttttgtcttattttctcaaaaaatacaattttatactactttggttttataaaaacaaatagcatattcaacatactttatatttttatctatatgactttgtggtagataggcatatgagcagaaacaagtatgttataataacatgaaatgatacaggagaattttaaatgctgtaataatgtgtatttatagtttggtttgttcattgctcaagcttttaaacctttttttcagttcatggagtttgaaattttactatttctgctatgaactagaaggacataaagtaccctggagagaaactgaaaaagaaaatattactccctataaaatatgaatgcctgtgtggcctctcaggtgtgggaaatacatttattatggattagtctttccccaaagggaggtgggctatggaaataacaaaggagaagaggaaataactggcaataacaatg

SEQ ID NO: 46346 - DNA, 692 bp, Bovine  19866880772092
  misc_feature (1)..(1): n is a, c, g, or t
nggttagcacagacatcagttaatgctggcttcctaatcctaaagtttgcactggatttccatacaacctgcagagggagattaagttgtcagcactctaatcaaccagaatttaaatatgggctaagtctaaagaaatcatttttgtcctgtgctcttaattaatacctgtcaagagtctggggaaagatttgctactgaacataaggaattatttggacataaatctgtatgttaatttctaatgcatttacctgtggataaaaatatggaagctaagatcctgcttcagggaatgacaaggaaaattatctactttattgctataattatcattaattaactaattaattttttaagtttgtggtaggggtttgatatataattatggttttaataatatttttattgataaatgtatgtctttattttcagaatattagctaacatttatgtaatacctcttattgcaggagttgtccaagatatacaggtatatgacatatagaaatatgcatacatatttcaatatatatgtatatatgtgtatacctttaggtatgattatatatgtattttttttggtcagttgctctgttgtgtccaactctttgtgaccccatggactgcaacacgccaggcttccctgtccttcaccatctcatgaaacttgcccaaactcatgtccattg

SEQ ID NO: 46347 - DNA, 2667 bp, Bovine  19866880801271
  misc_feature (1)..(1): n is a, c, g, or t
natactgtttacaattacaagacattgtcccatctttttctctactcaagaatatcttatgagtgaagcaaggaaagcattattatttctattttttcagcttatccctgaatcagaaaattttctgaaactgcagacatacaattttcaaacgtgcattgagaggccactttctcagctatgattccagggcgtggggatgggaagttgaaacaagttatttgcgtaccaggagcttccaacacgacacaaaggaaagaaacataattcatccctgtgattccagcagcagttacagtgagtaaggggagatagaaatgggtttccatactcaacagtgaacaagccttgcaggttatctgattgattccagtgcttctttcatgagaaaatgaggaacaagccatgagattctggtcataaatgctgtcggaatttaggaaagaacaccagggtatgtcaggacttttagagttaagtggggttccgttttggctttagagaataggttgatggctggtgaggtgcacggaaggagagggaccattctgaagaggatgattatgtttagaaagcatggacttggcccgaagcagagtgtttgggggatgaaaaggagttaccagcctgacagaggcagagtatgtgaaatgggaaaaagtatgaagtaaagctccacttggaaaatggcacagaattatgaatgacctttagtgaggagaatttgctcttcaacacagaaggcaatagggtgttggagttacctgaggagtgtcataacaatcatgatattttgggtttagtcgctaagttgtgtctaaccactgtgccctcatggactgtagccctccaggatcctctgtccatgagttttttcaggcaagaatagggttaccatttctttctccattttagggagattattatagtggaaggactgaataagagaagaaacaaatatgggcaggcttatcagatgaaaatctaggctatggtcttagcagccagaattgcaaagacacagtaaatcccagagacattttaggtgatcagaatgactgaacacagtagcagactgttctcaaaatgaagagtgtcaaaaattacttttctctttgtactcattatacttttcatctcattgtactttccattaattctttatgacctgtcatttaagcaatttaatttccactcaggaagatatgtgactctcattttctgagaagtacagtgagatgaaaggtattaaaggtgcactgcatatagtaagtgttcaataaatgctcacaaagcaattaaattttaaaattaccaaatataaacagcaaactcctctttcaaaagctcgctttttaatctagggttgtcacactgagataaatgaaatctagaacaaaaaaactgagattttaagtgttttaagcagtcaagtgtcaccagaaactgcttcataaatgtaggaaaagaaatttttgacacaacttgaaaagtgatatactgaaatgtaaatgagaagtatcccatctaatttttataacaggatggattgataaaattatctacacatatattggtagtactagagttcatttctaaaagaaaccgtatgtcaaatgaaaccatatctgtttagtgacaagatttcatttgtattttcttatctttgtaaatattctgtatatgatagtaattgaactacttttatgagctaacagtaagtgagaagaaagacacccttagttcatttcatgggattaaaactatgaatgataaagaagttaattacaaatacaaaactccaatatgtttaaatccagattattttcacaaaatatataggcaggtttgttggaaaatggcttcaattagcataatgaggtataaaatcataaaaatcttgcttgaatgttaaatattccactttgcttatttaggacaatatatatcttggtaaaatttgatatttgtaagtttataaagatatttatgggcaactaaaaaagaagccaaaccagcgaataatatataaaggtattcatatcataagtaagaaaattgctaccatctccatgaaagtttctttacaaagcatttcatttatgttacacattcaattaaaatgttaaataattttgaaacataaaaaatgctgtgaagtgaatctctagtaagctagatgacttggaaaatttccattatattactcacatgtattttgaaatgagctacagaaaaatatctccaaagtatgtatgtacctatgaactcattaattttcttcatttacatgttccattcagaatgattttgttgtgtcaccctggtatttgttgatgaatgcatttataggttactcccttccaaaacgttttaatgacatttatagttggaattaatcttactttattttcttacaaaagcactttgttcatatctcttttagaaggcttatgtagccattctgctatgaattagtcttccctggaacttatgaaaaactcattcagtccttgttgagtaagtatattaaattttgaatcctcttccctcttttcctggcaccctgtatatagaatgtgctcagaagattaatttgagtctctctatgtttgtcagccctctcagcaatattaaataatatgcctaattagatacataacttag

SEQ ID NO: 46348 - DNA, 1919 bp, Bovine  19866880813890
  misc_feature (1)..(1): n is a, c, g, or t
ntacgtttgggaaatggctattaatttgaaatttttctagaaattctttacctattccatacaatagcattatcagccatcatttatatagaaaatataattactggacataaaaaaaagcttgttttactggatatgaaaaaagtttatgttttaccttattgactctagtaaaatataatgaaagatttaaaacttttctagttagaaaataacttttaatagttattttaatagtctatagtagtagactattacaactccattgttaaataaccatcagaaataaagaggcagaaatatagtaaagagatatttactagaataggtaacagaatggttatattatgaaacaattaaaaagtaatttctattaatgatcatgaaaaatagtcattaatacttccagaacataattatcttgatagttaacctatgcactcctggttagatttgttagaacatcataatttatctcagtaaacacaattagcatcaacctcagtcttaagaatggacctcatacctcataaagcaaggggctttctattgggagtgttttaattagaaatatggtggactgtttctccttgtcccttggtagatataatagaactactgtaagttagggcttttttttcatctccagagatctttaatatgagttttggggaaagtttctcaattattaaagtttaaggcatgacaattgaaagaaatgaatttaagtcaagggtattagattaccatctcaatgagaagtgaaatcagcactttcaaaatgctagagagtctataaacatttttcctcccagtgtgagaaacagtgagcagcttaaaatagcagcttttgttgttacttaagattattagtttagataagcagtagacattatcatagtgctaaaataattacaggttttattgagttttaacttgtcactaataacagtctttcattgcattggtcagtactgaaatgtataaaagattttttcttctgctttcaacattgttaaatacacacacacacacacacacacacataaaacacaaaaattaccaaagacgtgtatttcttcctttctttatatgttcttgccttttttctccctgataaatattgaggcacacaaagtgtgttgcagctgtaaagaccctctcaggaacctgggacagaatttcctcgaattaatcctccattaatgctgaaggagtgtaggttcatttggttcagaaagatttctttattttacttgagagtttagattgtaattttgataatatcttgcttggaaagttaattagtttgattgggaatcatggagattttgtcctgaaagtaaaataatagatttttcaagtctaagttgaacttggttttgctggatgggttagttaagggagtatagacctaatctgggacaagaaaacatatgcattaaccttgtgtatttgcccaaagcctttctatttccatactgaaatgaaatgaaataacaacacaagcacacagcctgtgagtttgtatgaactttatcacccgaaagcactctatatttcctttggcttcatattttagattagctgtaaggtccagtggaaactcctgtcatcttattttaatgaattcttcttcagcaattaaattgcttaattgaagcactcttacagcaagggatctcacattagagaccactgaaaactagcaaaagtgaaagtgaggtcggtcagtcgtgtccgactctttgcgaccccatggactgcagcctaccaggctcctccgtccctgggattttccaggcaagagtactggagtggggtgccatttccaagttgtaaatagcaaaagattcccttggtcaaagaaaattggggaacttcaaaactgacttaaaattttttggcttgctctgatc

SEQ ID NO: 46349 - DNA, 1552 bp, Bovine  19866881040657
  misc_feature (1)..(1): n is a, c, g, or t
nctattgtttcttaaatgagaacaaatcctcaagtttattttctgtcttctttggccaccagttttcagcaagcatgcttatcacttttcagttgagctaaaaagaaacaaaaattctttcttgattgctttgttatctgtgcaatggatgctcattcattttgttcagtaaggaagaagagtggctgtgatgaactccctccaacatgtatttgttgtgccagaaaacactattaatggctaaactgctgagaatgtggcacccttgtaaagaatgagcattcaaagcattcaaaatttaattccagatatacaagcaataattctcaaactgtccaggttctgctaatacagaatgacacatttgagaagaaaacattcatttccttcctggtgcatttccaagctgtctgagaagctgaaattttctattacataaaaaaaggccacaaatattcttcagtgattgtccttgatacacagtccctcaggctcaaaaagaaaacagctctcattatgctgtcactacaaagtgcacatattgtgtgtataaagagcaaaagcaaataaataaataaagtccacaacagaaacatgagcgaaaattgctgcaacaacttcattactagggattttaagatgctaaagaggtaacgagtaggaaggtacaaggagaaaaaatggatgttaagatctgcacaactagtgtggattttcccaagggcaaacttcacttttattaaccatctaaggcagaaataaatataacgtatggtggtatctgcagactgctatgacatctttactgtttctggtaaaataatttagcaactgcacccaaaaccagtcaacagaatactcccttcaatccacagtatttatgtcttcaattggtattttcatttaatatcatttcaatgtaatttttaatccttactcttatatctgctatttctcgaccacatagggtggtttttctggcagcaaaatacagccagtgtgggagaagtttacatctggtacttggccagtaggaaggtgccaatggtggggagaagccatggatcattagcttcactcgtaccttttctattatatttctaccaaaatatgctaggtactgttttaggtattaggttaatacggatgcctatgtgacaagggtggtgcaaatgactattaggaatatactatttgctaaatctagatgatgttagaatttcacattttagcagtagttggcaaccagaatttctatctaatgatcctccctgatgtgaagaactgactcattgggaaagaccctgatgttgggaaagattgaaggcaggagaaggggacgacagaggatgagatggttggatggcatcaccaactcaatggacttgtttgagtaaactccgggagttggtgatggacagtgaagcctggcgtgctgcagtccatgggatcgcaaagagtcggacacgactgagcgactgaactgaactaagttctatgctaagtcaagatccaagtaggagcaaaaacgactactaaagcaatttcggac

SEQ ID NO: 46350 - DNA, 839 bp, Bovine  19866881250874
  misc_feature (1)..(1): n is a, c, g, or t
nttaccaaatgcagtcaaggtgcttgttttcccatacttccaatcacatagactactgggagttagtttgtggtaatatttagaatatcaatgaagaaatctattaaagatatagttgtcaataacatcaaaatgcttctgagaccaattctatgaatctgatattcaaatctgccttatagcatttaaacttgatcttgttgtgcaagactgtattgccttagttccttgtaacttttaaaatccctttattaacaatattccataataaacttgacagtgacaaagcttcatatcttttcaaagtggtccccacactattactacaggattctaaagtttttagcagctttcataataacaagtgctacttatttattgcttaatatgggctaggtacgtacacaggcccacagaggcacgtgcacacccacctgaaataaaatatgccgatgtattgaaaattcactaggaaatggaaaaacaagactattgttgttgacttctatcttataacatcactcgcagttgtagtaactgtcacagcagcaccagattacttttttgtgtttctaaaggtaatgcaaaattttatgcctctctaaaactttattatatttttatgaaacaatttggctaatatagcacttgtataattctagggtatgcaacccagagagttttgaaggtggttgttattttgagcaacatgaaggcctttttagctctattgtctatttcttaataaattttctccctacatctgctcggtcagagttgagtgagtagtataatactctcattctgaaatgtttcccatgcattgctgttgttcttat

SEQ ID NO: 46351 - DNA, 1063 bp, Bovine  19866881273398
  misc_feature (1)..(1): n is a, c, g, or t
ngggcagcaggagaagcagacaacagaggatgagatgattggatggcatcaccaactcaatggacatgagtttgggtgaactctgggagttggtgatggacagggaggcttggcatgctgtgattcatagggtcacaaagagtcggacacaactgagctactgaactgaagtatgtacaatttctagatttgttaagtttacttaatttttataagttaaagttaagcactgaaagttaagcactgaagacagcatcatttcaatttttatttttaaaaagtgggctcaattttatttttaaatagtttatatataactagcagcatgtggggaagggagagttttggtgatatttatctgaatgcctcttagtgagctaaggggtcatacagagcagacttgggatagaaagaacattccaagtaactaatttcctcactttatacaggaaagtagcagttgaagaatcaaagagtgctctttctccacgtggaaaagtacatgacttttcccccaggcaaaagcctgcttagggttcttttcagcaaagggcaaggatgacttgagtagagtcattttctaaaaggccaggaaatagctgctcattttccccctactaccttgctctagttactctatatttgaaaaggtgaaataaaagttggtgcatttatgtgagggccatgccaaagtgcttctggccttattgctctcctgcttccctgagccattttctcttgtgcttgctcagcacttctgccgctctttgtgtctcagagacatctgaacaaactgggactcgctttaaaatagtttttgtattttttaatagctttattaggtgtacttaaataaaaattgtgtatattcaaggtggaggatgttctgatatgcatatacatggtgaaataagtgtcacagtcaagctgtctaacatatgcatcccctcacatggtgatggctgtatgtatgtgtgtgcatgtggtttgaacagttaagatgagaactgagcctcttttaccattctaacccttccagtgctttccattgtcctttagcccc

SEQ ID NO: 46352 - DNA, 797 bp, Bovine  19866881476582
  misc_feature (1)..(1): n is a, c, g, or t
ncttaaaaatagagcgtttcctactagcttaatagacaatcgactcagttgtcaataacatggaaatacaataaatctgaagtacagcaaatgttttccaagtaaggcagttacgatgccagatattagcagcaaaggcatgctttgtggcactacaaatcacagttctgctttgtcttccgtaccttaaatgctcaggctgtaaaatcaggctatgtccttgctagctccttccccttccatagatcagaacctacattcacatattctctttgcatctatgcccacttcaaggttcttctcctttcctgtgcttacctgatgctgtctgggccccttcagtagcaagcccgtaacttttggtgtgttatatttaccaccgcttctgtttctataatgtgcttgaatgcagtgtaagggtaatgaccatttttctggatcttgaattcatgggctcataacaaataaaagtcgtcaaaacttcaaggtcaaatgaataattacctagatcccttgagagaattaaaaggaaaagtgtagagaaaagagacactgtttaatagctgggtagctttaaattcacagcaagtaagttttcaaaacagttatttagttttatttcaacaggctgaaaaaaagacaaaaaaggatacagagtaagttacttcaagattagaaacaaaaggaaaatcagcaaatatataagtaatacaattctcagtaatagcggaaccctcaaagttctgtagtactcatttaatttatgttaattgcaaattataaaataggtttgacag

SEQ ID NO: 46353 - DNA, 1739 bp, Bovine  19866881982772
  misc_feature (1)..(1): n is a, c, g, or t
ntagttttgatttgcatttctctgatgattcgtgaagttgagtacctttcatatacctggtagctgtctgtgtatcttgtttgaagagatgtctattcaagccctatggccacttttaaatctggatatttgtgtttttctattgacatgttggagttccctatatatttttgttgttaacccattaccagatatgtggtttgccattattttctcccatactgtaggttctctctttattctgttgattatttccttcactgtgcaggagatttttagtttggtgcagtcccgcttgtgcatttttgcctgtttgtgtgtgcatctttgaaaaaagaacaaaaggttttattcttcctggaataccatatcattattatacctaagaaaattcataattccacaatatcatttaatatccagttcatattgaattttcaccagatgtccccccaaattgagaaattcacaaaacataaaatcaaccatttaaaatgttcgttcaatggcatttgttgctgctgttgctgctaagtcacttcagtcatgtctgactctgtgcaacaccatagagggcggcccaccaggctcccccatccctgggatcctccaggcaagagagtgggttgccatttccttctccgatgcatgaaagtgaaaagtgaaagtgaagtcactcggtcgtgtccaactcttagtgaccccatggactgcagcctaccaggctcctccatccatgggattttccaggcaagagtactggagtggggtgccattgtcttctccggttccttctgttacttcttattaaagaatcagtagttttctgttgcccagtgttccatactttcaaagcacaggcctttctaggtagtatattccttaaataattacaggtctcttttaaaataaactcttctcaacttgttaccagtctatatttttaccagcttttggttttgcctttagagttgtttcagcaatgctaattataaagaaaaagataaggtcaaattgtttttctttcccattcatagcagctcagaaaatgaattgtagcattcttcttatttgtacaggtattgatgtgttcattgtggcaacgtcttcacagataataaaaacgacatcctttttgtagatgtgctaattatctcttcttgatcaagaaaaaaacattgaatcagcttccaactacagagtttcatttacatccatatttcatgccgccaaagagcctggactattttgtgctacttcgtattttgattaggaaataaaaatattctggaatattattattaagaaatgcttaaaataaccaatgtacatgattggttgtatgagatcaccaccagttaagccaaaagactgatgtaaatgcaaagaaatggtgaggaaactaaacagcaaacaggatgaatggttcgcaacatccagcttgagccagttgaactaatccaatgagaggattaattcaatcaactttgaacatgcagaaataactctgctattaaatgtttgcaccaggaagaagcaacctgcatatttttaagacataaaagctatatcagcccctggcaacagaaagaggccaacatattcatgatggtccattcatttatttctttttacttgttcagccttaagaccaaaattgtttgtgattgcagattaggcttcccaaattctgctaccttgattatagttctttgttattttctaaagcctatttagtt

SEQ ID NO: 46354 - DNA, 2395 bp, Bovine  19866880344144
  misc_feature (1)..(1): n is a, c, g, or t
natttagcagcagcagcagcagcagcaagggaaggaaggaaggaaataagggaaaaaagggaaggcaggaagtaaggaagccagagagagagaaagaaagagaggaagggagagaagagggaggggggaaggactgaggaggaggcaaggtgcccactccatgacacgcacacacaggtgtgttccagcccatgcctccgctcatggacagagatcttcaggctgacacacacaaggacacgcagtttaatcacagcagctcactataagagcaggcatttcaactctgcagggggaatctggtcttctatttaggaagtagatacctgtgacaaggaggtggtgggttatgtgatggaggaaagagtgttggcaggacatgacatcagaagacccgtttaatacttagatgcatcattttgcaactttgagaatttgactaagctatttaatctctttaaatctcggttttcttacctgtaaaatgggaataacaattttaactctggttacctccctggaaggtatagaaatagacgtaatgggtatccagatgtccagcagatcaaagtcactgatttccccagctctcaggacttccttggtggctcagatggtaaagtgtctgcctacagtgcaggagactcaggttcaatccctgggttggaaagatctcctggagaagaaaatggcaacccactccagtattcttgcctggaaaaatcccatggatggaggaacctggtaggctatagtccatggggttgcaaagagtcagacacgactgagtgacttcacttccacttttgagagttgactgctaacatccctctctgagacttaccctcaacttttcccaaagtctgtccctggtgcctgcctactccaacaactccttgatccaaattaaaaatatcttcagaatccaactccatctctacacctcctctgcttccaccatgacctatgcctcccttatcgctcatttagcttctttcaataattttgtaattgttctctctcattctgtgcttgacttgctacagcctgaatgattcctttaaaacatgacttaagtcatgtcctccatcacctctcactcccttacataaaagccaaagtccttgcggatggttaccaagccctacacaatgtcccaccatggctcactcatcctggggaaatcctctgatctcgccttgatgtttactgctctccctctcttgttcatgtcaccccagctatactggtctccttgctgttgttcagatgtgtcaggagtgctccaggctcagtccagaccttggaacttgcacctctctttgtctggaacactcttcctttacatgaattgttctttcacttccctcaaatctttgtacaaatgactcctaattagtgacgtcttctctcgccaccttaattaaaattgcaataccccaccccttctttctgctttatttacctaagctaagtcgcttcagtcgtgtccgactctgtgtgaccccatagacagcagcccaccaggctccgccgtccctgggattctccaggcaagaacactggagtgggttgccatttccttctccaatgcaggaaagtgaaaagtgaaagtgaagtcactcagtcgtgtccgactcttcgagaccccatggattgcagcctaccaggctcctccatccatgggattttccaggcaagagtactggagtggggtgccattgccttctccgttattttcctacttaatacttattatttatcaacacactatgtattttacttacatgtttgcttatattcctctccttgcacgggaatataacctctgtgattataggaatttttacttaattttgttcactgctatagcctcaccacctaatatagagctgaacacatactaaatgaccaataaatatttactgatatagtttaataaattaataaaaggtgaggaatttccataacaaatggtaatcaacaattttttcctgtaaggatccaacaaaattcagatacgcctaatctaaatgtatgcatatagatacatatccacacatataacattttgaacacagtgacattatacatcaaaagatacacaaaaaatgtgtagagctggttaggcagtgacagggatatgttctgagaactgacattatcaacatctaactcctactccatctcatttcacagaatgacacattttcattatcatgacatcctttcttctttgtcaaagaaactggtgagaaaagtctgtgaattcaaagggcagatgctagcatacggtctacgtgtttttcttcccttaccatttctcaaagcacttgggctgtaagcatccaatcacatcattgttttccataatgagtactaagcctggggagtc

SEQ ID NO: 46355 - DNA, 1112 bp, Bovine  19866880353825
  misc_feature (1)..(1): n is a, c, g, or t
nagagtcccttggactgcaggagatccaccgtccttctaaaggagatcagtcctgggtgttctttggaaggaatgatgttaaagctgaaactccagtactttggccacctcatgcgaagagttgactcattggaaaagactctgatgctgggagggactgggggcaggaggagaaggggacgacagaggatgagatggctggatggcatcactgactcgatggatgtgagtttgagtgaactccgggagttagtgatggacagggaggcctggcgttctgtgattcatggggtcgcaaagagtcggacatgactgagcgactgaattgaactgaactgaaaacaactgctagggtaaacctgctgccaaaattcttctgaaacaaatagcaccaatacaatgctttgcctggaagacttttgataaatatgccttgaatcagcaaacattttaaaataaatgaatattaataattctttgcatccatccatggtttgggttatctgtcatattagattattttctccatttatcccttcttttggttaggtcattgaaaatgtactacaatctgagttgtcctaagagcccataaaataagaatcagaatgttgggaaggaaaatggattatctgcttcacaaaatctgtgtgttatcttacagggctctctcttttatgtctacatgagaggctagataaccttggagggaaatcagaatgccctacaccatccagtggttctaattttttaaaaagttgtgaaggaaataacattattaaatgcctacaacatgcctttgcttttacatatattatcttgcttaacactcaacacatccttgggtagtatatttaaaaaaaaaaaaagaaagaaaaagaactgagactcagaaaaagtaagtggaggaactaatttaaaaatagctcccaatctggcaaggctagctatgctcagcatttgtggaaactgtttgtacagactacacatgcctgagagttactactgatattgctttattgaaggtttagtatggccagacaccattcccagtggtttataggatttactcatgagataggaactgtaggtctctacttcatacgcagaaa

SEQ ID NO: 46356 - DNA, 3103 bp, Bovine  19866880428476
  misc_feature (1)..(1): n is a, c, g, or t
ntttcctatttggaaccgtctgttggtcctgtccgttctaactgctgcttcctgacctgcatatacatttctcaagaggcaggtcaggtggtctggtattcccatctctttcagaatgttccacagtttattgtgatctacacagtcaaaggcttgggcatagtcaataaagcagaaataggtgtttttctggaactctcttgctttttccatgttccagcggatgttggcaatttgatttctggttcctctgccttttctaaaaccagcttgaacatctggaagttcacggttcacccaaaacttcaggagaagtgacagttttagactgcttacatgacaatcacaccaagtgacaagaattatcaacatctttattaatattttttgaaatagtggttttttaaatgtttcatttgcctgaactagttgacgatatttgttttcaatcactctacaaagtatctcaatttcccaccccagcgtttcattgatgaaaacgtattaatgacacatcatggcaattattactctgtcagagaaatttgctgaatttgaatgtttgtgagggcagccaccctaagtattcaccttcactataattgtgacagcaaacaactcttaacctcctttctactttccagttccttttttcacaactataaattagttgttagtctttgctcagctttgttactaaggatgaggtgtccctcatagctcagtaggtgaagaatctgcctgcaatgcaggcgacctgggtttgattcctgggttgggaagatcctctggagaagtaaatggcaacccacccccagtattcttgcctggaaaatcccatggacaaggagcctggcaggctacagtccttgggatcgtgtgtcagacatgacttagagactaaaccccccaccaccaccattactaaggatactatcctgagaaaacagcccaagaacaaagaacagctctgaaactgaagtatcactaacaatgtttggatcttttctcccttttaaaagaaggtacaaaacaggaaatgagctttagcctttagtttcaccttgtcttgagagaagttcaataaaaagctgaaaatgaaggatgcttcagatttgaaaggtaattgtgaaatggaagggaagtgtgttcttcaacattctagaagactcttcagccatactaataatattgtaaagaaatggcccataatagcatcgagcgtcccatgttttgttcattccatctatagcacatcaacaggctttttgtaaaagtgtgtgaacaaaacactttgagctgagatctatagccttagcctttgaaagatgatatctacaggttgtcatggtaactctcagggcaccatctttaaaaacattaaattctgaggaaaactacacacagagaaatttctgtcctaaaagctattccctcagacaaactgtccattagcctgcatatttctgttcttttacagctttgctttgatttttattttcattctactgttcaatgaatacagaactctgaaacaagtgaaaaaaaaaattgaggtcttttgctatagattttccatgataaattctgcattagttttgaactgaatgagcaccgctcgcaccactccatgttttgccttctgtttgactttttacgtgcactttctccttttatcaacagacgcaatttgtttcctgaatattgtcctgttgtttcgatgttgtttagtcactaagttgtgtctgactcttttgcaacaccatggactgtagcatgccaggctcttctgtccatgggatttcccaggcaagaatactggagggggtcaccatttccttcttcaggagatcttcctgacccagggatagaacccacatctcctgcattggcaggtggattctttaccactgagccaccagggaaatcccaatattgtccaatagccaatattaaaatgagagatttctcccttttttgaaactgcaagttctagctgctaatccattagtcaacagtatggagacacagtaactgccctcctctcttagaacacttgtttgtgtgtgttagtcatataggaattagcaggtttgaccttgaatctctaactaccttcacattagcatctgataaccctccgggtggcttataagctatcagaagacaaggtgcatactataaactctttgtatctctggagttagaagcactacacataagggcacaacaaatattttatggcttagaccccaactttaaggataatggcactaaaaagacctgtgtgctatgtgctaagtcacttcagtcgtgtccccgactcttcacgaccctagggactgtagcttgccaagctcctctatccatgggattctccaggcaagaatactggagtaggctgccatgtcctcctcccgaggatcttcctgaccgaaggatcaagcctgcatctcctgtgtcacctgcattggcagacaggttctttatcactagtgccacctgggaagcccttggggatcatcaaatctacctcctttttttcataaattaggacactggaaaaaggagaggtaaatattttggctcaatgttatatctagttaaagacattattttgatgtcagcaaaggaggttctaatccccagcctgccagtatggagaaggcaaaaaggaaaactgagattctttattcacaaaacaaagcaactaatagtcattcctcgtttacatacctcatcagattattgttttgaggttcccattcaacagtcatctgtagtagagggaatgttttaagcattgttcaaatatgaagcatcattaagagaagggtgcaaataaagctcatgaggaaaagatgaatggaaaaagtaaggaaaagagttacaggtaaattgagcattgttttgttcttaatttacaggcaatctctcatgatgaaagtgactacatttggaaaactaatgatagggaaaattctaaaccacaagcttaagagagaaatcgggatgaaaataaccagcataagggaatgggctaatcagaagtctaaaataaacatacagagtagtataaagcagattctccgtctctgaattt

SEQ ID NO: 46357 - DNA, 1046 bp, Bovine  19866880472655
  misc_feature (1)..(1): n is a, c, g, or t
ntaatacaaaaatatatatgatgtaaaaaaaaaaaaaaacccacatggtatgtgtgtataatatagatggtttgtataatgatgtataaatatatggttgacaccaaagctgaataacggatatcagatagatagattgtcttaactgactattcaagtgcagcacaccaaggttagaatctcagctctaacatttactagctcactgttaactttttaaagaacttcaagctctaacacgaggatagtgtacctagttcatgagcatattccatttacaatttagaattttttctttcctgaatattgagtttcctggcttttaggaaatatgacttgaggaaattaagggtctctgaccttgaaatcaaaatcctgccctcctagggagaggccgaaatgtcaacagaagaggtaaccatttagcaacaatccccttgtgcctcctatgacaaatttcctatgttgatttgcaatctacatgacagattgttggtgctaaaggccaatgagctccatctatgtgaagtatgggtcttttgaaaaacaaataaatccaattaaagaagagaactcagaatgaggaagacaaatggtttggtttgttgtgtttattatgccagctcaactagaatgaaaaagtgagaaagtttataactaggtaggtgaaaagtctcaaagcttttttcttcatttattggtcttgatacccaattatatcacccccctttcaagtcaatggattctcttctttttagctcaaaagaaacacaatccaaaacggcggtagcataattctaatttatttccatttcagatttttatacctgtaattatgtttgtattaaattagatgaaaatgtcagtctaccaatttgcttcttcctttgtaaccttttgcatgcaaagtttatcattctgacaaataaaagggctctccaaccttgacaccgaagaagaaatgcaaattatatttctccacattagaaaacaactatcaatcatgtcatttaaaaattagtgagatttccaatgaagtttgaaat

SEQ ID NO: 46358 - DNA, 1914 bp, Bovine  19866880537921
  misc_feature (1)..(1): n is a, c, g, or t
ncagttactgctggctgtttttggaaaaatccccaagcttttgctgctggctctgtagtctcaccatttaaggtactctgaacaatcatcctttatgatttgactattcaagtctcttttttttctttttcttgaaggataattgctttatggagaggggaggagagggtgagatgtatggaaagagtaacatggagacttacattaccatatgtaaaatagatagccaatgggaatttgctgtatggcttaggaaactcaaacaggggctttgtatatgttcaagtcttttaagacaattcgtattaagatgttaaaggaatgggcagcagttaacttcaagccaacttaaggagaggttatagcattttaagcttattgcaaagcaaatatgacatgtcaaaatattgttgaaggtattcaggccaactgtagctttcaataggattctaggatatatgtttccaccaagttttcaataaaagggttaatattaatgtataattatgatcaaagtcaaaatgacctaatattctaggacatctgcagacggttttctgagggctgcacatagtgctattcagcacacattcagtattaggttatatagagcttaaggcaaagcgaagtgaaattacttgcattttgctgaaaaatgagtcactaaaggctccagaaattgaagtctagacggagtgagtgaataagccaggcaacagaagggccagtcatcacaattggtcccgacagcctcgcccacgtcagtctgcactgctgaaccaggccattggtgttgactcgctcagatgggcagctgcccttgttcctccaggaaggacctcggtttcacacgcctgcagtgaacccacaacccggaagaagaaatggagtgtaagtggcatagcagcattttgacataaccagcatcttgaactgtgatgctgtgggggcaggattgagggacagatgtcagtcagctccagaatttgcttggtgatttttgaataaaaattgatctgttcacaggtcaactggcaattattcatttcactgtcacgccaagttcactgaggacccacagtttctcttctagtgcaagagagcctctctcctgagtaagtcatgctgcctttcaaaggaaagacgaagccttgacttaggaatatagtacctccttatggggactgatggagtgggaaatgtcaatccactccagtattcttacctggaatataccatggacagaggagcctggaggactgcaatccatggggtcacaaagaattgaatataaccgagcaacagagcatgcaggagttgagagaaatacagttgccttcaagttcctgacaatttggaggcccatccttagaattaaaagacagaggctgggctcacgggcccctgtgtgtaacagtgttattctgttactccatcatgtgatttcttgggatgagtaatacctgatctctccaacacatactctttggagaaggcaatttcttaaatgaaattactttcatttaaagtgacttgattaaaaccatttttaaaagtaaatgccaaattctgtgcttgttctggctggattttataaggtttattttctttctatatgagtttcctcatcgattaaaatttaaaaaaggtataagcattactcctcccaatcttttgatcatgtatcaaagacataagaaagcaaaaatccagagctgatcaatcaacgaggcaggggactgtatggttcgatgcctctcagcagctccaaggctggggttggtaggagaacctgcaggtggcaggtggggaggccctgctgatccaggctgcagctgagttccgttttcctcttgagcatctcactgctgctccgcctgttgccaactaggctctttttgaagtcctccacct

SEQ ID NO: 46359 - DNA, 758 bp, Bovine  19866880556769
  misc_feature (1)..(1): n is a, c, g, or t
ncaacatggcttcagtttgggtaggaccgtgggttctttgtagggtatgtaactttgaggtgatgagaaatggttctctaatctctaaagcactgttcccatggcaccttctttaagggctatgggtgctagacatcagtaagcagggtgctacagaaaaccctgaaataatcataagcagaagggaaataccccacagcatcttgggataaatggagcagtctgttctgatggcctgttgtacaggggagcctgcacataggccagcagaccgtgaattcagtcaatgtgatctcagttgaacccatagtttggagtggcctagggacatttgagttatatatatatattaataaaattgatgaacatttgcttttccctgttactttgctagatgatattgaattaacaatccttaagttgccttgtaacaatgtcactcattactatttatatattaactaaatatactcaattgaataatcttacacttgacttctttctatttatttttctcactactagcagcttttgtattttttctatttcgatggcacatacaaagaattatttatgaatacacagtgaaacaaagaaatctgcctattcaagtatgcctgaaaaatactagtaacggctcctttgcatatatgtcatattcttttgtgggaattggaaaataattaaaaacaactttcatttgcattacacttagtgtttcacagccctttcataattcagtttttcttcttcaaact

SEQ ID NO: 46360 - DNA, 2056 bp, Bovine  19866880581174
  misc_feature (1)..(1): n is a, c, g, or t
natgacttaagtcagacttcaacccatcgaagtaagagatttcataagatggaatatacaaattagtataaaatgaatgcttagcccactgaatgttacaggagagcagaggagaacaagtcccagggactaagatggcctggaggttttctgaaggaggcatgattgagctgggccttacaggactggaagggagaggtccaggcaagagccaagggcagaggcagaaatgacctagcgcagggctgggcagagcatggcctgtggaccacatctgggccttataggactggaagggagaggtccaggcaagagccaagggcagaggtagaaatgacctagcgcagggccaggcagagcacagcctgtggaccacatctgggccaccgcctgtttctgtacaggccatgagccaagaacagtttcacttttaaaggactaaatatatatatatatatatttatgtgtcatgtgaaaattatataaaatcaaatttcagtgtctgtaaataaagttttattgaaacacagcctcactgactggtttacatatagtctgtggctgctccacaccacaatggcagtgctgagcagtcaaaacagagaccatatattcattccctggctcttcagagaaaacatttgcttctcctggagctacgacatcagaggcagttagtaggctttggctgtagagaagattttatacggaggaactgtgggaaatgggtgcccagggatccattatgaagaatgtgcaatgttatgttaaagaatatgaattcatactaatgtgttctctgtttctttaattttgtcatttcaaaagtatacaaatgaaatcatatagtatgtaaacctatgagagtggctttgttcacttgccataattctctggagatttatccaggttggtatacatcttattcctttttaacgctgaataatattctatcatataaatgtactgcactgtatataaccattcatccactgaaggacattggggttgtttccagtttggatcattatgaataaaactacatgtgttaaagaaaaagaatatgaattcagttcctaggcaatgtgttgcagttatcatgtatgagaatacagtaatattctctgtatgcacataccacaaaactgcaaaaggttcaaaaagatattctgagaaaatgtcagtattctttcctgacctctagatacccagacaactctgcagaggtgcccgctaactcattctcagggaccattacagagacattcttgtgcatccacaaacatatatgagtttgttttatgtcaggacattcttcttcacagctgtgtaacgtggatatactatcctatttacagctggggagaattctgagccagacactacaacgcttctttaggaagccttgctgagcagagggttccaggagaactagaggcaggaagtggaggcaggccactgacgaacaaatccaggagcctgcagtgaggatgcctggtattcccatgtaacccagaaccccagcctgctcaaggccacggagctggggaccccctccctgcaccgtttctctgggggctcataccttggcaggtgtgtcagggatggaagaggtgggagaacctggaaagttcaagacacacttcttcccgaggcagcgaccatgtaactcaacgtcctcataagggttttccttcatgggcggatctgtggtcaaaggcaatgaacagatcagaaactgggaacaccaaggaagctctccttatcagatctctagccaacaccttggtgtctccttgtggggatgtgtgttgtcttgctatgcatttagccttcctcttggtaatggatctcggttttcaccggggcaagtctctgtctccccattctcagatgtgtgaacttaactccactcctggtctcagagcttaagccaatctgaatattctgaatcctggcctcagtgatcatcctggaagggctcatattccaggcctaagcccactgttgcatggcattcctggactctgaagggaacagggaccaacccagtcta

SEQ ID NO: 46361 - DNA, 1467 bp, Bovine  19866880735952
  misc_feature (1)..(1): n is a, c, g, or t
ngacagtaatggaatattttcatattacaaatgtggaaattctgaaaaggaacagagaaaatgacttgtctcatgtcactgctgctgctgctgctaagttgcttcagtcgtgtccaactttgtgcgaccccatagacggcagcccaccaggttctgctgttcttgggattctccaggcaagaacactggagtgggtttccatttccttctccaatgcatgaaagtgaaaagtgaaagtgaagtcgctcagtcgttcccgactcttagcgaccccatggactgcagcctaccaggctcctctgtccatggattttccaggcaagagtactggagtggggtgccactgccttctccggtcttatgtcacagagctcactaaatggagagcaacatctgggcccgtttgtccctgactctctgaagcttaaagttgccaattctgagactaagcctccaggaacaagaaattcagccatgaaaccacgttcacatgcttcttcacctggtaattactttttgtaaagacatagtagctttaaaaatatcaaaaccagctccaagagtgggcatgactcagcagtacacaaactagtaaaaaaagaaaaatgtcattaactattttgaaattttaaaaactcaccataagactggcactttcaaatgtagtcattatttccaggcccttggctatttatacagacaaaaattgattcttttttaaaaagttgttcacagaaatcttctttcaatttcttggatttccataggagacaaaggtcatattcttattcataaccaagcttgaagagatttagacttcacctgcactgagatattcctaactctcataatacatgtacctcctggaaaaagaaatgaaagcacctaaaatttattggcctgtgtttttattccctacctcctgcccctttccccagagcgaatataaaatcctgttaaaaaaaaaattacttgaacaatttgaagatctaaaaaggaaattaatatagaaccaatatgtgcttaatgtagaaaatttgataaatacacaaatattttaaaatccaaaccagatcaccctaggatcacaatctgaagcttaccatggggtcacagtgaagtgattttgcacacacacacacacacacacacagtacctgtatatgctggtaaatgcttgtgaccataccgcatgttctactaggaactgcagacacggtgcatgtgtatgactactttcatgcctagggcagatattagtgatcacagaccaccttacctatctcctgaaaaacctgtatgtgggtcaagaaacaacagttagaactggatatggaacaaatggttccatatggttcaaatttgtgaaagaagtacaacaaggctgtgtattgtcaccttgcttatttaacttatatacagagtatatcatgtgaaatgctggactatatgaatcacaagctggaa

SEQ ID NO: 46362 - DNA, 1695 bp, Bovine  19866880764226
  misc_feature (1)..(1): n is a, c, g, or t
ntccccaccttctattttgcatattattattaatgcccatatttaaaagtaaaatacaacaggtacacatttggaacttcaatgcctcatcctctggtcactatgcaccggcccctccctatttgctatatgctcccccttcccaagccaaagttttaaattttaatgtaaaagtctgtgtctttctgtttactctagatgtaacagtatctaagtattttggggggcagacaggaataaaataatttgtcgagaatcctataaatgctgtaataagaattttaaaagcataattgttatgaaaatattttcataggtttctctacccaggaataaataagttatctttccttaaggcatttattaataggctgatgaaaatttctggatacagtactgacagtcacgataatgaaatccatgggactaattatactgttaccctccttcagtatcttagatttaatttaaatgactcatagccacaaaagtataagccttaatgcactggtatgataaagtatagttttttaaaatggaaaggactttataaaggaagtttgaacattatttataaataaagcagggttatccttcaatatctgtattctatcagggaagactttatttttttatcttataactttgcttgtgatttatttgccatcaagcatgacagataaaggaatgctagaactttgtggagctggaagaaatggtcaagtacatctaatcaactctcttattttacgatgaggaagagaagacaggggtcaattgcttgactcaggtcatgcactttgctgagaccaaagcctaagacaaggatttctctggccatacagtggttacaacaccaagcttcaaatgcagggagcatgggttcaattcctggtcagggaactaacaccccacatgccacatggcgtagtcaaaaataagaaaaaagcctcatatagttttgctcaaagtcgaatgcaacgattattaatattagggatgctttaagtactggataaaatgtagattcctgagacccactgccatacttaccaataagaatttctaggctagcatccataaatctacacttacacaaaacctccctaggataagtcttatctacactgatgtgtcagaaccactttctggaggtggttctcctcttccggctgtgtttcccatgtagcctaggcactggggagggggggaactgagaagatgcccatggggttaagtggtactatggggcaaggggacaaaagccatagaataaactggaggatcaacccacagggtccatgttacttgaacatttgggaaaaattttacttttatattaaatcatatatttgtaatacatgtactgaaagaaaaatgtgttactaatgcaaatgttaagattaaactacaagttgagaggaagggcagaggatgaggctggaaattccaaccttctaatcacatagttagtttttctggtgaccagtctctgttctcaagctacctaaagcttcctatcattagcataaacttgcctgttactgaaaggacttctttatgaataatagaactcccctatgactaagaatgaaagtgaaagaggagagtgaaaaagttggcttaaagctcaacattcagaaaactaagatcatggcatctggtcccaccacttcaggcaaatagatggggaaa

SEQ ID NO: 46363 - DNA, 1624 bp, Bovine  19866880770273
  misc_feature (1)..(1): n is a, c, g, or t
ntacatcctcattttagtctataaagaatgatgctgctgttcttttaacacctgaagcatttcctgcttcagtaagtaaggtgcctttatgtgagattcaaagaactgacttttgtagaatattttccagagtaatttataatagtgattttaaaatttgttttagtgtattttgaaccatgggtctatcaggttatgttgcttctcattttattcatatcttttcatgcattcaaaattgcttgtattctctcaggcaaggctgtccacttcacttttccttatgtgctaacagtttttctcagcaggtgtgctgctgcacctgaaaaccctcataaacaggcaggtgaagttatagtatcttattgtttcaaggacagaaaaaaaaaatcagcaaaaataagttcaagacagagaaatcaattatagagcaagaaaatctaactacagtgtgcatctaggaaagtatacttaaaaaaacatattttaaaatatggactaagtcttcccatttaaactttgagtcctctaagttccaaaaatgatgacacttttgcatgacagagaaaattagtctagtacaatagaccaaaagaaattttgatagatccaaaatatactaaaagtaattctgaagaagtacttgaaagcaatgaaacttcatgagtataaccgaaagacagaacaaaattcattctgatggagctaatccttgagcttacctcatattccacactttgagagcatactgcatactgaaaccatgctcaggtaaatctggaatgcctgctcatcatttggacaccttccctggatgcatggtatatacttttacttttttgcttccaagttggcccaacaaaaaaacctttctcaacagataaacagtgacttacaaacagtccatgtgacttttcatataagcaatgacttacaagcagaccatgtggctgttttagtggttcctttatttagtaaatatttaatgagcatttactatgagttagatgccatggaaacttatgttggaaaagtcaaagttgtagccctcagaaattcaccatctaatatgcaagataaataaatgaacaaatcatttctggactacacagccagttactgcgaaagcagggagttttgcccaagtgtcgacagaggagatggttggaagccgtctttaaggcttcagggttcatgaagtggagagggtaagacaaagaattcaagttgaaagaaagataaagtaatgggggtgcaatatggccttttggttgtttggtgtggcaggagtgtaaggtgagggggagggtgtggcaaggaattgcatttaataatttatcagatattgaacaactctttcacttgggctctgtgcagggactctttcacagatattttttaacatctttattaagatataattcacataccagaaaacttaaaatattcaattcagtggtttttaatatatccaagttatctaactgttaacatacattttttcctagtatatgttaataatatttttttctataacattaggttattgatttgagattttttaaaaatatatgtgtttaccgctataaatttccctctgagtactgctttctctgcatcccat

SEQ ID NO: 46364 - DNA, 1719 bp, Bovine  19866880886283
  misc_feature (1)..(1): n is a, c, g, or t
ncttgaagcccactcttataagctcctgtacaaatgtagtcttggaattctgtcattctctttttgagtctaggaagattctagatgaaaatagttgatattattgagcactgcgtgccttaccttatttaatccttataatagtgaagtctaattttacaaatgagaaaaaggaagtccagagcagttaaatcatttgttataggttacacagacagtaaccacttacttgcattacctctgtgggttgactgaactcaacttaaattcttactgacttaaagtctattttctttcctaattgtgtatttcacaaatacattatgtttcagacacatgtgagactctcttgagccatatattgttggtaactgagtataatcatccttattaaagatcagaagaccgatgcagatagaggctactatagcctggggaagctgatggtaagaggagggttaaaactcattttaatactctgttatttttgtaactcctttgagactttataagtttttattttcttcaaatgtatttatttttctttttttatttatttttatttgaggttaattactttacaatattgtattggttttgccatacatcaacatgaatctgccacaggtatacacgtgttccccatcctgaaccctcctccctcctccctccccgtaccataagttttatttaatttttttaacttcacagagatgttcaggagctgaaggtagattcaggtttcattcctggataaaggtagtagcttagatgacaaattactttatagacattttagtacaggtagcagcaggcatgcttgaggatttgaaattttgcccattagtatgcagaaaatccatcgactgcctaagtcattttctaataaaccaggtcttcattacatcccaattgcccaaagtgtgcttgccttgtcagacacagatttctaaaagcagttcagtcttgagtcactttaactaacatggatttctccctccctattcatttgcagggctcctctctggtgctctgtatcttttttccaatatatttgaaaagcttttattccatttaatccatccagctctttttagcacagtcagcaagtttgccagccttatctctttcctcttggcttcagcagtctgttgtttgcacttccacagtttattggcagcatgttttttgacaagtcttcttgaaatctaattgactgtttcttgttttaaaatttctttctcagaggaacactagctggctggttctccatcactgccttctttcattaaccttctacctgcactcctactttaatataaaataaacattcaaactgtgcaaatcaatatatgttgaattaaattaattaaaagaaaatattttgagaatatagtaacatgggaaaaatgttccaccagaaggcaattccttagatgtcagttcaaagaaaacatcatcaaaattttcaaacaaccttcctggggcacacatattttactttcaattctaataagttttctaagtgtacaggaataaaagtattgtcaaaaaatcaaaagggaaaatattttggtattctgatatatcaccccgggtcgagcaaagcaggaatgaaataattttctatttgaatctcaaattgagtataaatgtacacaatcaatattttcaaaactgatggtcattaatagttaagattatattatttttccacag

SEQ ID NO: 46365 - DNA, 1157 bp, Bovine  19866880902165
  misc_feature (1)..(1): n is a, c, g, or t
naacactggagtgggttgccatttccttctcccatgcatgaaagtgaaaagtgaaaagtgaagtcgcttagtcgtgtccgactcttagcgaccccatggactgcagcccaccaagctcctctgtccatgggattttccaggcaagattactggagtggggtgccattacctctcctaatatcagtgtactcaatagatggcaggaaaatgagctgttctccccaggttgagacttgtccaaagtgcctcatgataacagaaataaaatgaaaactaggaacatattctccatctaaaatttgtgaaaccatagtccacctgggctgagtagagctgaggacagttacagaaatcagtggtagcaaaaccaacacctgtggaatataagggaagtaaaatcccttaagactctggaaccacttggttgtaaatattcttaaaccaaggcttataagacaaagacgccagcccatattatactaaaatggttgtcatttttagatgaagcaattcacattcggccactccatcttgatttgttttcccacaggcagatctgaataggcatatccctgtgttccttttttatagagttttactgtcccaagaatagactaatttcacattctattgcctggttcctttaccagtacaccaaacataaggaacaaatagtccaaattatattcctctctggaaatagttataaaagtttatgtcactccacatatacattctgctaggaaagctgggagaaaaaattacctacaacaaattggtccatgaaataagatacaacattgctgtcccagagaatacattaaagaaaaaaaatttttatgacacttgctaaagaatggtatgggtgactttatacaggaccatggcagtaggtgtgaggatcactgcagtgggattttgcaggaggagacagtgatctggctcaagtcagaatagaacaagaagtaggggttttacagccaaggagtgaggtgaggctggtggtcaataaatggaaaattactaagagagagggcaattattgctaaactagcctaccaggattcttgctcaaggcaggccatggtgatcagatgtcacctgggggatgtgggggggttaaagaaacccaatcagatatcaaggatgatcagata

SEQ ID NO: 46366 - DNA, 794 bp, Bovine  19866880917454
  misc_feature (1)..(1): n is a, c, g, or t
nttactggtgtttggtttggctcttgaactgtcctggcattgattcatcttcccagacagctgctcctttgaagcatcactgcaagagaactttgctacttatctagacagtgtacacttatccatcaaaacataaatagcacccaaagtaacctgcatgtctggaggccagaggctgctttcccattgaagatctgccaagcttagaatggccaaattcttactgagctctctgaaactgcagagagggaccccaacatgaaaacttctgcttctgctctcagtcttttatatacaccctttactactctagttaagaaatctctacaggggttcccatgaccacaaaggtactacgctgaggtactgtacttgctctcaggcaaccgaataggattttccattgcttgtcttcttccctactagcattagaatttttttgcttttttaccacccttcaccacgaaatgttcaggcttgaagtttctcattattctaattattgagttccttttctcatggggtctgagagggggtctatgaggatagtcagtgggtgtcttctattcatagcctctggatcagagccaggagggagattgatcctaggaatttatgcaaaatcttcaatagggcttgtgatgcatcaatcacattactcaggatgcctcaaaggtgggggagtgtgactctttctgtggttcatgggctctctccctttccaacgagtgcctggctagcaatcagagagatttggcaaagcccgagaggctgagtgccaccaaaccaaagag

SEQ ID NO: 46367 - DNA, 2898 bp, Bovine  19866880931468
  misc_feature (1)..(1): n is a, c, g, or t
natccccttgagaaggaaatggcaactcattccagtattcttccctgggaaatgccatggacagtaaagcctgatggggcatagtccatggggttgcaaaagagttggatatgacttagcaaattaacaacgaacaacaacattcaataaacaattatgttcaggtcagttcagttcagtcactctgttgtgtctgactctttgtgaccccatggactgtagcacgccaggcctccctgtccaccaccaactcccagagcttactcaaactcatgtccattgagtcagtgatgtcatccaaccatctcatcctttgttgtccccttcgcctcccgccttcaatctttcccagcatcagggtcttttccaatgagtcagctcttcacatcaggtggccaaagtattggagtttcagcttcagcattagtccttccaaagaatattcaggactgatttcctttaggatggactttaggatgcagtccaagtgactctcaagagtcttctccaacaccacagttcaaaagaatccattctttggcactcagctttctttctagtccaactctcacatccatacatgactactggaaaaaccatagccttgactagatggacctttgttggcaattatgtactctacttcaatccacagattatgctgaagacacagtttttagatggtctcaaattaagagtctgttcaacataaacaataatattggaaattttttttttaataaaagacctgatttgggtctttgttctgcttgagttttattagttgattaaaataaacaaatcttaacaaatgttcttagtaacatgctctgctattaattaatacagtctttgtaagaggactcccacacttttcaagagattgtaatcaaagaaatactggtttcacagaagagattgagtgctcatcaaggctttggtgtcaactagtatctcctcttcccggttaatcagtctcatttggttcacagaaacttttttattctcatcccattgtatcacttttcttggtgcttctgtggcaaaggttattcaaattcaagcacaccagctccctgagtaggtgatactcaacaaccaggacccttcctactagccactttcctacagctgtcatctttccaacatctcacatggaaactgatcagtgaggggtcagctagttcaaaggcagttgacaagcctgacaaagatgccctcctcccaaatgaccaacaccgtgtgagatctcactacagagtcttcttcagttcaatgccacctttgatgtccctcatacaaaggggtccctcaaaccacttttgctgaatgaatcactaaaacaaaagaaaaaaaggcggggggagtctgaaaagcaaggtgaaaaacttgacatacgctacatccccaaggatcattacatccttcatttaagtacttgctgagtgcaaactacaggtcagacagtagtagcccactgcctgatatacagagacaaatactatacagcccccatcttccaaaaatacattaaattaaaatctttcttatctgtgttttcaagaaagttgacaacttatcatgcttaattcctgtgccacttaatacgcagcactgcattgcacttatgctcaaaatctttatttaaaaaaaaacaaagcagtgttgaggatatcactgtcactttccaggaatgccaggtcctttctgtttgtcagctctctcactttagtggtttaaacaagaagatgtgattgaaaagtaaaaacacaactgagctatttcataccgaggaaagtaaacgtgctggtttaaagaacatttttttagtctcataacaaaatccaaacaagctaataatcaaatgcaagttctttgtttcaataatcccccctttaaaaagtgaatctttatagaccagactatataagttaaccaacatgaaactttccaactcaatttattctttaaaaaaatgttctgttggaggatagttgcttcacagtgtgttagtttctgctgtatggtgaagtgaatcagccacaagcacacatacagcccctcttccgtggatatgcctctcatttaggtcaccacagagcattacgtagaattctgtgttatccagtcagttctcattagatatctgttttatagatagtactgaatatacgccaatcccaacatcccaatccaccccacctccttcccccattggtatccacacatttgttctcctaacttcatcttaccttaaatcaagattctctccaaaatcaaaccaaaaaacaaaaacaaaaaacaaaaaaaaaacctggatatttaatcaactggtttcagaaatacataaaggaaagtaattaagatacactcatgataatgaatgcataataataaaattgtggtcacttattttcagttgccttttcttttcacatcctgaatatttcacagataaaaaagcaatcataaacacgatttggtttgaatctgtgactatacatttttagagcaattttagttatcactcatgtaatatatgcaaatctggagttgaatacagcctcaggtgttaaaattcttattctcagccttaaggaaagtattaatgaaccacagttctgattcccaaagcaaagtaaaatatctcactgctgtagtgatctagaaaccagtagttctatttgagtattttcaaaattccaaaggagcctgtaaaaatggatatcgttctgaaagcaatgatccagcaccatcttcggtggtaaatttttctccctgggatttttgccaacctggaaaaagatcaataccacattcaatagataaataatccacatatgggaaagtcacctaatgctataccgagctctcagactcctcctcatcactccactc

SEQ ID NO: 46368 - DNA, 981 bp, Bovine  19866881023825
  misc_feature (1)..(1): n is a, c, g, or t
nttatgtgaagaacatatatccagatttctttaactgatatggatgaacctaatagagaataaggggaaagagcaacaaccccccaaaaagactagtgcagcaaatattgatccattatacacttgctggttattgtaataacctttgaacattccccaaaaggaaagcatgacatggataatgtatgtgcctactgcaagtaatcttccaagcatgaatggctgaaggattataatttcttttcaccagatcatcataggtgtcccagaggtcatacaaataaccagcatcctttcatcctaaacactaccaagccaaggttgagatatgagcctattaaaatctggtttaaaaaagaattttattttgcccgtgatttcataaattaattgcagactgccttttaaagccttctgcggaagacaaagagaccttcaaatcctttctctgagaattaaagctttcatttaaggattccagatgggctgtattttaagcataaaagttcaaatacttttaaccaccgacagatgaaaggaattttacccagttatgttgcacaattgccacccagtagttcttcaatcctggccaaattgagcatcaatttaaattagatttaatcgtgggacccttgacaatcacaatcaacacaagatattagggagtttaggaaatgggtctattaaatgacaattaaagctgtcagccttccagagcttattttcagttaatttgatccctagtagacagccacattcaactgctgtaaacaaagaggtctgtttgaaagtgcaagctgagatgggagcctggttccttagaaccttggttgatggcgtgtttcacttccaggttcaggtagcctccatctgttactcagagtaagtgacttcaaaataactccctgtgcaactactgaagccctcctgaaagtcctgagagagtgtggggagtggctggcttttcctttttgtgta

SEQ ID NO: 46369 - DNA, 815 bp, Bovine  19866881028855
  misc_feature (1)..(1): n is a, c, g, or t
naaactgaaaatttttacagcatatgtgtaagggactgtatattggtgaaattgaaggaggtgttattggagtacagtttgaaccatactatataacttagagatgaaactttatctattgactatttgaaagtgtaatgcttctataatgaacaaggaatattaatagattagtttaataagacaataatttctatttttatatttgtccatgattctttgataatcataccttcattgtgttttaatctgtgaaagccatacttgaccttagttactgtcacattttctttaactgatactttcctattttttatcattatcttgtaggcaattgcattgcctcctattgcaaagtggccttatcagaatggcttcaccctaaatacttggtttcgtatggatccattaaataacattaatgttgataaggataaaccttatctttattggtaagtgatatatttaattttagtacttttgtcttaagcatttcaatttttaaaaatatgtaacagagtgtcaaggcaacatagtatgtagaataagtaaataaatatgttaaacctatgaagatacagttatgtcagtttattttattcattttttgccgttgattctaggctatctgccctattttttttcccccttaattccattttaagaatcaagtgttacagaccttctgtctcgagtctgcacatatcaattgaatgttctgagtgaagatgctgatcgagaagagaaaatgaaaaacaaactactctcagatatctttaactttgccttttcacttacatgggttctgggagcat

SEQ ID NO: 46370 - DNA, 697 bp, Bovine  19866881036860
  misc_feature (1)..(1): n is a, c, g, or t
ncagatatgagacttcatctgtcttctagtaagacagacattaaagagacttgcaaaaatgtaaaataatgctgtgctaatcagttgctattttatttttcataaaaacctatgtgttgataaagactggaatgaattattaaaaatgaataaaatacatttcaaatttttctcaatttctgtttctaatatatatagtccagttttcccagatgatgctagtggtaaagaacctgcctgccaatgcagaagacataagagacacaggttggaaccctaggtctggaggatccctggtagtaggaaatggcaacccactccagtattcttgcctggaaaattccatggacagaggagcctggcaagttccaatccatgaggtcgcaaagagtcagatatgactgagcacagatgcacacaagaatatacaatccacaccagtaaagcactttgaagttcacaatagttttttagggaatgaaggggtcctaagaccaggacgtttaagagccactcttctagtctgtctcatgctttgttgtcatctttatttgtgtgtttggttcacttgcctacacatttgtctaccagattgtattgttagattattaatataaccatttcttcaacttaacaaggccatttggatcctggatctttatgagttaagaagattcaccatttctctttccctcat

SEQ ID NO: 46371 - DNA, 2309 bp, Bovine  19866881042263
  misc_feature (1)..(1): n is a, c, g, or t
nttacaaacaatgagatctttgaaagtgaaagtgaaagtcctcagtgtgtctgactctgcgaccccagggctatacagtccttggaattctccaggccagaatactggagtgggtagtccttcccttttccaggggatcttcctaacccagggatcaaacccaggtctcccacattgcaggctggattctttaccagctgagccacaagggaagccttagaaatcatttaggaacccaagaacattgggtttccttgccttcatcttcccacattggtctttttctaaagaaaagaaaaaatatatagctgcagttgtacaagtgaacacttccactggaaagaatacaatgatatagcccattgaggggaagcatcagaaattctaaggacttcacatgctaaacacaattattcattccttgtatggttccctcccaactattttcttcctattcacatagtcactcattatttttaatatttattttatttatttatttggctgccctgggtcttagctgcagcatttgggatctaattccccaaccaaggactgaacccgtgccctctgcattgggagcatggagtcttggccactggaccaccagggaagtcccaccaatcattactgacgatgcaaactttgtaaccataccccaaactaagaatcaccttccactgcaacctgttaatcagttacctcatgaccactctgggagtaaatcttgttatttcccttaaatacttcccttcatgacttttcctcaccatcattcatcaaaatacttacagctccaataaactcttttcttctgaatgtaaatcaaacatgatcaaatttttttttttttttacaaaaatgccctcaattgttctctatcatgaatctattctgcatgtaactttgtttggattccctccaaagaaaagtcaggggaaaaatcttgagtacaagtaacttacttaggaagtgattccaggaagcagagtgtagctaaggggatgtgagccaaggaagagggaaaagccagatgcttgagggagaaagccctcagtgtggttgggaaccatgcaccaaagttgggtaaggaatgttgacggggctcctactatggtgcccgcagtggcagatgcctgaattccaccagatgctcagctgtgcacatagtagggaactgtgcttcccgagtgaacattcaaatattctctcccttttatgctcatcataaaattatgatccttatttgtatcctttcccaaagtcgacctttaacccaatcattcatatatacatcttttcacctgtacgaaaagcttcctgtctccactctgcaaacacttgttttgaacccaattatctcagtgcacttctctctcttatgcactgtcaaggcaatttacttcaaatgagcaaatagctccagctcatggcccttgctttcgaatcttgaaaaagaaactaggatatctttttcaaccagagggatacatcaagggttttttcacaagtttaaaaaatgtttaatttttcagattcacagtgttattttctacatcattatttacataagtaaaaatgaaacatgtccctttgtatgctagcctcttttccaatcagcaaatttgagggcaagaaattttatcacagcaaattctgttgattttatatctagagcacaattggcactttgtgaaagagaataaaggtcatatagaaacagaaagaatcaagcattatcccaaaatgtgaaccatcatcttaaaactcattttatcttccatattagacaatatatatcaaacattcttctttccaccacatcatctccttcttataacccaggatggtttattaaccccagttttgggcaactgtaccaatgtattgatccccaaaagatttttccacccaatggtgactttttcaattaactgtcattaccaagaattttgaggtgtagacatgtgctagggattcggagacatcatttctcacctttgtcatggatgaagtaccacattttctaaaacagaatcaacagccttaaggtttctgatgtgcacatacaactgtgtctcctgtctgattcatatttgtaatgaacctgctttgggactgctggcaataaaagggacataatccttaagtaggtttcagagaagctcgattaatttatgtgacaggactcaatcttgtgcaaaggtttaatgagaacctcaagttgtataaagtgtgcctggcatctgcctatccctctgtcaggaagagcagagggataccttatgtaagaacatatatccagattt

SEQ ID NO: 46372 - DNA, 1873 bp, Bovine  19866881061171
  misc_feature (1)..(1): n is a, c, g, or t
nacaaatcattatagtttaaaaagtaagttatacttttgtaaataaatagttttaagttcttttgcttttaactgtagaatttggaaagttggtcaagtgattatagaatagtcattgtttgcttgccaataaatatgaaacatttgactgattaactttcccaaaaaaaatctttagttttttttttattattatttaaataatccatagagtcttaattgttggttttttctgttactattattatgctttatggtattacttacaatgaaggcagatatccttaaatattttgtcattgcaaaataaaacattggattttttttatgactttttaaaaatagagctatgacaagtgctttctcggatcttcagaaactgctgatgcaaatagggtattctgtggtcaacttggtgccgtgtatgtgttcagtgaagccctcaaccctgcacagatatttgcaattcatcagttaggacctggatataaggtaggaagatcatcttattataaattctgtggaaagttataggtgtgaaaggtgaaataccatacacaatatagtatataatgataggttttcttaaatgtggtttaaaagtcatttcggtattttggaactgagtcattattttgtttcattttgtttcaaaggtgttgttttctctttttaactattttccccttcccttcctgaacatttttttattctttagaatgttttctaatgatgaagccagagcttttgttgacataattcttaaataacttttgtaaaaccatattgcttaacatgatatttgaaatctcaaattataaaatatatgaattatattatgaacaaatgaaatgttagagataacccaaatagaatagttaatgattttgaaggaaaatgatgtaaaaaattacatgtagctgaaactactcagtgttagcgtctatttttttgtttgttctttgctgttgcatggaagtgggcagagtagtgcatattgtacttttgcaagactatttagtgtgatttaccatattttcttgtttttttgactttaaaaacaaagatttatttaagcaagatattgctttcacatatatgaattcattcttaatgggcagtacacctggctggggaaatatataagttttgtgtaagtcacttttggaattgtgatatcccaaactgtatggagttgagagagaatactacagtataattcaaagtgtttataattctgatgatctttcatggaagaattgtttttcctttttaaaacttggtgtttaaataatcagtgtgaagattgtgctatgggaaagggagtactaaacattaaaaatatttttccttttgccttcgcatttttgcattaatatttctgtttaaaattttatgttctatattggacatgtaagtgacagtttgaatttacccttatgaaaagatgtttctgctcccagtgattttaataaccataataatattgaatgacaatagtgctctcatttctctgtcaaagtgacagtacttgctgccatcttttgtccattttatttgttttgctatccacagaagtgaatttgtgcttgttacagccactttttctttcatgagtactctgctgggtttgagtcctagttatgccatgtgttgaatttgcatggaaatgtttctataattcaaatttttgagttaatatgccacttgccttcctttcatacttcttttccttattccatataaatatttgaagttggtttcttcaggcattaacagaatgatattaagtcaggtgacaaaccagtgaaatatgaataaagtagaaaataaaatacagctatgaaagccataaatccagtgggttgctata

SEQ ID NO: 46373 - DNA, 1138 bp, Bovine  19866881073430
  misc_feature (1)..(1): n is a, c, g, or t
naatttatgaggaactagagttttttcctgagttgcattttattctcatattaccagtgaagtagctgaggctcagagaaactagtagatctaaaaccacatagccaataagccagtcaaaggttaaaccaggatttaaacccaaatctaagtctatgctctcacagggagaccttaagaaggccactagtgtttacaacactttatgaataattcgatgaccacctaatctgatgagggaaggggttattatttctactttaaatttttaaaaattgagatttgtatacagttaataatcagagctgaaatgagaaaatctgaaaacctctagtatagcattccaaaaagttcatttgaatataaaatatgatcatgtgcacaattacgtatttaaacttggcagtatagaaaaactggagaagaaaatggcaacccactccagtattcttgcctagagaatcccagggacagaggatcctggtgggctgccatctatggggtcacacagagtcagacatgactgaagtgacagcagcagcagtatagaaaaataaaattcagaattcatgagccttgttatattttactagtctttgtaatttactgttagaggcaaggacatgtaactaaagcaagcctctatggtcaataaatgtagacaatatttttaagatttattaaaatttgtatttgttcaaaatcaagtttctttcgggccttatccaatttgacccaggacctataggcttctactaatttgcatgattgcctcatacagtattaaaatacttccaagctcttcaaattattcactttaatagctttctataagcagttaaaatgaatagtaacatggctttgttttccagatgtcatttcatgtgcgtgaataattctaccaggctttagtgattacatcaatacatgatagcaaagaacaaacaccaaatttaacttggaacaattttaacaaatcccgtatttgtttttcctattaagcatttactgttgggtttcccaggtggcacagtggttaaaagtccacctgacaatgcaggagaccgcaagagatgtcattttaacccctgggtcagaaagatccccggagaaggcaacagcaatccactcaagcatt

SEQ ID NO: 46374 - DNA, 1928 bp, Bovine  19866881076619
  misc_feature (1)..(1): n is a, c, g, or t
ntgttattatttttttttcctagagcttgaattgttttaattatggatgttttaaaaatgtttgttattaatccctttctataaatgatttaaaagcctgcctctcttctctgtgcacttagttaaaagctttttatccttaatgtaggctccctagaaggaaatgtttgagaaaagaaccgtgtgtaggagatgccaagaagctattactggttaagtaatctgatacttaatatgattaagagctatcatcttaccaatcaccacacatctttatcagttagtaagaaaatgcattattttcaatatggaaaaaaagatgagagggaagttatgtgcttttccccaaatcaaagcaaactgaatattagaacagagtcaggcttccctgatttataatctggtcctctgggactttacttctataggaaaagtcttgaatttggcccatgtttgaactaaacagcaaagagatcattttaatgattttagaatttggggctggataatacttatttttaattttaatattagcaaaagtgaagaatatctgaaactattacaaaggagtagtgctagacactggagaaggcaatggcaccccactctagtactcttgcctggaaaatcccatgggcagaggagcctggcaggctgcagtccatggggttgtgaagagtcggacatgacttccctttcactttcacttttccctttcatgcattggagaaggaaatgggaacccactccactgttcttgcctggagaatcccagggacggaggagcctggtgggctaccgtctctggggtcgcacagagtcggacacgagtgaagcaattttgcagcagcagtagcagtgctagacacaattgccaagttttgtacttgtgcacatccccaggaattcagttaaaagcatttcaaacttaatgtaatctatagaagaaaatgctggaaagaattgtgtataggagatgccataaagttattggtaaggaatagctccaagaaaattgaaagtaggcttttagaggtagtagagtttgaaagaagcagtgagtgtatttactctctgttagttgaaagcagtcaatgctagactctgagattccctgagggatttgatttttctgcttagtgagagtaaataggactaagaggacaactgtactactttgctaattcttaagggaaagatgtttaactctaaattgtgaaggtagaacaggcattgagataagcattcagtgttgctgcctctcctgcagcgtggaggacagattgaattccagtgactagggtaggtcactcagaataattcagtattcattcattagtcaatcatgtgtttattccttcaacagattccatgctaagtgctgacggtatcaaataagacacaggctcgtactcggaggatgagtttctgccgttgcaaagattatatggaaaggggaggtaagggtgttaaaagagaacacctatttgaaatcttgtagcaacctctgtggcctctggttgtatagatagaatttttggcatattagaagggaattctggactcttttgaccaatccaaggggaactttaggtactctcatggtacaaaagagacctccaagttaaagatgttgaatcaggtaagcagagaacattatcagtagttatgtgactggaattcccacttcaactggaataacttctttgagagagcagaatatacatggagtgacaactccagcagacttctgactcatgggagagctagtactaaaatatttctcctattaaaccagcaagtgataaagagggacacttattctagtacattggggaatattaggtggttataaatatctacagataatatataatatttatttcatttttagtcctagttaaaaaaaaaaatcctcctaggacttc

SEQ ID NO: 46375 - DNA, 1898 bp, Bovine  19866881156634
  misc_feature (1)..(1): n is a, c, g, or t
ntcaggctaacaaaaaagttatttaagtctattttttgtgtgtgtgtgccttactttcttaacactcttgaatcatttacttcagaaaataaatcctgatatagttatattctgtcttgcagttagaaatcttgttcacattgaaacactacttagaaagtacttgaaaaattgggtagaatacaagaggatttaattttggctagataaagacaatttttttctagttcaacatgtggcaaattataatgggtatcccaggaatagtggctcaggaagctctttcacagctctggttctaaggatatatatatacactccttgtcctgttgagtgcaccactgactttttatgagtttaagtagtaatttagataacaaattttttcatagacatctgaaagtaagacttctgtgaattgctggaattacacaaaggcagaagttatttatagatggagaaactcacactttaacatgcttattccaaagatgtatcttgagaatttcctaggcaagttagtgcaccaatagtaaaaattatacatttataatttaatttttaccagcctagcaactagttcaagcatatgtgtagatgaaaatttccatccattttgccaaatcacacttcatcaatctgaaaaatctgtcttggccacacccaccctatttggtgccagttctcttcactactatgttcttcttcactactgtcttctcaaagcctgaaatttcctctcccatcaaactaggaaaacttggaaatctcttggctagagatattcttacagatccttaacgaaattctgatagattgtaatgatgagaagaatccatcttatttttcttttaaatcatgctctctttatactcttcttttcttactttctgtggaattggcaatgccaccatgaaaaccaatctgttcatcatcatccgagaatatctgttttctactgagactagtttctctttaaatgatgcatgcatttttctttgcagaagactgcaaaatcctgggtctgcttccctaaagtgtctctatcttggagcaggacctcagactgtatcagaagtaacgttctccacagtgagagaataacattctcttagtgcatatatatatatatatatatactgtacatatgttcaattgctcagtcgtgtccaactctttatgaccccatggactgtaacccgccaggctcctccatccatgggatttttcaggcaagaatactgaagtagattgccatttccttctccagaggattttccagatccacagataaacctgtgtcttctgcattggcaggcagattctttaccagtgagccacctgggaatatatgtgtgtgtgtggtgtgtgtacatatatgtatatgcatatatatataaaatttcttttttatatactcttattcccatttttagagaaaaagtactaagaagcacagtgtaaaaaagcacagtgataacacaggaaagaaatttgtatttatttagtatctaatatatgcaaagccttgataagcacttcacatatgttatttaatcgtcataagaaatcatcatacaggtattgtttctatttttactaatgagtaggtggattttcaaggtcataagctgctaaacaatctcttttttatagtcctatgtaactaacaagtgatcaattaacattaattataaatcagtggattcttttttaatgagctcttgctcattaaatttggaaatcacttttcattttttcatatatgcctcaggatgcatcacaggcatttatgaatgagtaatttccacctccatatgaggaatgtggtaactttccaaaaatatctacatacccagagtagcttcccaccacctcctaagagtaaggttaggtct

SEQ ID NO: 46376 - DNA, 1209 bp, Bovine  19866881199172
  misc_feature (1)..(1): n is a, c, g, or t
ntgtattaggtaagcatataaatacttcttaaaataacctaaaatcacatcatctaaggtaaaaatggtattagaaaactgttaaaaaaaaaacaaaaaactttaaatgttttcttttaaattaacagaagaacagtacctgctaacctactaacatattttgagatttcatctctttaaaaaaggcaagtactgacctcctattggctgctggttaaaattaaaatgtccaagaaaacagtatttctattagcgttttgaaaagaatttggttataccaaggaagtgacagtcccccaaacttatactgactttcttgtggtgatttgtttgaagggtacacagaagtacaaagaaatgtttggtacttaaacagtaataaatataacaaagaaaagtcagatattttcctatctttcacttgacacccaagcaagaaaaaaaaaaaaaaaaaaaaagaaaaagataaaaaacaaacaaaacccaacagctttaacttttctgtacatttaagaggtacatataccatagacattacctaattcctgtctcagggcactgctgctgcagctttctttcagtttcccaatagatcaaataaaaataattgcttagctgaaaattctgactgcatgggtgttatcaaatctccttataagcatatttttatattcctgtgactccacatcaaatacaatagtcaactgattgctcctgatttaagccttgccttccaaaacccaacctgacattttgtcaaaggctaaatattgcagaggaaactgtttaaaaagctgtgctgcagcaaaaactgcatttacaaggcattaaaaaaaaaatgaactaatcttaaatgaactagtcttattatccgaaatctatgattctcctctctttagttcttccccatgtctttccctgacatcttgaagattcttagcctctccgtagatagatatcgccaaacattaagtcatacacagttctgcagtaactctttcttatcatgtaagaaaccaaagcctaggactgaatttaacacctttcctctggtctttagccacatgccacgctctctgaaggcaaccatagaaaccaacctgtatgattaggtgcccccacattttaacacctcatgtgcacaaaaaaatgactacgaggtcagtgtattcagggccgtattacaaagaaagaaaggctacctaaaaa

SEQ ID NO: 46377 - DNA, 799 bp, Bovine  19866881200754
  misc_feature (1)..(1): n is a, c, g, or t
ncacgacagatacgatcgctgctccagaacatcacagaccaggggatgaaaggtgtgtgcaacacagtgacttagaagatgctgacttcaatagcagtgcctcagtagtcgtatttcctttaaagcacccattaccttttcaagtcagtgttagtaaatgaccttgtaactgtttgaggatcacaaagcatgtggaaatgctctcattaaaactagatggagaccatggatgcttttagtccaaggagttttacaaatgaagctaagagaggtgtaaaatgtatactgttctaaatagcccaaaaatgatttgttgtaaccttcttaatcaacagacctataattagggaataaatgtgccctctttgtgactcagtccccaagtgaaatacgtttggcaagaatatcttttcagaaattgctttggttcaggaagtgcttgtcacgctttatatgctaggataggttcttttaacatttaacaatgaatgattatttcagaggtatgaaggatgaacttaatcagttctttattctgtaagtgggaaatcaaattcattacattttgatcagaagaaatcttatttttacatactttcagaatataaattttaatatcctccagaaacacatttcagtgtcaggaagttttttccatcttgtctaaatcttctagctattcttagcaaagatgaaggacagttggctacaatcctttgtataatagaccaagattatagctatatatttattcactctttcattcaacatgtttttattgagcatctactaaaactaa

SEQ ID NO: 46378 - DNA, 1556 bp, Bovine  19866881215825
  misc_feature (1)..(1): n is a, c, g, or t
nttcaaacacttaatgtccagtcaaaggtattactcaagaagtttcccttggtttaacatcaaggaaagcatcaggcttttcctgacacatacatgggccaatggctttacactctgggccttgcagatattaatagctgtcttttgtcctgtttagggccatacactctgtaggttctggtgtgggccctctcacctgaaatcgtcgtaagaaagcatgagtctctattcttggtggtcacctgtggttcctttctcagctcgaggcatcattaggatccctaccccatctcccaacaacctctttctgcaggtggctccttgcaccttctggtaactctgtcagttgggacaggacccaggtactcacaccaacaccctgtgtccttcaaggcccacgtctgacctggcatagaaatgtggccatggtacccagtggcagggtggtgtgttgccccgcttcccaaacccttgttggatttcctgtgcaggaatcagaccacacctatagttgtcttcagcttcctccagtgagaacaggtggctggttcctgcactgtgaagtttcaggggagacaggccaagtgctccaggatgataaagagctgtgtgcccctgagaaatactcttcctcttcctgcattgaggaggagaatgaggctttggtaaaagaatgatgagaaatcaccctttttccagcatacttctctgttcctcacatacatgagtaaaaatatcctaagcgagaaataaaggcaataggaggtggttacttaggcagcaaatttgagggaggtcagggagcttctggaggaagggtggctatgatgacccccacaggaaggagccttggagaagctggaggagggagcagaaagtgggtgctgtcacttcctcccattactcattgattcctttgcctcacataacttggggtggggattcagtgcttctggcttcctgccctactatgtgctgtgacatcccttaagatgtgggatgctcatgtcccaaagtggcatccaataatgaggagacaggtgtggggctggagatgggctgagatgctcattctcagaaagtcctcctcatgcctgtaaattatgcttctccataactgttaattaaagggaagtaggtaattttgtgagtggaaaaaccactctcaaatgcaaaaaaaaaaaaaaaaatcgcttataagattccaagaatttaagcttgcgagtcagaaatttcacacccaaaatgaaattggcgagaagcccagaactcgccattttcactttaggtactaaaattctcacgcggatatacttaaagagtaaccagggtattaaaatgtcctttgggcttaagatttatatacatatgattcactggcatggttatttacttagcaaataaattcagagttgggttttgttattttggaaatgtctaagaatcacacatttatttatttctaagacagtttatgatcagaaagcattgagattcttacaaagaaagatgtatataattaatgatctcttggcacgctttcacatcttgcatat

SEQ ID NO: 46379 - DNA, 916 bp, Bovine  19866881314168
  misc_feature (1)..(1): n is a, c, g, or t
nttttatctttttttagacagctacaaaatattctcttgtatgaaagaaccctaatttatctaatgtgtcttcagtttaacaatcacctcagataaatgaacaagaagactttcatattttttttctttctctttcttactttttcatgtgttgaggcttggcttgtcctgacacttgcatcacccctctgctctactatgcctcagcaaacaatttatatgacatgtggtttacttttccacattcccacaatctcaaattctgtttgcaagcttactttgacaatgaatcgaggatttgggatctttgtgataatctgttgaaaactaagttgaggttcgtcagtccaggagtcttgagccgctgtgtcatttaagtcattttcattctgtcagtcctgcccaagaggaattcaatattttcccatgacagtctctgtctggataaataatctaatccacacagttgttaataaaattgcttatttattgtattgatgaactttgtcagagtcaaaatataaatatcagtaagtgaatgctcaagttatgaaaaagcactgtaacctattcttcaagttaagcaaaacacattaagtatatgcagtgttactggtaataggctaggtatggaggtgcaaagacctcctatgtggtgttaatggtaaagaacccacctgccagtgcagaagacataagagatatgtgttcagtccctgggtagggaagatccactggaggagggaagaattcatgcctggagaatcccatggacagaggagcctcgtgggctacaatccatatggtctcaaagagtcagacaagactgaagcaacttagcacacacccatgcatagagaaacaaagataaatggagtatggtttttgccctcaaagggctgcattgatttcagca

SEQ ID NO: 46380 - DNA, 4002 bp, Bovine  19866881460935
  misc_feature (1)..(1): n is a, c, g, or t
naaaactcgaagtataataaagtaatttttaaagaaataatatattcacatccttaactaagcatatactcaaacacctcacctgggtataaccacagcaggtcatgagatttcattctttaagcagccacatcccagaccagcagtaagcaggtagtctgtaattcttgcaactgctgttaagaaaaaaaaaaaattaataaataaactcaaaaagaaactaaaggaggaaacagtttcttttgatttattgagcagtcttccaagtgccattcagattagaatttgtattagcaggggttttaaatcacccaaggccaagggttatctggaaatctcattctagaataaggcaaagagaagctctctaattttacaactggaatatacaaactctggccatcatacctgggtcaggattctggaaggtgagcccatgggtgagggaggtgggtttgaggcctcgaaataacaacttataggagaccaagataactttctagcaaaatcagaattttaaaagtctaaatcaagcatcagattaaaggcttggtcacagaggtgaaaactgtacaagacgttgggatggccttccaaccagtaagatgggagccggccagacatattgggggaagacctgaggccccctgacctgcctcatcataatgtccactacttgactgtatgggggtgaagaaagcaaggacagagcagatataaacagaggaaacgcttccgagcagaagttgtacagcgtgcacttttaagaaaaaagtgtttctgaattaagatatggagtaggcactagtgggcgaaggttaggatgccccaagagataagagtgaatgctaaattcctctcaactttgctcaacagatttcagttcccaaagtgccaaattattttgtttcactaaacttaatcccaaacgcaaagcttcagttcattaaaatagcaacacctaacgttctctgcagctaattcagttggtttcaaaacttcagcagagcccttttaatagttttaagcaaattacacatcaaaactgctattggggctgcctagcaacaaagctaattgcataacataaactcactgcaagttcttagtaaaacagatttttattcaaatataaaagtttttctccacagaaatatttttaaaggtataatgtggaaataacatataaaatattcctttagactatcatatatatgaaaaacatatgaaaaacttatatatgtacaaaatcagtgtacctctggaaactgcatatttatcacaactaatgcattaataaatctgtttattttcttccaccctctgagtgaaagtgttagttgctcagtcatgtctaactcttcggaccccatgaactgtagccttccagtctcctctgtccatggaattctccaggcaagaatactggagccagttgtcattcccttctccaggggatcttcccaacctagggattgaatccgagtctcctgtaccgtaggcagattctttaccaactgagctaccatggaagcctcaaccaccccctgcatgttgtaatatgttccctcatttataaactagagataatttcttctgaaaccatgaagatgtctttatgtcattatccatggaagtaactgtcctgctggttagcactaccatcctattcatggcactgagtttgatagaaagccttaaaattagccatgccagactttcctctgtctgacttgttcttatagggatgaagaatatagtctgagttattttggaaaagcatttgtttacatgctaaaaagatctacaacagaaatcaagaagaatattcatagccaatgtcactggactattttttacacaagaactaggtaaatcctacaatctcattaatcttacaatcactaatattaatagataatcctgtggtagtgattacgcctccataaatatcaaatatattttaatggcatgttcatcatgaaaacattaaaataaaaaccaaaattttattatagatttctataggaatggttcaactgtgactagttcttatagggaaactttaaggactaggcattttttcctctaatctacaatcatccctccagtccacaagtttttgaaatttgatgataaattactaatgccctattaagttactgtgctgaacattcattagtgttcaataaatactgattatagttcttttcctcctcagcatatatcaatatctagcatttttatttcatttcttatcattcccttgaaaaataatgattgcaaattaatttattttattccacagagcttcaaatacttaaaaaccactttactacaaaatctgattttttttttaagcaagctttagaatgtaatatattggttttcctgtatacttcataataacctgtggatttgttcattctgcctataatcatttaattatttgtttaagccagtatgaaagctgctcactatggtgttttaatttattgcctcaatctgtactaaagatttacaagataacctcatcctttcaatctgtcatgactgataaaagctttaaataatctattagagaaaagcaatgccacacacctgagtaatgtttcacattttagagccaattttgatatgcagaattccgaagacaaggtgttaatcatccctgtgacatttcagaaatccccagtggctgacaacgtttggtgcttagtaaagtgaacaaggcattactaagacaatcatcaaaaaactgcctcgaccgtgaaggaccaatctgatcaagaacagatacaccacttctggtgaaaattctaaggaaccattttcaactgtaatagtgggggtaataactgggcttagggagaaaattggaactggcttaatatttcagagccataccattcagtagtgcttagagaaacacagctacagcattcaaaagctatagaattgaaaactgaaaggacaaaagtgtctctaccattctctaaagttgaaactaaacaaaatatgaaacacaaagtcaaaacagatataagcctgcacaaatgggacaaaaaattgactttgttaattccctgaagaataatgagaaaggagatctttgtaatcaagagagaattattttgttttctgtttgttttttgtttttggtcattgacatgttttttcctgcaaacactgcggtgtttcttcctgttatgtttcttcctaggtgcatatgatttaaggacactgaagtgagaggaagcagggtattataacagttattataacagttaccctagagagggctctagggtaagagccttcttattctagatttgggtttaaaacctggttccatcatttctttccataagatttttgggcaagtgtatgcttaagatcttcttctgtagaataagaataaataacagcactgtaccataatcttgctatgaaaattgagagaaagtacataaaaatttttaacatggtagctgctccatcactgatgctcagaaaaaaatggtagctattataattaatagcactttgaacatgtacatgctcaacagagactgattggatggatagatggatgcattgctgaaataagagagttgcagacagtaggcaaacagctcagtaggtatagacataaacaccttgtttaccagcatttaactgtctggaaagactgaataccagaaatgctgaactagaaaatcaccagtccagcaaatcaatgcaagagaactgggataaccaagcaggtcaatcctttcagttctgggttattcgttaaaactttcaattcacacaatgttttgaaaagtcatttcatagaaatccctccactcctaggagtttcctcttagcctcttaatgttggaaatttcaaatctaaaaatctatgagactgataatgatatatgtctcatgttcatcacaaagcactgacaggtaggtattatcatctctatttcttaagaaatttagggtcataag

SEQ ID NO: 46381 - DNA, 3500 bp, Bovine  19866881584834
  misc_feature (1)..(1): n is a, c, g, or t
ntgattctgatactgtgacataggttaagaaaatttgaaattacatgaacttttagggtctatgacaacaatgtataatttttctaaatatgatatagctgactgatattatgttcctttcaactgctacattgtactttgattaagggctttagtctagctggctttttaaataattttattagaatatgttgattgcagattatctttataatataaataacacttagtaaataattatttttaacctcataatagatgattctttctcagcctttatatagatttacatttaaattagaatagaatgtatatttttaatgtaagcacttgaggcattttaaatttattttaatgctttgttaatattctgtactaggttcagctttctctatacacctatttgtctgctgaatttattggaactgctaccatttacaccaccatacgcagagtaggaacagtattacagcttatgcatacactaaaatattactactgggtcattaatcctgctgatagtagtggcattacacccaaaggtttaggtaagtacagtattacctatgtaagttgggccatggtgatgaaattgggaaagaaattagatgaagaaatattgggaaaactttgatttgagggggaaaagggaatttattaagttaataaaagtagggaactgtatccatgtaagacagatgttataatttatcagtgtatagtaatatattataatttaaaaaaaataattttttcccaaatctgacattagtaagcaatttgaaattgccacaatctgaaattttatattctctactgttgaaactgtacagaattactactaatttatattataattgcaatgtatactaatttaaattttccataatatcacaatactaatttcattgagcttacttactttaataataacaatgatggaggtttttggtttatttttttgatttctgttttattctagatggtccccggccatcacaaaaagaaattatatcactgcgggcatttatgttacttttcttgaaacagcttatactaaaggtaaacagttttacataatgcataattgcagtatattaagtgaaaagaatttttgccagagtttaaatcaatattgtaaaatcagtaataactaccttcaattcatgaattactttcagtattctataaatcttagtattaactcttgttgaacttcactttgcattaaactttgtgttaaatattctctgaaagtctccatactgagggatgtaacaaaaacagacaaggaatatgtgcatgaaaattgagcatgaagattttattctagaaaatcatctgtggtttctgtttgagaagtcatatgttacatattttatcatagtaggatttttaaaagattaagatatatagaaaataatggcaaaatacacagtaattgatattgtaaagtcttattataatttgcatcattttaagaaaagaatatgggattagaaaatagtgattgaatatacttagatgaagaaaatataatatttttgatagtgaattcaatcaaatattagcaattttagacgaatatacttttctaagtatttacttatttaacttgatttgatatagcctatgggttatgaagtatctgagtattataattaaagcatcattacttttaagtagtttatattttattttaaaatgattaatttgatgtatgtctttaattaaagttttaattttaaatttaaattaaatatatatatattttaaattaggatcgaggggtcaaggaagatgaacttcagagtatattaaattacctgcttacaatgcatgaggtaggatatggtttgggtcttccattttaacaattttattcaatgcattaaaaaacatttattattgaataaatattgatgatccttattatgcaggatgaaaatattcatgatgtgttacagttactagtggctttaatgtcagaacacccagcatcaatgataccagcctttgatcaaagaaatggaataaggtatgaatataatataagtatcattagtagagtttaatttagtacacgtatgcttcccagaataatcctattcagttaacttttgggtatatatagaaaaatcttacacataagaagggaatagatggagaaagctgttattaatcctcctaatactcaggaaactgatgaaatgtatagaaaatgggtctcaagtctcaaaaaagagtaattatattgttactgtagtaaaggcatttcaagaagttgaaagagcaaattttttgacaaaaagatgagagcacatggtatatttcagctaaagaaagctctagaaaattctaagtttgggctcaagaggtagagagtggccaggttgaaagatccattaaatggtaagaactttaaattttttctgttggtcatgaaaactaaagaattttgaatatagaaatgatttgcagatttctatttttccaaggagcaatgtggagaatgagttggaaagggataaaactaatgtagcaagaccagtagagaaattattttattcgtaagtattagggataatgagccaggacaatggcagtgtgatgggaagatggggatgaaatgtttttgaattagaatccaaaaccgaagaatttgaaaactttagttatgttgattgtaaagtaattgtgtagatatgaataaaacagtttcttggttagtattcttaagtacgttaaacctataacctagcctcttagggattctctcattttttctggaatctgagttatttgtataaataagaattctaggtaatgccacatgtaactcagtgagctttcacaggttttaaaaagagtttggaaagaatatattaataactgtcaaaagactatattattagtgcttcttttacttggtcatttatatcagcaaataacaactttataatcttgaaggatttccttttcaagttagagaagccatcactttatttctatgtggatatccatcttgtgacatcactcttcccattgagtttacaacccatggggttgctaatctatttgaataataaaattatacatttcattagtaacaactacaagtatattttactgtgagattgaactctatgaaattgctgaaacttagtgattttactgaatagtagcaatttcatatggtacaatcatgtttctcatagttgataccagctggacatgtcacattgtttgttaccagtatgttaaaaacaatcacaaagatgaaaaatttgctactttagtttttcattttaaaaagaatgtggagaatgtaggttcttgtttaaaatattgaaaaaatagatatattaggtataaaattttaaaatctataccctagaaaataggaactaaagggtaacagttatgtctggggaaatttttgattaattataattcatacatactaagaagtgaacacaaagattgcacttaatttaata

SEQ ID NO: 46382 - DNA, 1021 bp, Bovine  19866881986300
  misc_feature (1)..(1): n is a, c, g, or t
ncccttatgtatggtaaacttatttgcaatgctttttctttctttattttgtgtccttttatgtttaatatataaaaatgcacattatattgtaagttcttaaaaaatagggataccactccccaaatcctctctaccaatatctgacattacccacatagaataaattgttgcaaggaatggtgtaagaataagacagtcacccatggccagatttcttaaagggacaactatattttgaggaatttcttgaaagaattgcactgcactctcttaactgaacagttttaaactattctactcaattgtgtataagatgttctttaagccaaatctaatcagtctacaaattgtgttttatttatttagtcttcataggatccaaaacactgtatttggaaatttttacacacacacacaaacacacatatacacattttatatatatatatatataaaaatacacacaccacacacacacacacatgaattgaagtttaggcaaggagctcacattaaaagactttatcttgagctccaaacccactgcatatctccccttcatgtctctggaacacctcaaattaaacacggtcataaagtgatattaagacagtatcttctctgtgaatcttttcctggaatcccctcctgagcacacaggaagtgatctgtcattggttcgttgttaactttttttttttttttaattgttttgtgtcttaatatttgtttttttttttaaattttattttatttttaaactttacaatattgtattagttttgcccaacatcgaaatgaatctgccacaggtagggtatggggagggaggagggaggagggttcaggatggggagcacgggtatacctgtggcgttgttaacttttttatgaattcctctgttgctcccctgtcctcttttgtctgtgttgtttttgaacagagggactttgtctatttgacccccatgctcattcactcagttactatttctttagtgtttaatcagttcagacg

SEQ ID NO: 46383 - DNA, 1159 bp, Bovine  19866880190399
  misc_feature (1)..(1): n is a, c, g, or t
ngaaagttatgaccaacctagacagcatattgaaaagcagagacattaccttgtcaacaaaggtccgtctagtcaaggctatggtttttccagtagtcagtcatgtatggatgtgagagttggactataaagaaagctgaacacagaagaattgatgcttttgaactatggtgttggagaagactcttgagagtcccttggactcaaggagatccaaccagttcatcctaaaggagataagtcctgggtgttcattggaaggactgatgttgaagctgaaagtccaatactttggccacctgatgcaaagagctgactcatttgaaaagaccctaatgctgggaaagattgagggcaggaggaaaaggggatgacagaggatgagatggttggatggcatcactgactcaatggacatgggtttgggtagattctgggagttgatgatggacagggaggcctggcatgctgcagttcatggggtcacaaagagttgggcacaaccgagcgactgaactggaactggatgcgaagaactgactcattggaaaagaccctgatgttgggaaagattgaaagcaggaggagaaggggacagcagaggataaggtggttggatggcatcaccgactcaatggacatgagtttgagtaaactccaggagttggtgatggacagggaggccgggcacgctgcagtccatggggtcacaaagagtagcacactgctgagtggctgaactgaactgaatttcatataattagtgcggctgacaacatttgttttattagattttctatttctctgttctattttgaaatttagaaggttttcagaaaaggactcctcttgtatcacttaagctatgtttcaccacccccactccagtagcaaagaactggctgaaaacacaagccaggaatgtacctggcattgcctctgcccaggtataagtgattggctgcatgccaaagaactgctttctttctttgaaggaaatatgggggaaggttttacctctggggcccacctcacagccctccgcttacaatagtctcaggggagcgaagagttttaagtccaggctcagtttgtatttaaggaatttcctgcaccagccactgggggcggatcggcctcactgtaccacctgccccaa

SEQ ID NO: 46384 - DNA, 4012 bp, Bovine  19866880367844
  misc_feature (1)..(1): n is a, c, g, or t
nggagaaggcatggcaccccactccagtactcttgcctggaaaatcccatggacggaggagcctggtgggctgcagtccatggtgttgctaagagtcagacacgactgagcgacttcactttcactttccactttcatgcattggagaaggaaatggcaacccactccagtgttcttgcctggagaatcctatggacggagaagcctggtaggctgcagtccatggggtcgcacagagtcggatatgactgaagcgacttgacagcagtgacttaaagcaacacaaatttcttatagttcggtagaagtctgatgggggtctccctagggtaaaatcaaggaatcagctgggctttgtccccttcttggaggctgtaggggagaaatgtgtttgtgtgtgcgtgcatgtacactcacgtgctgagttgtgtctgactctttgcaaccccatgggctgtagctcgccagactcctctgttcatgaaacagaggcaagcatactggagtgggttgccgtctccttttccaggggatcatcccaacccagggatcgaacccacatctcctgtgtctcctgctttggcaggcagattctttagggagaaacattcccttgcctttttgggtttctagaggccacccacctacctgactcctgttacctcctccatcttcaagctggcagtgatggccttatcccattgcatcactctgactccctttcctgccttccctctttcaattataagaatccttataatcacattggcccaaccagataatccagggatatctctcaatttcacaatcagctgattcacaacctaattacatcagaaaccttaattccactttgcttgtgtaaccctacacagtcctagggtctagggattaggacctggacatctttagggcggccgttattctgcctaccacaatggagcaatctgtataggggctgcaggttagctaacagcatcgcatcagtgggaatttcctgatttggacaactgtactgtcatcatgtaagaaagtttcctgtctttaggaaatacacactgaagtatttatgggtaaagggatatcatgcctgcaacttaaaagcgttctctttttctccctctctttccacagagagcaagagtgagagcagtgaaaaagcaaatgtaatacattaacattggtagaatctgaataaagagtattggagaattttttgactcttcttgaaaatttttctctaagtctgaaattctgtaataagggcaaaaatttttagtgtagtctttatgagtaaatttccttatttctaattaatacttaaatttgtgtcatattatgaataatattttcattctgatgcatcttttaaaaatctcttttgaaacattagggtcattttagcaagttgtctaatgacttatttgccattaactatgaataaattatgtatcgagcagtcttgagtatataatgaaggtaaaatccattattttggacttatactcctgttgccgtagagcctggatattattgttgagtattttcattctctgtcttaaaattcagcattactttaaaaatggagtcttgaaaaggtatttaaaagtagacaaaagactgttaagagtatctgtccaatattaatttcttagctttgataagtgtagcgtggctatatcagatgttattaataacattaggaaggtaggggagggtaaagttaggtggctcatgatacatacatatatatccctgagcctctgtggggtgggggggagaaagggagggacaaatcaagagcagagaggtgtgagctgtaaggtgtgtaaagctcaggttgcttgaggataatcaagttccaagtattaattctgccactgactggttccttaatattgtgcaaattactcatatatttaagtcctgccttgatcgctccaaaaaagggatctgaggaagcttttaataaaatgcctgtatatgatagaggctcttaaaaggaaaatggatcaaaatcatgagagaaaatgaggcaacagctaacacagtggctagggtgatggggcagcaaaccatggattttttccaatggtcaaatggagaccctcatcatatgaggggcaaatcaaagaaatcaattatgaaagtgccctttaaaacatggtatgcaatgtgagttagtttgatagaactagtattgcctgagccctcagatacctaaagagggcagacagcctgtctgaaaacttcatagcaaaaactcatctctctggccaggtctgtgcctctgtatcagcccaaccgagacatcacagagcgcagactgtctgagccaagagggatcagcaagttgtaacacaaacttctctgaccatgctaaacgtgtaatcacccaaatcacagctgtttctcctgagactttatcttggacgctggctcagcagcccaggaacgtgtaatccacatcaggacggcacaccttctccagacatttctgctcccggctggacttgggcttactctgcactaatctcagcttggaaaccatgctcatgagaaaagaaaggtccttgaagaagtgagtgggattagtgaacagaaattcagaaaatcaggctcattcacatcctagaaaccagggactgactattgagcatgaaatcacactagaaattgtgaacacaagttgtcatggcacaaaatttgatgatgattgcctttagttaccaagatgacacaggatcttggtattaaggcagacaccatggcatgggtcccaaacatctcaatctgaggctcaagtagaattttctgttatttgttgctgttcggccacccagtcatatccaactctttgcgatcccatggactgcagcaggccaggcctccctatctctcaccatctccctgagtttgcccaagttcatgtccattgcatcagtgatgccatccagccattttatcctgactccctcttctccttctgttactagtcatggtgggaaaggatcataggggtatggaagggggaccctcaaaggtatgaccaggggcctttcacagagaaccacttacactgtcgtggacaaattcacagggaaaatgctgtaacagagggttacattctgatttgatcaagggcctgaagctcaattttttatagaaataaatagaaactatactgaactcatcataagcagtccctctgtggcctatgttataaggctttctagggtaagaagcaaacaataaaacaccagctggtcagttgaaatttactgggaccattcccaggagttacaggaaaagaaaagaatcaatattataacttgggccaggactagagatatctacagaagggcctgtgggtaaaactcaaagacacacatacatggcattgggaatgaccagcgtgaggctgggagcacagaggcccaggccttgtggaccagatcacaccagccggttgcagactgtccatcccaaagtggtctgtgctatgccatctggtgaaagacagtggtttctgttatttttctgcaaatccatccttaggtaggagtgttgagggaacagaatgctactggatggagaagagggcagagagagagggagatgatggaaagaaagagagtatccataaatgtctctctctgctcacagcagggaagaagtgacgagtgggagaggaggacgagaaaggtcgatttgatcgcacctgtacaacaccatgagtgactactgtccacctcctatccctgaggatgtgaaggtgaataaccaagaccctcttagaggagagagcggggaggggaaggtgggtgagacgcacctgactaataaatgcacacccaagggccataccaggagccagtactaggtcaaggtgggtggtggacacaagggaagcctggcctgtttcaacagatgaggtaacaccttgaccttagtctttcctgtactggggaggggaaagaaagaacattctgggcagagaagagttaaaaca

SEQ ID NO: 46385 - DNA, 871 bp, Bovine  19866880462983
  misc_feature (1)..(1): n is a, c, g, or t
nctaggctttcccttttgccctattcctaacctccaactgcatgcagcagagtgttcttgaagtataaactgaatttctcagcttaaaactctttagtatactcccattggattttgaataaaatctaaatttctaactctggtctacatggtgcaacataagcagtctctaacgatctctccagtcttatcacaaaccattccctcttcattcagcaggatccagataccctcgagcttcgaggccactgtaccccacgttccttcttcctggaacagcctacccatcacttctcctttagcttgatctttcttatccttaagatctcaccttaagtgagtttccacagaggctttatagaaagtagttctccctagttattctctgcattctttcttgtacttatctcagttagtattcctttaatttttattatgtgtctcccagtcggcacttgagcccttgagaacaagggctggatctatctggttcgccatattttctctagagctgagagcttaggaagtgcccattcaacatctgctgaatgaatgaacgcatgcactgttgacagctgaccttatccttcaccagccggtaacaagctggacattcctggcagccaggccaagaccgattgtagaaatagttctcttcacactggtcacagcgattccccacaaagccttctctgcattcacagcgaccatcgtctttgcactggagggaaagagacccctcaggatgacagtcacaggctgcagaataaagggaaaagggtacataataaggaaaaaaacggaagactgcattttctttaagctcagagtgatatcgataagccagcgtactatcattagaagtagatgc

SEQ ID NO: 46386 - DNA, 1106 bp, Bovine  19866880497505
  misc_feature (1)..(1): n is a, c, g, or t
ncaactagaatggcctgccctctttcctagacaacaatgaagacatagtaacactttccaaattttctattttcaagctctgtgcagaccaacacccttctctggcacttgtcatgataaccctaccctcttaacatcaacaatagtttcagatccctgactttacagaggatttctttctttataatcaatgggaagatgcttaggtccactggtaaaccattctttatatattaggctgaattccttctgcaggttttctagataaaatttttatttcagtcactataattaatttttaattaatttttccttggagtatcctgttctttgctttttcttttattggagtattctgttctttcaccaaactcatctgtttgggaattcctcagtggactgatggtcccctgaaatccaccatcagtagataaatataggctctcagttttatcagtcaacacaaaggccttgggtgtctttatgctaatacaataggccacatattccaggcttttcagtaagtttatcctctctaatccctccccagcagttccaggtcattatccccgtagataagaaaactaagacccagagagtcccaacccacctaatgtcacaggtcaagctaatatccagttaatataaagactagagttccaaatagcactccctctgctccatcccacctcctggcagagtttgggctgagccacctgaggacattcttgagggattaccttgtctccttggtgaccaaaggagtgagcacatcagtaagatgtgctcagagatggccaataattcaaggccctgacttggaatgtctgcaggtggttcctctcaggaactgtctttcctggcaagggtaggctgctatctcaggggacgcttggtcagacgggacagtggcagcttggtcaccttcatgagaatttcctcctattgtgcacctacaggagggaactatgcagcggagtgactaaagaaagatgctaaagttggaactggggacaatccaagttggcagccgctgaatcatgaggagattctatgctgccacttgttcctccaccaagcaaagtgactcagttgtttaaatcttg

SEQ ID NO: 46387 - DNA, 1970 bp, Bovine  19866880502546
  misc_feature (1)..(1): n is a, c, g, or t
ngtcttggtgggaaacttagaaatttgcctttgactgaagcaggaacctgcactgggatctgaccacctggacacccagttctaccctactgggccatgactttgtcaataggacagaagccccaattgtcttctggagatgctactgccctggacactaagtgataagattttcatgttttctaaccccattcttctatcctgacttcctagtcttctaaattgacatctacaggaaaaacaccacacgtaccaggagccacaaaatagacagggtctgatcgtcgtgcggagctaaacacatcttgatgggcgctgtgaccactggagctttgcaggaaatccatttctctggacagccttccagccatcaacatctggaacataagtaaaaccactcttcattagaacaaaccttatcatctgttgagttaaacaaggcaagacttgattgctactcactagcaatgagtgagtaacaagtgggttttctttatatttccacattcgtgcaccatcctcagaattccctatgcacctctctacttggctttcaccttcacctactcctgtttacacctgctttaacttcttgtctttgaatctgactcttggaataagagaacatgttttcatctgcctgtaatttgcatttttatttcatttacataaacacggtctggccttagtgaggttagagggtccagtatgtccagagagaaactcagagttgagatcatattaatctcccatatttttagagtgctttgtagcttggtaactaatttcacataaattaactcgtttggcatacatgaaagaaataatattagtgaatgtgaattccattccaagacttgtgttaagcccctcaatccaatgattcttttgtggttttaaagtacattaataggaaatgcagggagttgaaaatctgttctctttttagttatttttataagtcattcataagctggtctgagtataacttttccaagacacgaggctctttcttattgcctgacaaaataacgtacatttaaagctagaagagagtcatcctgttaaaggtgactcaaggaccccatcctgcggacagaagtctacaagcacaaagccctgtacagcagtaaataaaagcaaaacacctagaaaacagaatgctttaccttgatggaaggtagatgtgattttatggacactgtagtctccggagctttggcagctggctgaatgcccatagcaaaaacactgggtgcagccctcagggtttctcccatccaggtgatagtaacctggtcggcacctgcaggggcattttggaaattgggacaatattataggctatttctcatccccacagagaatacggtgactgatcatttctactttctctcccacccagcccattaattcccaaaggtgagaaatactcagttgcacataccactctcactcccaaacctccagatggacaatcacaggcccccattaagaaagcaagaagaatattcactttctcttgctctagtagagcagcaacaaattgggcgtgatggtctggaaacggtgatttttcccatccttggtaaggaattcagtgggcaagatggggaggggtcaggtagggctgtgtagagttggcccagtcctagagcaagtgtttaaaggggataatagggtggggaagtgggggccatcaaaagacaggcaaatgcccctggattgggaaaatcccctggagaagagaaaggctacccaaactagtattctggcctggagaattccatgcactgtatagtccatggggtcacaaagagttggacatgactgagcaactttcattttcacttcacttccattgtgcaaaatcagaaaggcaggctagctgtgaactgtagatgctacataaaacagcagtaaataaatatcttttttttcctctatagatcaagggtttaaatactcat

SEQ ID NO: 46388 - DNA, 1852 bp, Bovine  19866880555491
  misc_feature (1)..(1): n is a, c, g, or t
ncacggagcactgagctgggccccctgtgttactcagcagcctcccacaagctagccgtgtcatgcatggcagtgtacgtacgtcgatgctactctctcaattcatcccaccctctttttcccctgctgtgtccacaagtctaagttgatcaactggcatatgtttcctggctttgattctttctacacaagttattgtattttactgtcttggagagggaccatgtagtcagtaggaaaagcagtgaggtaatgtgactgtggttttctcacccctttgctaactgtatgccttgttgctgctgctgctgctaagtcacttcagtcatgtccaactctgtgtgaccccatagacggcagcccaccaggctcccccatccctgggattctccaagcaagaacactggagtgggttgccatttccttctccaatgcatgaaagtgaaaattgaaagtgaagtcgctcagtcgtttccgaccctcagtgaccccatggactgcagcctaccaggctcctctgtccatgggattttccaggcaagagtactggagtggggtgccattgccttctccaatatgccttgttagcttgtcttaaatcagttccccagctataggagttctgatgtttcttattcttcatgcctcagaaactcataagactaaatgtgacagaaggctgtgggcattcgccaatagatttggtcagttggtatccttatgcagaagcatcagttatgtgtctctggatataagagctctgactctgatatacagctaccaaggaagggtaactgatctgcctggtagccaatctgacagtgaggacagaggcagatggctcctaccctccctgctccttgcgcctccctgtaaaagctgtgatctctctgaaaccttcctggtttcaatgctgaatattactgagcatgtagtgatgtataataatgattagcatttattatagcacttactgtagtgtgccatagtatgccaagtgttgttctaagccctttagatatattaaatatattaacacatttaactctcccaataactgtaaggtagacacttctattatctccattttacagatgaggaatcagaggcccagaaaagaaaaaatcactggccccaagttacactatttctagccactaaactgggattcaaaacatgaaaagtctagttctagagtttgttttctttaagatgcccattgtgaaagaaaaagtcttagattcagctcttgagaagcttttattcaagaaaagctgtgataaagttgaagcctgtcaaagatgcaagtgctaaacacagagatctgtccagctatttacactacagacggctaaaagattcctgacattgtgaccgtgagtgggagttgttattggagttccaagtttggatatggtgaaatcaccatctcttctcctttctaattatacatggaggcttcacagagattagccttgatgagctctctgtgttgttctatctgccaggtgtttggcatggagtaagcagtgattcttaatcaggggtgtgcctccctgtctcacgtgaaaccttctgaaaacagatgccttcggctctgcacttggctggttacgtctgtgttggtgatgctgaggtgcagtcccaggagagaactgaatgtgggcgtggcacctttgggtcattatacgtaatacaccactctaaaacttaatggttttaaacagccacgatttcttgtttctcatgattctgtgtcggcctgaggtcactccctggccagtcagctgggatgggaagctgggtttatcctctccctgtcatcttatctccctcaaggaggctagactag

SEQ ID NO: 46389 - DNA, 1438 bp, Bovine  19866880572229
  misc_feature (1)..(1): n is a, c, g, or t
nctccaactacagaacctgtgctcgagaacatgggaatggcaactactgagcccatgtgccgcagctactgaggcccgcacgccacagagcccacgccctgcacgagagaaggcaccatgataagcctgcctgcatgctgcaactagagaagtcccgtgcactgaaactagagcagagcccatgcagcaatgagggctgccaaccgaaaaaaaaagaaaatccctcttatcactctgacataacaactatggacatctgtctgcatcttaatcatatctacacaaatgggtcaagaacagggtatgtaagaaagctagtaactagtgccctctaaagctctctctgaagaagtctaatgagaagagtgcaggttcttcttcacaggtatcagttacaatgattcatgactgggaaatccgcctgcaatgcaggagctgcaggagacttgggttccatcccggggtcaggaagctctcctggaggagggcatggtgacccacttcagcattcttgcctggagaaccccatggagagaggagcctgatgggctacagtccatgggtctcaaagagtcagacacgacttaagtgactgaatggcaacaaatgactggaaaggtggcacaccatccacacggcctcaggatcatgaggagagccaaagagcagagcaaagcttcccgctgtctctgtggttccacacttcttcacgtggtcttcagttgcttcagctgcgtccaccctcgtgatggcctgctggtcccccaccttactcactcctcccttatgtttgagagcgattctcgtctgaagagtgtacccttagctgaagacgtatttgaaaggtggaaagacaactctttacatacatctgctaattcaggaagcccaaataatttgaaaatagtcctcgacagtcattaatcaagtacttaatcaagtactgagacaacaccagggggtcgggtaaactccagcccgcaggcccgggcctatttctgtaaatagttacactggaccacggctccgctccgttcacttgtttacagactgtccccggctgccttccaggtccaagagcagagcagctgtaatggatactgtgaggtctgcaaagggtaacacatttactatttggagctttacagaaaaagtctgccagcctctgtaccacaccaaagtatcccaatctgagacaaaaatatatgtgtattacaccatcgggtgtgtgtgtgttcagtcgtgtctgactctttgaggctccacagacagtagcccgacaggctcctcttgtccatggaattttccagggaagagttctggagcgggttgccatttcctcctccaggggatctttccgacccagggatcaaattcattatctcttgcatctcctgcactggcaggtgatatactcacccacactggattattctca

SEQ ID NO: 46390 - DNA, 909 bp, Bovine  19866880575388
  misc_feature (1)..(1): n is a, c, g, or t
ntaaaggcagggatggtgattccaggagaaggtgtgagaacttttttgatttctgactttgggccatgcatctcacttagataggaattttcttgacatccctgcctcctgatcttcccatcttgatgcctctccaggtccctactactgtggtgtgggagcggacaaggcctacggcagggatattgtggaggctcactacagggcctgcttgtacgccgggcatcaagatcgggggcacgaatgccgaggtcatgcctgcacaggtaaaggtctctagcccaccacctgccccacctagaggcatgtgggggcttttgctaggaagggctattgtggtgcccactccttaacccaaagccctcaaggtggcttggagtagagatgagcaagaagcaagtgtcggcttctgggttggggtgagcagctggttttgccaaggcccatcttctcgttctctctagtgggaattccagataggaccctgtgaaggaatcgacatgggcgatcatctctgggtggcccgtttcatcttgcatcgtgtgtgtgaagacttcggagtgatcgccacctttgatcctaagcccattcctggaaactggaatggtgctggctgccacaccaactttagcaccaaggccatgcgagaggagaatggtctgaagtgagtgccgcctccagccggggccatttcactctgcaagaatacctgccaggggtttgatatattggggatgagtaagctgccttcccagttggggcctttagctcttggttcaaaaactgtcttctgatcctgtcattttgttcctatttggaaagttcccccaaaatactcttcaagtaggattcaaggatggtgatggggaaagttacacagatgaatgcttttaaaatcttagtaagaat

SEQ ID NO: 46391 - DNA, 887 bp, Bovine  19866880642984
  misc_feature (1)..(1): n is a, c, g, or t
nccttctgaaggagatcgtcctgggtgttcattggaaggactgatgctgaagctgaaactctaatactttggccacctcatgcacagagttgagtcattggaaaagactctgatgctgggagggactgggggcaggaagagaggggacgacagaggatgagatggctggatggcaccaccaactcgatgcacatgagtttgggtgaactccgggagttggtgatggacagggaggcctggtgtgctgcgattcatggggtcacaaagagtcggacaggactgagtgactgaactgaactgaatgtgttgattggacaaggttttggaaaacctagttactttgtttccaggataatgaggtctaacaacattactaatgcccttgtaaataagtggctgcattcactcctacaccaaagcttctatggctttcaaggttatttaatggcttacttacctaccacccacagcaaaatcagagattgcataataataggatttgagaactttggggtcattaaacacttcatctccaaaagtgttcaggcgattgagagttactctgatgtcagtggcagttacccattcctgtcagaaaataaaaacacagaaaagacggtaaaggcactgaattattgtaagagacatgtatgtgacaaaatcttctaaacagtttatgtgtcatttaacttatgtcttcttctggcattaaatctattaactactcaaagacttcctttaatatccttatatttttctccttgaatcttcccttcttgggatctaagttgttacttcaccactcagaatcccccaaggcagaaataatattaatttcgtcacaaggctgtagaaaggcttaaatgaaatacgcttttcaatactca

SEQ ID NO: 46392 - DNA, 1179 bp, Bovine  19866880658094
  misc_feature (1)..(1): n is a, c, g, or t
naaaatactgcttcagaggtatagcatatacctccatttactcaaaaactttgattgatgactttctgtacattttgtggaatatagaggacctgaattcaggatgtttgtgttttcatcctccgcttgtagatgaggatgggtggcgtgcagaacaaagggatggctctgaagcatcatttgagtggtcctctgagaggcaggatattgccgtcatctcagacagctactttcctcggtacttcattgcccctggtaagtaaggctaggaagccgtgtggtgtggtgtgtgatggtgtttattcctgacctcacgttcttgctcaccattgtgtctgccttccagcaaagttcttgggcaagcaggtgttgagttatggtcagaatttctccttctccttccgcgtggacaggcgagacactcgcctctcggcagaagacctggtgcttgaaggagctggcatgagagtgtctgtgcccttgattgctcagggcaattcctatccaagtgagaccactgtcaaatatgtcttcaggtaagacagttcggtttataaaatctgacttgaccagaattataaaagtggcttctttatctaagcgcctcaggcctcaaggtgtgtattaaagaaaaactttggggttctcgatgtgactttgtaaaagggaactttcccccttgattacctgtaccttttccagtggtatggtcaaaccaacagactaatctctgacgtggttagaccagcagagcagtgcattgtgggtggcatggatgactaagaaatactttctcagcacccagaattgtccttacagaggttaatgtgccccttcctttttctctaggctccatgaagcgacagattacccttggaggcctactcttacccctttcgaatttcagaaactcctgaacaatttgacctctatcaagattcgtgggacatacagtgagagaagtaagttatgatgtaattaagacaatcaatcaaaatgatgattaggaaaaaggatccataatcaaaaggttatctctaaagtcctgattataaacctgatcctaaagaagtgatataataaacttcctcatcatacatgaattgtgtagtaaaaagtaatgcattttgaaacgtctcttgaggacctggagaaaattagacaaaaattagtaaatga

SEQ ID NO: 46393 - DNA, 1487 bp, Bovine  19866880667993
  misc_feature (1)..(1): n is a, c, g, or t
naattatctagcattactcagaagaaaatttccatttttgatctcttccccaaaatgcaagaagagctattttttttatgaaacaatatcggaaaattataacgagaaaaaaatgggacattgctagtccaagcaccagtgataaaacgcttgttgccacctgtgatgactttaaagactgtgtctactgaaggcaaggccttagcaaatgtcatacctgctgcagtagatcttaagccagtgtggggtaggagtggagggtacacagagtcaaaaactgtcaggctgcttctaagtgttcatttatattgtccaaatcctggacagtgaatatgtgtggtaatgaattctaaggatgttagatcaggaggcaggaacataattttagattgggctgaatttatcacttggcatgtatccataagagatgctggattcagtgagctaattcaagcagctgagaatagttctaaatgttggctttgatttaatgtattctatgctgagttaagctgagataacagaaattccttggtattatatgaaacagtgattctcagcccagtttgacctcatgccccctttttataataattttttgtaataccccctttgttctgaaatgaaattcatagttaatataatctacttatacatattattttcttaaatcaatatagtattctaactgtaacataaagaaggaaagggaaggtattactatttcagtgtgtaaatgcttaaacacaactcctaccgggagacacagcagcaaactagccagtcatatgtctacatctatgtgtggaatcgccatagtaaagtagctacaaatataggctgacatagatgtgttgttttgaaggtaaaagatcataggtagtcttgtggttagtgacataatttttccaaaataatgaaacgagtattggtgaagttctgaacaaaacaaaatagctatagcttcatttacatgattcctgctttccagaaaatttagtgtatattaaaacctcatacatgaaaaaaaaaattcacaaacgagcctagtttttgaatggctttcacgtgaaggtcgatttttgtgaatgtactgtagtgaccgtatttgacacaattacacagtgaaacccaagattctggactcctgatcacctagcctgaaagtcaacatttttttaagccttttattttatattggagcatagctgattaacaatattgtgttaatttcaaatgtacagcaaaatgatttagttacatatatctattctttttcacgttcttttcccatttgagctgttatataatattgaacagagttccctatgctatacagtaggtccttgttggttactaattttaaatataccagtgtgtacatgtacacactaaaaatcaatatttagatttaaatatactacctgcttctccctctatcttcactgctaggatcaaaaaaagaaagtatcagcatttaatgatca

SEQ ID NO: 46394 - DNA, 1597 bp, Bovine  19866880711332
  misc_feature (1)..(1): n is a, c, g, or t
ntgggtcatttcaagtagtttactccagtgaacaaagtaattatgaccatctggtgtgtatagtctcttggtgcattcatgcaagagtttcttgtttccaataactgagaagtgaaatttctgagttctaggatctaatcccacttctggtccttcagctaacctgaaaggccttcatcaagattaccaaagccgccacagtggcagatgggtaattttccgttctcattgtgcttgggccctcagcggtttccaactcagcttttccttccctggatgctctgcctgggtcagcatagcacagtcggctgacatttctcatattccaacggttgcgccttcctggtctatatttccagctcctcttaatccactctacccctgcctctcaacacagagttccttggaatccttcctgagccctttcttttttcactctctacccatatttctctaggtgaacgcatccatttctatgactttaaatgccagttatttgttttagacactgatttttttggtcctcagctttcctctctgaactctagttgtatgattaactgttcagatgactcagagtcttctcaaatttagcatgtttgaagtgaacgtataaatttttctccatatatcctagtctacgcagactccctcatcctagtaaacaggatactagtctttcagttgctacagccagaaacctgggtctgactcctgatgcttccctgtccttcatccccacccatctaatccatcactatgaactgtggactctacctctaaatatatcctgaatctgaacctgcttctctacctttattgccactgccctacctgaaccactttcatcttcagctgtgcttctgcaataccataactgatcataaacactgctgttcttataatccttcagtttattcttcctaccgcagctggtccagatgcttcagtcacacaggcctctgtcagttttttttacaacatgctaagacttgccttgtagggtctttgcacttacattgcctctacaagccttgttcctcttggatttcccatgaatgacttcttttgatcactggggtctcagtttaaaagtccccaactcagaatggcttcgaaaagaacacaaataacaagtgttggtgaggatgtggagagaagggaaccctcatatgctgttgatgggaatataaatcggcacagccactgtggaaacgggtatggaggtttctcaaaaaactaaaaacagaactaccatatgacccagcaaacacactcctgggtatacatccaggaaaaacaaaaacactaacttgaaaagatacatatacctgcaatgttcatagcagcgttatttacaattgccaagacatggaaacagcccaggtgtccatcagcagataaagcagatgtggtgtatctctagtggaatactactcattcataaaaaaagaatgaaaaggtaccatttgcagatacatagatagacttggaaggcattattctaggtgatataaatcagacagagaaagacaaatactggtatgatctcagttatatgtagcatctataaaacacaacaaagtaatgaatataa

SEQ ID NO: 46395 - DNA, 1848 bp, Bovine  19866880737071
  misc_feature (1)..(1): n is a, c, g, or t
naatataaggcaagtgttctaaaggtgctccatgtatggtcgcttgtgtaacccgaccacaacccagagagatggctcttgttgccactgtcagtgaggcattcgagctgaggttcaagaccagtgggtgactggctgcatcctatccaatgtcaccacaccctccatgacaactctgatcggacagccccaatatgagacctcccaacccatctaccagaacaacaacatgcccagcaagcccactgcagccaagatcctggggaaggtgggagaaagcctgagctggatctgctgtgttcatccgccagtggagcgtttcagttttgtggatgacaatgccaacctgggcatggtgatgcggtacaaggagataggttcctgggaggtaggatggggtacatgggcagtttccccctcagagcttcttaatctcattcaaaagatacggaagttgagttcattgccagccagcgattcttttcttgcctgcaacaccatgcccacagaagatcccctaccttccttagcagaggggtccaatgcttggagccatgtctgtgatctcccccacagccttgggtgtacactaaggccctgactgtgtgaaggcagtaaaggccccaggctagagcaggtggagggtggttacatggagctgtcaggatgggaagctgtcaggggatttctgactcccctaggagtcctgagcagccctaggaaacaagccaggaagcccattttcccaaggttccagagtagctagagacagaagtgtctgaagctggaaaaacacagacagacaatgagaatggagctggagctgctacaggtcccaggtaacaaggagggtcagtgacagtttggaagtccccaaaggactcagcatggatgagaatatccatctttgggtctctctctcctacaaacccaaattcaactctgcaggagagctgaaggtccagccctcgttcttttgactctggagccaactaatgccattttggagaaggaaacagcaaaccactccagtactcttgcctggagaatcccatggacagaggagcctggtgggctacaatccatgggtttgcaaagagtcggacacaactgagcgactaacatatacacactgccgtttctcaggtttccaatttccaaccttgaaccaatagggatggttgaggaggaagggaggcagggggccagggtgtcatctccatggtgctaggatcgggggcagctgggtgtccagcgggcatgctcaatcttcaacttccagctgcaaagatactccaggcccccctcctagggatgaaggggcagggctgcactgggttctcccaggaggcctagcagatgtgacatcatttctaggaacttctctgggtcttgtcctctgatccctggtagtgatgcacctgagttgactcatactgacctcctgaaccatttgaaaattttcagaaattttaccagttggttgttaaactcagtcaaaaaaattaaattatactaagtagcagttaaatgggcttcctgggtagctcatctggtaaagaaaccgcctgcaatgcaggagaccccctcaattcctgggtctggtagttcccctggagaagagataggctacccactccagtattcttgggcttccctgatggctcagacaataaagaatctacctgcaatgcaggagacctgggttctgtccctgggttgagaagatcccctggaggagggcatggcaacccatttcagtattcttacctggagaatctccacggacagaggaacctggccggctgcagtccatggggtcccaaagaatcggatgtgactgaagtg

SEQ ID NO: 46396 - DNA, 1835 bp, Bovine  19866880887301
  misc_feature (1)..(1): n is a, c, g, or t
ntttcacccatggaaagtgatgggataaatttaacttctttcccaagtaccaatactttcaacaaatgtaatggccctagatttagcaaacacaggtatgaagagtaacaataagctaaaccaacttcttaaatttcactgctagctactggcaggagttgtgaaccatgaagtctaccaagcgaagtactcttagcaatatagatcacttcagcctccaataaaagaatgaaatacgagactcagagttctgtaaattttcatgaatatgactgagcctactaaccattaagctctgttcaattctgccaagtggttactacacagacaccactagtctctaagcaatatgaagtgtacataacaaagaggcatccgaattccaattagattctaactccttagtgtggtattcacggcagtggatggggctccagtgaataatgcagcagtccccaacctctctggcaccaggaatcgatttttgtggaagacacttttcccacagactggggtggtagtggcatagtttgggaagattcaagtgcattacatttactgtgcactgaatttctgttattacgacatcagctccacctcagatcaccaggcactggatcccagagggtgggcacccctgacttaatgcatctgcctctgcaagtataatcaatttaacttcacaaatcataagcctaggatatactactcttcaaaagacagtgctataaaacacattgtttatgccattgaattttgccatatttcacaaatagattagcagctgaattccactacatttcaattctaagaattcaggtgagttcacatctgaaaatccataccagtcgtctacaagcacaagctgtccatcagactgaactttcttggaggcaaagagaagcagctgcaagggggtgactaaggtcatgcctttagcagagatggcccgggttcgaatctgaaggtaaagaggcaagaggagaaagttaacattccaactgtcagtcaactaccatatactaataaatggactaaaactcatgttcccactacacattaataaagtaatctggatttcaaatgtaaaagttttctaaacctctcttttcttaccttttcaccaaatacaaagaagggagatgggtacttcatgtcttggctgctaaaaggacaattaacagatgacttgtggataagtgcgttacgcccttcagtggtgagaatctttctcttttccttatggtaacacacattggggtatacaccaaaggccaggagagagataacaacatccagattattgtctggtccagtgttagtaaacacttgtgtcagtaaacactctgttaagagaaaggagattaaaaaaaaataatcaagtatctggctaattctaacactgaatttaccaaaattaaatgacaattgtaagaattaactcctccctcattctctttttcaaataacccatttaactgtctctgttcttagcatttttgcactcagattaatgcaaggagaaattctgctgagtcttcaccattttagtaaaattaaaacgtctgttttcttttgtagacacaatgtaagcttgaagtacttaaaaacaaataccccaattaaccatctcctctcagattagagatagactggtatgaccagtattccacctgctgctcttaaaaagctgttccttctgcagaagatgaaatgatgaccaagagcaacacactagaaaaacactgatgttttcaccccaacaatgctttatgcccagcccatcacaggaaagtatcacggtaagagtaggataaacttgtccccaaaagctg

SEQ ID NO: 46397 - DNA, 1150 bp, Bovine  19866880902513
  misc_feature (1)..(1): n is a, c, g, or t
nttagagacggaattctctcccaaaagaagattttcgtcgggtcctcatacgttttcagggtgattgtgggacaccctccacgtcttcataacctaatatatgtaggtgctacctaaccctccatgcacacgtgtctgctcaaatacagcctgaaagaaagtttatttttatactgagtggcaatggtagctggacctttctggttattactagaggaaaatctagtgacaaatccagcaacctaggtttccccccaatttttcacaagtttcccaaaataaaattttctttacattttaaggaagacactttctgccaagaaggataggtgtggtctattttcatgtcccttttttgctgctcaaaattctcacgtgaaagaatatgttttgtaacagttcaactgcacgcaaatttccagctgggagtaatgtgggcaaatgacgaacgctttcacaataaaagtctgctcaagatgatagttttggagaacagagaccgttcgtttctgttatttcttctattgaaagtactgttgagccaattggaataacttttgtttacagtctagctgtgaaatactgcgctggggctgacagctcccacggagagaaacagcattgggaaaacacctgcctgccttcccattcatctggaaggacactgtgttaaatttgcagtttattttgaggaaaatattagtattaatatcatgtaactatagttcatggaataattacaacattcatcatatttgactcttaagcttattcctttagtcagaagtcctggatttaaaaaaaaaaattatccctaactatagattttactccagagaaggcaatggcaacccactccagtactcttgcctggaaaatccatggatggaggagcctggtaggctgcagtccatggggccgctaagagtcggacacgactgagcgacttccctttcacttttcactttcatgcattggagaaggaaatggcgacccactccagtgttcttgcctggagaatcccagggacggggcagcctgtgtgacggggtcacacagagtcggacacgactgaagcgacttagcagcagcagcatagattttactcatcaaagaaaaacaaattacactagcatttattgacaaagtt

SEQ ID NO: 46398 - DNA, 838 bp, Bovine  19866880915446
  misc_feature (1)..(1): n is a, c, g, or t
ntgcttctgatagagagaagtcctcacattgatcagtgctggaaaaagagccattctttccttcttttatgacataaggaagcccatgtttgttggggaggcacgtatacagacgtacagtcacccacagacacaaaaaaagactcagcttctggctttgggtgtggctcaaatattacatcatatacctgggaattatattagaacacatctcagtatgattcagtaatctatttggtctaatttgtgactagagtattctagaatctatggtgttatttctacactggtctataatagattgctaaatcttgtagtggcaaatttctctaggagaaaaaaaaagtcaaaatagttcagccactaagaacttaaatgggaaaaaatgttcctaggatggcctcagcatcttgatttcatgctcctgactttcccataaacactgatcacaaatcaacattcttcctcagcttcttgggtcagtggagttaaaccagtggctcccccagttcggaacactcagaatttaaacctacatgggaatattcctacatgggaatacactccaatgcatttctatatgccaatttattatacatacttgaatataagatgaatataaggccacatttaagtcttttcaaaatctctgttatacagcactttctcaattgttttatttttaaaataaagtattatttggggaagacatgttaacctgaaatgacctcaaccaatgtttcagataatttttaaataagaaagaggccaagctatcaaacacaattctcctaatagttcatctcacaattgcgagcaccgaaagttatcctaagta

SEQ ID NO: 46399 - DNA, 1291 bp, Bovine  19866880939103
  misc_feature (1)..(1): n is a, c, g, or t
ncaagtatttaacaggagaagaccaagttggacaacttgtgaatttgtatggaaaggttctaccaatgacaaatgacataaagataaggttcaatgggcagccgaaactgtgaagtggaattcacagaaactggagagatagcttcaccgtaacagtgaaagtcccttcctcatgtcaatgaaaactgaaaccacagaggatgtagagattacctagcagaaacaaatcctaaggcaagagtcaggagaattgagttgaaacattagggcaacacctgtacacaagaaacagtgaacgaagaaatcagcagtggaaatttagaaatattgatctataacaactgctggtcactcatgctctgtcttgctgaaatgactgccaatgaatccataatggaagaagttttccttggaaaagaaaaaagccccctttaaaatactccttctcttcttccattggggttgtcaaatgattagaccaagcttaggatgggtacattaagttaatctctaggaaacaagcagagtaaccaatttatccactctgctcttcagtcacagtccaaagccctgaagtctggcagaggcccttccccattccctaactggagcagaatccagggtcaccgtctctctctctctgccaatgatgctttcttgttttccagaaacttgacagaagtcctcctaaacacacagcacttggagttcttcagggagttcctcagagaacggagggctgaaaccccattgcagttcctggtcgccatacagaagatcagcgttgagacaaatgaaaagatttataattctctctttgaaaacgtaatcaagactttcttccacggcaaaaactctcctggtatgcattctcctctcctgaaatcgtttcctttaccctttagaatcttaggtttggggaagagactgctgtctccctgagaaagcagaacagagcagcggccacatggggcagtattgagacaaagctgaagacggtgaaagcagagaataataataaatccacttttaaaaattgaagtatagttaatttccattagatttgtctcagatatagggcatagtgattcaatatttttatagagtataatccacttaaagttattataaattactatattatatattattatgtattatattatataaagttaatataagactatattccctgtgctatataatacatccttggtgggtcgtggtgaagtcacaaagtcatgtccgactcttgcaaccccatgaacaccagcccaccaggctcctctgt

SEQ ID NO: 46400 - DNA, 3330 bp, Bovine  19866880947375
  misc_feature (1)..(1): n is a, c, g, or t
ngttattttaggacacatctattgagtactccctattaagaaggaatattatactgttctcttcctcttctaattttaatgcaattattgttagttcttctgttggtttgctttgttggatcttcataaagataatccttacatctttccttgttcagacaactttagacactatttcctgataccctgccatattagatgaggattttggcacatctacccttctgctttttcttcctcttctttagctttgttaagtttcagtgtttggatttcactgatactctttgtattgaccagtgttaacccttacatgaaacttcttttacctgtgcttgctagggtgagtctctattcttcaggatctaaagagttcagatggaaatgctttggatcgtattaatattatgtatataattaaatatattgtcttatgtactttgaagttatccagagcatttccccatatctttatattataaattatcatccttcatgactgaagactattctaatatattagaaatgcactgaaaaaaaaaaaaaaaaagaagtgcactgaagccttgactttggtatttagccaaacatgctattcacctttggttcaggtttattctccgaagccctgatatgtgtatgtctgtatcagtatcatttctgatgtctgtgagcttgagtgtgagtagtgattgtgtaatcacttatttaccatcataaaatatcagcataacagtatctgtaaaatgaacacatcatattattcagatttgctattaatgttgaaataccgagatattgaaacattcaaataaaggtaatttttagtttagatgtaacttggagtaaaaaatgtttttatgcattttactcacttaaatgtctcagtcaaacgaagtgtaaacatatatttttgcaagagtaaaattctggaaaaactaacatgactgtgagaactataattttatatataaaaacactcctaaggaatttcaaatagtgaaagaatgtcagtgttataataatgggatatattagctgaattcctttagagaaaactatatgccttcagaagctacaagtacttataacattaaataaattaaaacacaaagtggagaaatgtagaatatatgtcagaattcccatttttatagaattatttggtattctaagattagaactattcaacaaaataacctgtaagaactgtatttagctttttagtatatatttttattggaggataattgctttacaatgctgttctggcctccactgtttagcattgagtttttagttgtttaattccatttaggtcatgagtttctcaagtaaaggttctatttggaaattgctcacattttatgaggatgaataaaaagcagaatgtcaattttattgccttgaaatgtcaggaagagaaaaacttcaaatcataaaaaacagaattcatcataaatgatcttcaatccaatacttataatctactgttctacatactctctctatattaactcacttaattctctcactgatcctgtgaagtatgggtattattagcccattctacagatgaagaaactaaagctctgagagattaactcatttatccagggtcacacagctaggaagtggtaaagcagaactcaggcactttgacttgaattcattctcttaaccaaaggtgtcatttcttaaatgagagatacctgaaaattgcttagatggggtttctggcacatagtaagcatcccataaaagttaactcttaccatcagttgctgggatgggatgggaaatactggagcaagagagagggaagagccaatgggatattcgtcttttactgtctcaacctctagaagaaggtacctggtcccagggatccaagaagccagcttcagccaggagggtccaagataacgaactcctgtattagaagactcaggcctggctgtagggcccctggagttcaaggacctgctgcaatgcacagactgttgtggctgggctccttccccagatttcttctcattttgtaagggtgaccatgcagatggctgcaagagtttctttaacattgagtgcattactttctggctttgctgggaaggattgcagctgaatggaaatttcagtggaggagcaccttagcattggccttgggggttgtcatagactttgctctacccctaggtgaagatagggttacttctggtgaatactggcaagcattctgcagagaaagctttaaaatacaaagctattttctttaaaacaaaggtttagaaacctaagggtttttctaggattggcattgaatgtacaggcacaaatgaaattctttcctaagggcaatctgtgccagcttactgcaattaacaaagaagtacaaactgcaagctacggagaagccactgagtaggagtcccaggcccagatgttaaagattcagagaaaagtcaagcagtgctaatagcagttgtggaagccgagacagctatttcacttgtgcctgctgctgccgctaagtcacttcagtcgtgtccgactctgtgtgaccctagagacagcatcccaccaggctcctctgtccgcaggattctttaggcaagaatgctggattgggttgccatttccttctccttacttgtgcctaagtgttcacaatttattaactagtttctctgttgtgcaacctttaaaaggtgtgcaaatcttagttattcatgaattgttaacattaacgttctattagtttagtggggttgtgtgttgtttatttttcaagctcagttaatgtgtctttcttttggctgggcctaaggaaagcctggctgattgagtcacatgatctcaaccttgggcatcactgtgtagccgaggctaccagagttgtagacagatagactagttgaaaatacactacttctagaatcccaagaataccagccatacaagctcaaccctacaacatggtgctgtgtatcagcaagttcatttttttgtccttctcctgactcctagggttcaggggctcccacagctaccctggcccttcttactgctcctcctcatttgaggggctcttggatcccagacccagcattcatctgcattcatatcaccatgtccccgcttgtgtgttctttctcgggactctgccggatgactagcttattttgctagttttgaagatgtgggaagatttagatgttcttcttggtctaagaagtgtacaaagaagtgttaagacacatctagtctgagtccagagaagttagcaacagccctgtaggggagtgtagtgagcatctgttatgtttt

SEQ ID NO: 46401 - DNA, 1508 bp, Bovine  19866880965252
  misc_feature (1)..(1): n is a, c, g, or t
nctggaagcccatgctcagtcatcggcgtgatggtcgcagcaacaagaccttggagcttcttctttggggaggccatcgagttgcttaaatgtctggaaaacatataatgtccttcctgtcttcaagaaatgtcaattaatgataaaactctggggcaaagtccattcctacacagtttagaactgtgaaaaatgcgttacaagtgtacaaacacagagcaaatgagaggaatgtaaaatgtgagagctttacactataaaggaggaaactatattttaaagacaggagagagggagacaagagagtaatgttctaggaaaataccattggaaaggactcccgacttatctatacagatgaccaaggcagtttgaaacctcagagagcagggatgaaaaacagaagaagaaagaatatgaatcaaattcagcaaggtcaaagacattactcaagttgaaatatggtcaggagaaaagggacagtcttatgtcttttcataacttcatatggttgaacaagaatctccccttagaccagtatttaagccttaaaaggcttcagtgtgagctacataattatctttagatttacctaactatcctttcatattctagttttaatcagtttttccctgtttccctggctttaggaaatcacatcacaaatactacattcacctcttccccactagaccaagctcccccagcacaggaaatagattcatttatctttgctttccctgaactcagtgctctgttggacaccttgtgttcaattaaaaagtgatggatatgtgagtgattgggcttccctggtagctcagatggtaaagagtctgcctgcagtgcgggagaccagggttcaatccctgggtcaggaagatcccctggagaaggcaatggcaactcactccagtattcttgcctggaaaatcccatggatggaggagcctggtaggctacagtccatggggtcgcaaagagtcagacacaactgagtgacttcactttcttctttctatgtgagtgattgaatgaggtatccagattgtagctggatgatgactcccacagagatctctgctgagacaatgaacctagcacacactcattaggggtaaaaggatccctcactacctggcagagaatgtacctgctcataaccagcataaaaaagctaagaagttgcccaaaacaggcaatgagaggcatcaagcatcctggttaaaagcctagattccacaggaggctacttgcttcatctcctacctctgtcatttaactagttatagaagcactattaatttttgagctggaggacatgaaaatttgaagccacacatgcaaagtctaacaattgaagaagaaaataaaacataatcagacagtatttggtggcaattttacaaaagatgtttggcttggtgaaaagttagtgatgtctataattaacaagagagagtatataatacttctgaggtcacttttaaaaacccaatgccagattc

SEQ ID NO: 46402 - DNA, 755 bp, Bovine  19866880977984
  misc_feature (1)..(1): n is a, c, g, or t
ntaacaaacatgatgtcactaatgttatcatcctccccacgggtagccagagactggtttgtacagaatgaagcccgcctgtaccagccaggaacccatcatctgaaacagaaaggtctcgatcacagcgaagttgaaacgtgtctggagcccacagcttggcggtgaacaccagcatcagcagcaacaccaccaagatgagcagagagtgaacatgcatctccacccccacggagtcctggacatgcgacaccaacagcagcaggagcacataaaaggtcagcaccaagatccctttctctaggggcacacagcgttggggcagcaagtttttgctcatgatgtctatacagccgttgagggtgaggaggatgaacatggtgaggtgctgccactgtttggcgtacatgaatcttggtggcaggtccctgttcatcagcgtcaatcctctctcaacacagctgatctcatacgccatcaagccaaagccggccagcatcttcagcaaacctctgtgggacattttccacagcctggcccatctccccttattcttgggaggcaaagaaggatccgggaaagagtcgctgagtatcacagctttggagaccactaccgctcgatacagtccgtatgcgagtaggaacaaccctggatacacgtgaccgataaaggttcccattgagtcacaaatcgatctaatgaaagtgagaagagtaaaacacaggcacgtccttctagggccacctcaaggt

SEQ ID NO: 46403 - DNA, 1506 bp, Bovine  19866880991221
  misc_feature (1)..(1): n is a, c, g, or t
nctcaaaggagttgagtgatttgcatggggtcacacagtaaataatacaaaaaatgtactaagtctagaatatctgccatgagaaacccacttgcaaagggccatgggcttgggagctagcattaggtctgactaacagatgaatgaattcatgaaataacaaaaatgaatgtatgtctaaagggtgaggaacttatgaattagctagtttaagaccatctcagccagatttggtaacaacttgtccactgagcttctaaagggtataggtttcaattcctggttccctaaattccaagtcaattgccagaaggatcctactgaccttttatcattaacttctcccctcttgaccctttttctcttgttaaggaaattctagggtggtatttaccacctcttcaaaaagaatcaaaggaaaacaaagcacataataatttcaaaagggcaaaggctttttcttttttaaaaagacctctctcccccacctctccccaccagcacacatactccaagtgctgtttggcgaaggtattctatgactcagattgcttttttcccaggggctttccaggagcaagcatgagggggagtgagtgtaaaaatacaggaggagataaagcttgggggtagtgagaattttttcccatcatgatgtgaacgattgccctcctgggagctcaagggagatgggagactcaagctggggagggaggctaggtggggagggaagaccaggggtcagagtcgagtgcgcctccccatcctgccccataccagctgtgctcaggccataaccctgctactcacatctgcctcgttccacagtcctgggatgcagaaggactccagaaggtcactgccacacagcagcaagatccgtagctctgaggaggggggacaaagttagcaaagggagagggaagcgttcaaatatcagccttcttccttttaccagcacagaagcgtcccatccctggggctccagagcccagttccagcaggcagcacgctgtgtgctgccctgaatcctctgctcagccctcccccaggctcatttacagaccactctcactccctgcaggaggaacctctctcctgcggaatggagcagacagagagtaactgtcctggtttgctgggactgaaggatttccagggtgggtttcatgctaaaccaggatgtctggtcacccacagtctaaggcagctacacgccttgtgtgaggtctaagaggctctcttttttgctctatgtcaaaccaaagtgcccgtggagtgtgacttctctgctgctgggcatcctctggggtttgtcttccatcacaagcgtgacgtgatgggggcaggggacatggagtgcaccctcaattcaccagctggctcagctcatcagacgtcttccctgtacatgggccactgtcctcagcaaacggcttgagaagcgaggctgcccccacctttccaactcccaggcacgtttccagcttatcactagtttttctt

SEQ ID NO: 46404 - DNA, 2366 bp, Bovine  19866881042387
  misc_feature (1)..(1): n is a, c, g, or t
ncttgcaacagtgcacttcaaatgacccccacacgtggccccccccaactctactgttcttgcttagcccctcagtgcacagtgtaatgcacagcataagaccacgtgaaacatttttgtttcccttaagagtgcccactgtggatgctatacagttattcaagtataaaaattcatttacgatataaaaactcattttgcagaatttctttatggaacaagatacaaactacatcataaaaacatcaattttattaattttctttgtacttgttcactattactaatcaaaaactatcatatttgtcttgattgttctcatccagtagagttggttttattgttatttctcttgagtctttccagacctcagattcggtctctgatgatgaaaatgtgttgtgtccctaaatactgggaaaaaatcgacaatgttttgagagtcatcccagaaggcctcctacatgtcacgttctgaactaaaacatctgcagacgaaggcgcctaaggagatcacttttgaaagagcattgcttagcttgatgtgcaattataggagatcatttgcccgcatatataaaggaaaataagttctaatattgagtgagattagacagaacttctagaattatttttgctactcaacgtagcttataccatatcccttaaggggtttgtctcttaacagtatggagagttggatcccaatcacatggtagtatttcattatttttgagaccaatatttaagaaatgatacagtactaagcagactattatagctcaggaatttttttctgatacaatattacattgatttagttcaaacaagagtggtgaggaaagcaaacccacaaagattagctagaaccccattaaagttttttttattcctgtgtgcctgtgcattagttgctaagttgtgtccaactctttgtgaccccatggacagaggagcctggcaggctacctcctctgtccatgggattctccaggtaagaatactaaagtgggttgccacttccttctccaggggatcttcctgacccagagatcaaaccctggtctcctgcattggcaggcaaattctttaccgctgagccaccagggaagcccgtgagattcagttcagcttctgtttaatatttggctaaagatgtttgatcattgtaggactcttgcctcaagaaatggaaatggccttactcctcatcattaaagtaattctttcaccagggaactgacttcttgttggctttaggtctactgtaggcctagtatcaactccatactcttaaccctcccgtagtaaatccgagtagtgttcatatgtatgttacacgattctgatgactctcccttttctgtaggtggagccttacaaagtgaacctttctcaagatttggagcatcagctgcagaacattgttcaagagttaaatcttgagatcgtgcccatagtaagcatacagatacttaagttcttcacctttgtgttgaccttcttcagtcagacaagcaactgatatttttggttttgttttttttaatagcctgaagatccctctgtgcctgttgcactcaaccttggcaaactggctcagtttgagccatctcagcggcaaaacccagtgggtgtggttccttggtcaccgccacaatccaactggaatccttggactagcagcaacattgatgaggggcctctggcttatgtgagtgcaacactgttgttgagatcagacttctgtgttttatttttgaacatatttcattaggatgtctagttttaaagaaatgaattcagcttcatttttttgaagctgaattacgcttttgtgtgactgttgctttcccattttataggctactcccgaacaaattagcatggacctcaagaatgagttaatgtatcagctggaacaggatcgtgatttgcaagcagtaagtgaagtatttaaacatatggtgcttaagagcttcaagacagtgaataatatatttttgccctttctaggaaggcaaattaaagatactaatctaactgataatcctagttacctctgaggataggagtagtgagttaagggcctgttgttcttaatgtaaatgaagagatggagtataataactttccatgtgtgtgtgtttttgtgttttctgagtaaagcgacttaaaatgtttagaagaaaggtaatgtatatgtaatgtccaggataaaaatgaggaaaataaggatgcggataaggccaaaagatattgttcagaaatttaatggaaagaggctattcaattagaggtgtgtgtgtgtgtgtgtatatgtatatacacttttatcaaaaagtattttcgaagtattaagccag

SEQ ID NO: 46405 - DNA, 1044 bp, Bovine  19866881118329
  misc_feature (1)..(1): n is a, c, g, or t
ntgatgtactctgcatagaagttaaataaacagggtgacaatatacacccttgatgaactccttttcctatttggaaccagtctattgttccatgtccagttctaactgttgcttcctgacctgcatacaaatttctcaagaggcaaatcaggtggtctggtattcccatctctttcagaattttccacagtttattgtgatccacacagtcaaaggctttggcatagtcaataaagcagaaatagatcctcaaaaactaaaatcctgcctgtgttccccaacagtaatatccaaaaatgctacatagttttaagcaaattgaagggtcaaaattgctttgctttacacactaaataaatgagaaatcatcatacaactgttacatgaacagagagaattcttatctgaacactagaacatcaaacacttttggaaggtaatttcaaaataggtgcaaactactgttagaggttacagatattttcctttattgaaacatcagataaatgtatctcaatttgtatatcctaccattttatttgaatttgttaccagaaaagacaagatttgcaagtgaaatttcaagccaagaactgggcatatgacttattaacccaaacctcatgctcgctaactcaataccagccctaattcaggctagtaggtcacaagcatgcctgaaatccttgagccaagagaaaaggaatgaagccaacatttactcccactcgtccaagctgaggcaaaaaaatccactctgccgaacatcagagttctaaactgcaaggaactgagtgatgtgtaagatttaatggaatcacacaaagaaagtggttaattataataccaaagaaataaggaaataaacaggcaatgaaatgtaagttccataaataaaacccatactttaaaaccaatattttttaagacatgaaaaagatgtctaattgttcaagacatgataaggaaaaaagacaccagttttatgggtagctatctcttggtctgtgacatctgtacactatttgagatctgactatttt

SEQ ID NO: 46406 - DNA, 2223 bp, Bovine  19866881123025
  misc_feature (1)..(1): n is a, c, g, or t
ntgtttttctctttggactttaagaacttggagtgtttgacccttagcatgtttccacttatctggtgttttaggaaagctctaaaaaggattagaaacagcactaaatagaagcaggcaaatttaaaaatgtaatgcctgttgtttgtttaaaaatgtgcagacaggcctgttttatgctagatcccacatctgtattatagggtgaacttgaaattactttgctgtggaaagaaggaaaacagggagatacatctggagaagtctcccttgacttgtcagggtggaatcactgagcagtaatgtgctgtggaaagaaggaaaacagggagatctatctggagaaggctcccttgacttatccgggtggaatcactgagcagtaatgtgctacatggctgcattgcaattctaatccgcctacatgcgtaagtcaatggggtctttgttccacatttgtggaagaatgcatgagccaagtcttggtgggagttcagtttagttccactgttttgtagattgggctaattttcaaagggatccaggcatttacttttgcaagtgagagaaacaagggcagaaaatccattcttggtactgaagaaattattctaaaacattgtgtcatttgccccttgtggacagggtgtttgattatttgtttacagcctggagattgaacctcttcatcttttgtggacctagaaatggagagttattttttcctcattcaaggatggaagcaactatttgagagccctttgttaagtcattagaaaagttttaaccttaaaaatggaaccttaatttctgttatcctttgcagattattcagtataaactcaccctgggactataggattaaacagagcacagaatattggcaaaagtatggtataggttcagagaattacttaatgtctttaaagaactgaggtgagttggaaaccagctgctattcatgtttctgacgtcatttgtccttgtgaaatcagttcctatggtattttaacattctctagaatgttgctataagcaaagaaagtattcaaaagatctgtgaggcaggcatctttagaaatgtggatttctaagcacatggactgtagaatcaagcttttcggatctgaatgttaaattcatcctgttgaacccttattttatggatgagcaaatagatgtgtgattgctcctactccccagtacagtacttctctaatgttacatttaattatttgtgtcttcccttatttatcatatggaattcctttagggaaaggactgagtcttattccatccttgcctaacagactgcctagcagaaagttttagcatatctttgcaaaatgaatgaatctgtgaatgaatgaaccaaacaacaagccaggcttacctgagtcactgatttctcctgttggcttgctgcttatttcataagtcagacatttctctccctttaaaaggcaatgacaaaaacatccctcaaagtaaagggatagcaggggacaagacaagagtcctgtcctcaaaagcttactctcttgtgtgtgtgcgtgtgtgtgtctattggggggcatataaagaagatgtgcaaaaaataaatgagacaattccaggtactgataccccaatgagaaaagtgccttgaacatgagacaagaagtgagtttcccaataaatatccagatgtcttctctttagtatagtctaacccccagcactgggcatgagtccatctgcccacagagaggaaatccttgctgctaccctgaaggcttgtcacagacttgtggctaaaggagttcttctggaaccagagctgctaaaaagaaccactttggagggatcagttcaagaagggttggtggcttctggtcttcttagggataccatgttgatgaatggaattttgccctttagctttaggaaaaggttttttttttaaatcatgttaaaagctgccatatacaaaaactttaaaaatattgttcagttttttaagtaattggaaggtcttgaaagtttatcatcttaaactgtacgtcagtatctagagaacatttcattgtggaattctgacctgttatgtacaggagatgggtcagcctatactggacaaatacttaactgagcaactgttttgtgccaaggacagtgaccaagagattatagaatagggttttccatttaggttacaacttcctaatgtcataaaatgaattt

SEQ ID NO: 46407 - DNA, 650 bp, Bovine  19866881155143
  misc_feature (1)..(1): n is a, c, g, or t
ngtgcagggacatgcccattcttcccggacagtgggtgctaagctgccaatatcctgtttttgttctttctcctcctctgaaacctcctttcttgtccaaggggacgcagtatctccctgcagatcccttcgggggctctgtgattatggttgattgctgcctagaccgtgtcactttctgttcgtttcattcatgtcttctttgctgttgtgttcagcggatcgccggcacagcagtctggctgcccacagcatctgttctgtttccagacagcgtgcaggtcccctgtgctgctggtgactaacgctggtaacacattccgatgcaggagaactcacaatcacagtgggttcaagggagatcaaaatacatcggaggtcactgatctttttggtttttttttcagctttattgagatgtagtgacagataacattgtaatatgtttaaagtgcccagtgggatgatttgatacatgtatgcattctgaaaggactcctactggcgagttaattaacacatccactggcaggtcaccaacttctagtttcaaatattttcccacatttttattattgcatttaatattggaagaatatcatcaagttttggtcacattctggattggtttcttagacatagtcttaaaa

SEQ ID NO: 46408 - DNA, 812 bp, Bovine  19866881176693
  misc_feature (1)..(1): n is a, c, g, or t
ncaggggcgtctggggagttccgtgctggctgtgagcaggctgagatgtctagccctcagccgtggcacctgctggatccccatcagcgtggttttgtggagggacttttgaccgctcaacctccctttgttcttgtctgtgttctgagacttcctgaaaattctgtgggttaccccacactccctctaatgattttttttcctctttaagtcagagacagtccatttccatccttagctatggaaacttgaccaggacatctttccaactgccttacttaaagtgggtccctctttgctttctacttctttattgcattcatcacggctcgtcatcattttactgattggtgctggctcatcatctcttttcctcctccagatgtaagttgcctgagggcttcctctgccgtcccctggggcccgtccactgccaggctcctggaagctgctcagcatagcatcctggtgatgcccgcagacgccagggtcagcctgcctgggtttgaactgtggcactgccggtgtgagatttcagacctctgtgtgtctcagcttccccgacagtaaagcacggacaataccagttcctgtgtatacaattgctgtgaggattaaatgaggacatatacgagaagatggcccggcataccgtgttcatgggtgaacttaggagaaatccaaggaacaatacagcttttcagggtctgatggtctgtgtctcattgctttaaccttcactgtcaggggagggccctttccctagggttaggctgagagtttaccaggttgaaatctggggtctggaacta

SEQ ID NO: 46409 - DNA, 931 bp, Bovine  19866881208001
  misc_feature (1)..(1): n is a, c, g, or t
ngcaacccgcggcttcatccggacgggcggcgacgagcagcaggcgttgtgcacagatgagttcagcgacatctctcctctcactgggggcaacgtggccttttccaccctggaaggaaggcccagcgcctacaacttcgacaacagccctgtgctgcaggtaggcaccggagctcggcggggtggccgctgggttgttccccatgcggggcgtgggaagatcatcatggggaggggggccggcccgcgtgcccgcttttggaggaagggtcaggacagacagctggactttattctgctccccagtgtactcttaataagtgaaggaaagtagtttcgttcctgcttcccccttgatgtttgttcttgtgtttgcgtgcacatgtatcctggcatgtaaactttacagatatttttaaatgctgagcaattttaacttgcatctctgtacttgcagtggaaatattttgctcctctaccttcctttggaaggagggtatttgaatgaatttgctgggtgttttttttttgtatccggtcttacctctttgatttgacaaaataaaaaaaaaaggcttttaatgttggcaagagggaacaactgaaataagatgtttaagaactctaccttcctttgctatttttaaaacagtttttatttctcttgggctgtgcggggtctttgttgctgcctgggctcttctctagtttgatgagcgggggctactctcgcttgtggtgtgcatgctccccactgcagtgccttctgtcgttcctgggcaggggctctagggcgcgtgggcttcggtggttgcagcacatgggctcaggagttgcagttcctaggtctggaccacaggttcagtggttgtggtgcatgggcttagttgctacctggcatgtgggatcttccgggatgaggaatcaaacc

SEQ ID NO: 46410 - DNA, 1629 bp, Bovine  19866881238597
  misc_feature (1)..(1): n is a, c, g, or t
ntaaaggaaagctattttatcatgatccttgcgatcgattcaccaagacagactctgcctcatttcattcctagaaatctacttctatccctgttattttctttagctcatctcactctccctataaacgtgctttccaccccaaacactgaatgccgcgagagtcagccctgtttcttctcaagggtcatgaatgaaatggggcttgaccacagagcccagtaaagaaaaagtggaccaaaggaacaaaagacagctggtctttctcggctctgtccacgtggatcttcagaatgaactctatccataaacttcatatccctgatgatgcgtgcttccccggggaatccagctccctcatttcctttgtatcatttcctggcttctgaatgccttgcctagacaaaggtacttctgtctttctctccctagcactagtgcaatcttgagcactttctcggtctttgccttccacaaagcaatcctttcttggattcagatttcctctaagccattgccatttccagcagttcctttctaagggaaacctagctacagccttcctcaccatcacatcctccccccaggactagcatacacaaggctgtatacagggagcacctgggacagacgtaagttaagagagagatgccaggtaaagactgaaagctgcatcttatctggtcagtatcatggggaacaaaaggagcagagattatgtggtgtgatgacctaatggtcagggaaacattagccttttgtcaggctttacgcttgctgtgtgaccttggacgaatcatttaatccagtggatctctgcttcctcatcttttaaaagaaaccttggctcaattaatctctaaagatcttctcagattccatgattcttaactgaacactgagagccaagaacagtatcttacttttgtcctttggagattatttccataattcaagaggataagccctccccctgcaaccatgctattttctgttgaatttattttcctggaggctgctgaaggatgctacagatgtttctggcatcagatcccacccaatacctcccgggccagggctggtactagatatcgacaaaattatcctacagtttggggaccatttctcaaagaatcaaacacccaagagccaagagactggatgagagacacagagcagaagagagtaatttcctttcggttctccaggcaggacctgaacagctagaacagagtctgtcaaaactgtttccagagcgccagaggcaggtgggaaactggggacaaaaggggtggatgagtttagtggctcttgacaatccctccagatgtctgttctgagaatcgtggtcctgccaggcaggcttcctcaggctacgattgtggcttctgggttcagcatgagtcgtaaccctaaacccacaaaaaaggctgaggctctgcttctcaagaaggaactgacctcagacaccatctctgttaccaaactagagtgggtgagaatcactagttcccacggggaaatgggaatcactttctcctaggtcatcctggatttacgttacgacagagacatttcccagccaaacaggcaataaataattccaattagcaaagatctctagcttga

SEQ ID NO: 46411 - DNA, 818 bp, Bovine  19866881264913
  misc_feature (1)..(1): n is a, c, g, or t
ntaaagtaagtgaagcacctaactcaatgtctcccaaactaaaataaatgaagcacctaactcaatgtctcccaaactaaagtaaataaagcacctaactcaatgtctcccaaactaaaataaatgaagcacctaactcaatgtctcccaaactaaagtaaatgaagcacctaactcaatgtctcccaaactaaagtaaatgaagcacctaactcaatgtctcacacatagtaagtgctcacaaaagcagtttatgcctgaatcttctaggtctccttcaagccttgcaaagttgacatggaaacacatacaggctcttactatcaacaggattgatttatttcatgttcccaaacttccaaaataatagcactgggttttcaaagtatctcattaaaataaaaacacctgtcccaattcctatatcacgagctactcttaggaattgtgaacaaatgggcctaaaggatagatgaagaagagcttcttgtttcaaatgtgtccccaaaaagcacttcaggacttaggtagtactgtctatatgcattagaggactcaggaacatattctaaaatgactgagagagcttgcttccttttgagaatgcttaaaaaatatagacacttgcatttttaaatagcactatattattgttatccaatcactgtatttaataataattaaattattatctaagacatgtttcaaaacaataactcaaatgttatagtatgactaattcactgcatggcttgtacatatttaaaaaaaataaaattaagagaacaaacccaatatcattaatggtctgtacagat

SEQ ID NO: 46412 - DNA, 2072 bp, Bovine  19866881267534
  misc_feature (1)..(1): n is a, c, g, or t
nctgcagcctattattgagcaatctgcttgagttgaaagtgaggctcagagagattaggtaccaataacacggtcccataggcaccaagtggcagagataagacgtctattatactggtgttttcaaactggtctgtagaaccctggaagtctaaagacattctcaagtagctttcagtaaatttgtgtttgcatttaagccacaatctgttaaccatgagcatatgctagaccacctgagtgaccatctgacgactgaggactggcatgcagtttcactacctgtgtttgtgctcattgagaactttactacttgctgagaacaagtagtaaactttaattgggatggattttggggaaaaaagggcagattgaggatttttttcagcagtaatttcaagaatctcgatctgtacaaagattttcccatcttttctagctctaaggtcatggatcagctgttccgctgataggtttaccctctctctttggggtgggatgggcacagatgcgtgacacaaggcttggggaataagcagaaggaaatgactttatggtatcaggtcaacaagaaatcaggatggaatccaactgccagtcagtcaaccacaagcaacaaattggagaaattaaaaatactagcatggagtcaaatctcttagatgaaggattactgggttagcacctgtctaagatctccagaggctacaaatatctctgaatgggtgtgaaggaactgccagcttgccaaaggattagtgcctgtgattggaaatgaaaggacagttaaagatccttgagaatttttcaaagcaagtcatgggtgaggacgggaagagataatgcgggacagagattctgcagaagacctgccctggtggattttcctgcagcagagagaagtgaagttttctctaacccctctgtctttcagtgcaatgcagtaattttcaaatgtgggtcaggggatgggtcacatcagacttgcttatagtgctggttaaaaatacagttttctgggactgaatcaaagtctcagaatttcacagaatgggactggttagtcgtagcattccagaaagttttaaagcatgttaaaaccctgcttaagaaggataacccgttaacgctctacccattagcctgattgattttcttatggacagcaagagtgacgtgggttctatcatgagtcagggttgaagatagtggaggactgctcacgttaagaaaaagacgctaaaagaaagggtggggaactatttcaatctcttgggcttgcccattttttccctacttctaaggcctttgcagacggtcctccctatcttttccaaacctgacccttatatcctgttggctttgctttcaagctcaggaaacttttttctccttcagccctttttgggtgtgtttggattttgcctaaacacggtctgccacacctgccctatgttatttttagggtctcctttgcctacgtgccctgaggaagtgagatactccgtaaattctttcttctcatgaatatttgattggcagccttaaaatttttctttgtgtttaaattataaactcactgcaagcacaaggcacctttcaccatcttttaaactccatgtcaatatgtgttcttgtagagctataattgcctattatttcatagctttccaaattaatattcattaaacaaaagctgaaaatagtgttaaatctatgtaaaatttttgatgtgcaaaatttgcttatcagtatgttaatgttattttatcagagtttgatttctgtggtaaggaaggacattatatttcttaagaatgctgctttttgaagccattcatattatagactaatgcacattttcacagaataatgaattattatgtgactgagggagttaacgaaatgtaaatgagaaacaatttcaccgtactgtctttggagacacaatgtgatttttaaataaaaatggaagcttcccacttttgccggtaatcagaattaacataacgagtgaaagggagagacccggacagaggtggaagcagagctgccttctgatgtggaagaaa

SEQ ID NO: 46413 - DNA, 817 bp, Bovine  19866881270413
  misc_feature (1)..(1): n is a, c, g, or t
ntgtgaccccctgacgccttaccagtgctcagtaatcacgcacctcctgatcaaaatgatccagccagtctaaacaactgccagaaaggatatttccagctcatccctggctaggctcacactgatggtgaagatgtccttcagcacgctttcccaattccagcattacctgtcaacctggcgttcctgctctggggcaggcgttaagaacactgtgctgtggttgaggaccaccaggactgcagtggaagagggctccaggtacctctttctcatggctgtgtgtggaggaaagcaggtggatgtgaatgtcagagaatagacacgctgcaaacacaaggcgaagaacagaccaacggggagcaaatccaatccaaagaaaggcagatgaaagagaaggaggtatacagacgcactgtgccagtgaagaggaaaaatggagtgaagaagtgagcagacagtgtcattccagaaacaggacaagggtatttacataaactccttactctataatcatgataaacaacaacaaaaaaaacacattcacacaaaaatataaatttgaaataattaatagcaccagtgtgtcagataatagtttctttcccccgctacgcaaagtacaaagttgcatagtgttaaaggctatatatgaatcttgaaggcaggctggcaggaggaggaaggggtttgtggcagagaatcatcacgctgcgatcttggaagaaaatcacagagctgaggaccagaagttgagaagcccactaggaaactccatgtaagggccttccgtctacacttggaggggaaggtctag

SEQ ID NO: 46414 - DNA, 3099 bp, Bovine  19866881370700
  misc_feature (1)..(1): n is a, c, g, or t
nataatttttgttatctctattttaaagaggagaaaactgaggcaaagaaatgtggaagttgcttgagctcacagagcaatcaaggggcaggggtgagatttgaaaaaataagaattaacttgacaatactttgcaactcagtatctttttcttaaagtcagggaataggtagcttgtcccaagtagacaggggaaggccagtgagtattatccagggccaaagcctggtcatcccatggtatgtcatacagtctttggccctttggagtaacttgccgttcaccaggagcgaaggaaatgcagtccttggatcctaaaggcgattagatgtgaggtgccacctagatgtggagactgtaattagagagaggaaaggtctttgtcttcaactggctcagatgggtgtaagccaggtgtacattctgaccccagtggcaagggtgtgcatgtgtgtgtgtgtgtgtgtgtgtgtgtgcaggtgcacttgtacatattcatagttcagattcctgaatcttttgcttcactaagcactccagcctggtctttggtgagcaaagagagaacagctgaggagggcaaaattggttcgagtggcaatgatgagatcctaggtttttccactaaaacataagatccataaaattaggaaagtgagagtagacaatatcctataaggaataaaaaaaaaaaacccaacttatacataaaagcacatgtgcagaagtaggaagaaaatcaggaaaaagaagagcctctcaaaccaaagaaagaaagatgaggagaaggagggcggttaggtcactcttcctttctgggtcacaggatgctggccggcccgagtgttccgcacaggggagtcctctttccactgtgctctgtttgcagagagctgcttttagggggagctgtgcgtcagccagcagatgctggaagcaccgtgtcccctttggatgttcagaggtcgtcacttcaggacatgcagctctgggctgtgggctgaaaaccgctggtggccatgagccttgttctctgcctgagccccagttgactccccggagttggcagtctgtggttctttcttttctttttaatatttatttggctgtgccaggtcttagttatagcaggtgggatctttgatctttgatgtggcaggtggggtctagttccctgaccaaggatcgaacctgggcccccagcagtgggaacatggagtttgagccactggaccaccagggaagtccccagtctgtgattctgcagcgtctgagtgccctgatgcagaagaacacgacgggtctctgtctggagccagtctggtggtaggagagatggagttgtgctaacacatgtggagctaaaattaccctgcccttatttctgcagctgaaagacacatactgtgaaagtcatgggcattatgctgtcagtccatggatggcttcaaggcccttgtctgaaccctgatttcatcccagggtgggggagcccaggcacgcctccgtggagacggcagctctttggctcagggctgacagctgacacgtcagtctctcctgcatgcctctccttgtaggacactgtggggcccaggccagggtttcctttccaccacctcctgggaggtggtgtgggcagaaactctgtagtcaggttgcattgtttagggaagaggctggagtgaagacacacaaacgacagaaataaagtgctcagtaaatttaatgtgcttgaaatcaacccccagtgaccccccacccctcgccccggtccatggaaaaattgtcttccatgaaacccatccctggtgccagaaggactggggatccatgctccaagccatgtggggttgtcatgttcttttcttgttcttaccaatacttagttttagaacgggatctgaaacaaattctcactgagatgtaaatgacagacagtctaaagtgttacctctgcaggggaatttggctttggaaataaaatactcccacattaattttaagagtagagaaggcatttctggggatatcaggttttcctacctaggtggttaattacctgcttgatcttggtgttcaaatctccacctgctcagcttagcaggtggcattggttagcaccagttataaagaggaatcagagtcttgataagatgtacttttgaaaagtttctcagggaccctggggcactgaatctcctgtcctctctccctccctcgctcccaaaactcttcagttataggagaagctataaagcaggtgtctgcttttcccttgctaagtgatgctttacaagaggcatttctgggaaactcacgcaggaactagaagggtttgccagtcctcctagatacggccttttttagaagagacttcactctctatatctctggtccttttatttatattgtcacttgcttgtttacgatgcaaacattgactcttaccttagtatttattccatgaatactaggggataatttctaaggctttggcttcaagtctatccacataaatgcagaatgtcctaaagtagacttttttttttaattgtgatacaaagtacgaatatacctaatatatatgtcgtttcacataacaacccttacttccactacgtgtaaaagatgttgtttgacctctgaaccgagctcagtggtttcctaggtcacctgcagtgaggaggcacctggctggcacgtgtacaagtgagcctctgtgctgggtgcctcagaccttgctgctgatcatggccgggtaagcctgggaagaggtgccttctgagagtccctcgctcatccctaacagggggctgccgtctctcccacaacagaccacggacagccagggtgctctcccaggagtgggggcagcgaggatgggtctgggattcccactcagcaagtgacatgcacacacaatcacgttaccagttcctctggccatcatggaaacagcagcaagcgggtagaaaggaatatgttttcctaggagaatctgggtggagggctagtgttatggagtcacagttttgtcccgctttgcgcgtgggtccaccatggctcctgcccctcactgctttccccacgtcggca

SEQ ID NO: 46415 - DNA, 1791 bp, Bovine  19866881375992
  misc_feature (1)..(1): n is a, c, g, or t
nttgctataatcaattatcacgaacttctaggcttaaagaaacacgaatttattaccggatagtctggaagtcctaaaattaaggtgtgttcttcctggaagctctgagggagatctgctactttgccttttccagcttccagaggctgtctgcactcctggccccatggtcccttcctgcatcttcaaatctctttctgctctctgtttctgttgtcacatctcctctgagtctgaccctgctgccttccctctgtgatttcattggattcacttggataatccaggataatctccctatctcaagattcttaattcaagtcacatctgcagaatcccttttgccacaatagggtaacatattttcaggctccggggattaggacatgaacatctttggaaggccctgatttagcattgcacacagaccatcgccatttgctggggaccgaatggtcttcccaatgatagaacttttagtgctaaaatcaggaaagttttgggcaaaactgggcagccagttgcccttagctaagcgcaccttggttccagaaggtatttctgctaactcttggggaagtggaaagggaagatgaacatagataagctgtaaaggtaacagcatttagcagtaatgatctttaggacaaaagcaacctttaacctttaagaaatctcaccctgcaccccctcagcaggaccacatccttaaaacaagatgttctccacttggttgtttttgggctgcactggatcttagttgtggcgtgtgggatccagctccccggccaggaatgaacctgggcccctgcattgggagcgtggagccccagcccctggatcaccagggaagtcccctccggtagatctacctgataaaggcaaagctatttcctcaacaaactccactgcaaagcctggattatccttgaataggaagcctgtttggcgaacttacattcaaaaaggttaatggttcctacagtgtggagtaacagacttctagttaaaaatagagcctgattccatgcaaatgacagagacttgtcacctggatatgaagccacagcgggttttctacatcatgtgtcctcttcctgccttttttccttccccctcaccttccagtctacccaccctcccccgccccagtccacccacccagttatatttagtgttacagtctgtgggtttctgaaataattctctcatgtgtttatgagtctcactgaaggggaggccggttcatgccatatttttatgtatatatttagctctctgcttctgaggaaataaatagaaatgagtctttttcaataataggtgaattccaagaagcttgtagcccgatttgagaagggtgatggatggcgatctgggaggggagggggtggtttccagtggaaaggatttgaatggagagccctagggtggcacatggcacttggggagtatgagagggtcaccctgcatggtccgtcagaagtgacagttgaagtgaagatcatgaatcatttcccagctgtgaagacagaggaacagaaatcctcccaagccagaggcagtggagccagtaagatgaatgggaaagagggtgcccgtgctactctacttctccccgacgaccagttcagggacgcaaaagccagacgaatggatggaaagccagggactagaggaaagccaggcatgcagaggcatctgggaagcactggtgacgttcctcggtcagtgcaacctgacgcatgctcagtgggggtgggggcagcggtggagtgaccgaggtcacca

SEQ ID NO: 46416 - DNA, 869 bp, Bovine  19866881405743
  misc_feature (1)..(1): n is a, c, g, or t
natgggatgggactcagaagggtgggactgtgcatgagcttgtattgaaccttttgaggggtctctctgtgttactgggatagagaagaaagctgagggcaagtcctttgtttttaaagtagccttaacctttgactcttgcttttgctcctgttatttcagacctaatgaaaaggttaagtctcagttagacaagatagaaagtcagaactattttgccccaaaggatattttatggaagatttttgcaaactatttggaagactcactgttgtcttggtaacaagcagcaccctttacactggcccctgctaaaccttgttagatggcttgcatggatttgccacttattgaagtcctcttaattgctcttttgggggcatcgacctgactattcactgactgatgtttctgaggcaccgaggaatgagccaactcactctgagttggttctggcctgtggtgcagcctgggcaggacctgcacttgaattcatggaatgtgatgattcaagggcccttaatcagttgctccaatagcctgatgctgggacaccctgtgatttgtaagagcaagtggacatgacatgctcactgttgagggagagagaatggctgtagccagtgttttgaaatgcaaggaaatcgatggctgcacagtgagcctggctgagatgagagctgggggcacaggatatgcaggagaggagatatttctggggccttggatgttctggccttaaaaggctcctcggagataggctgtgcatgtgttgtccacccccgccgaaggtaataccatccccgtagacgtttgctggatgagatttctgtgaacaatgaccggggtcagagatgaaaacccatttg

SEQ ID NO: 46417 - DNA, 1053 bp, Bovine  19866881462475
  misc_feature (1)..(1): n is a, c, g, or t
ncaggtggaaaaattacaaccccccaagaggctaaaaaaaaggcgatgggatttcagtctgcctttctgctggttttagcacaagggaccgttattggaaaaaacaaccaagtcaaataccattatgacaaaatcctgcgtgacaaagggatttccaagccattcaggagggttttgtgtgattaggcctacgattcctgctcaccccaagaggctgcacgtagagattcgtccctgctagagtgaaggacagggatctgggacacgctttgttctgttcacctgccttccttcttcctctctattagctccatcccctttgctctcataagctgaattcctctagggagtcctgcatctcagcttcaaatatccccctgagctgacagacgaatggcttctgtgcacagtagttaaagagcacaggattttggaagaagcaaagatttagggactcctagctagagatcaagggagagagaccctttctccttgcaagtcctaattaattaattggctctttatgaaaagttgtgagggaatagttcagacaagcagcatcgaaaggaattttcagcaacctattttctagactgaaaataatattatataatcatcaggctaaccgaactgcactatttcctagcacactcctggtaacgaatttttcttttgaaagttcaaatgacatgaacctctttgcaccctcttggcaggagtggacaaagaggcctgtccctagggaggctccccagaaggacctgcttactgactctgtctcgggttggaggacagaagggctgctttataatctgatgactaacagccgtgaaatgtagttatgacttttttttgtcacgtggaccccaagaagtgggctgctgcccagatcagagtaagcagttgtatgatacatcttagacttcaggccctacgtccacgcaccaccttcatcaccaccatcatcgccatcaccgttatcatcttggtgttctgcccagttcaaccaaacacatttagaaaccctcgagcattttataaaacagaaaaaga

SEQ ID NO: 46418 - DNA, 1013 bp, Bovine  19866881467547
  misc_feature (1)..(1): n is a, c, g, or t
ngttgatggatcgatatgggaattaagggagagggaggaaccaaagatacctccctgctttctggcttcagcatctggcagtgtcattggtgcagggagggagcaggtggggagtggtggtggctcagatttgggaatggctacgaagaatctactgttgtatgcatctcaagtttgagatgtttgtgagacacagtcaagggagagatgtcaagcagataattagatttctgagattagagctcagaggcaaagtctgctaagtgatagatatttgagaggtgtcagcagacagatggtttttaaaattgtgagtgtgcttggtggtttagttgctaagttgtgtccaactctgtgcaaccccatggactgtagcccaccaggctcctctgtccatgggactttccaggcaagaatactggagtgggttgccatttccttccccaggggatcttcccaacccagagatcaaaggtgatcttctgcattgcaggcgtattctttactgactgagccaccagggaaggtaaatggagtataacccttaaaaacttgattcactatattgtatatctgtaactcatgtaatattgtacatcaacaatctttcaattttaaaaattggcaattttttccactgtctctgctaggcaatgccatgtaattggctttctgttctcaagtgatcatccagtagacctgtcattaactgaccacattatctggatgaactgagcttcataaagaaaaccatcggctgcgctaataagagctcagtgctgcagcctagaatcatggggcttcaattcctgctccacagttgtatgatcttagacaaggaacctaatcaatggaagcctctgtttgtcatctaaaaagtgggggaataacagcctataaaaccttgggatttttgaaaagattaaatgagacaatccacataacaatatgccaggcatacagctataggcagtaaactttactgattcctatttatcattagtttcagatag

SEQ ID NO: 46419 - DNA, 1680 bp, Bovine  19866881648692
  misc_feature (1)..(1): n is a, c, g, or t
ngtaggctgtgagctcttcaagacacagactttcttataaagctcacagtgctcaaagctttgtacaaagtgcttagtacatgtatgattattaatgcttgtgttgtgattttaaataagagaattactcaattattatgcctaccatctaaataaagtaggtatatagactatgagcaggatacgcccttggaagaggttctctgttccatgaggtatgggtctgggtacataatctcctatttctgtttttgttttttaatgagctcacaaactgagatggtgcatggagtcatgaagagagtactaatctagaagcaggaaacctgatcactatctcccctggatttcagattcttcatctgtaacatgagtgtgattggtaaaatgacttccgaggtcttcaaggtgccttcattttgcctcacaaagctgattaaacaccagtggcatttgaaaatttaggagagagagcaaagcaatcaatgggcaggggaactgagaagcagcccttaagattgaagacactcaagtcaggcttcaaagacagtggtcctcgtccagtggacaacaaatataccagatttggcaaggccaagtgttcacacaggaggaaacggacacgagccagaatacgaggagccgtaagcgtcagataattctctcgggaaagctgactagtctcaagatcagacttttaccattgaagcttattattgatctaagcatttttcaaacaatacacaggcttgagatgggggaaaaaaaagttggtaggtcaaagtcagcattaaaaaaataattagaatggaaatatcagagtaagtcttgtcttaggacacctgtgtccacagtcctgaatacgtggcaatataaaatattccttctaaagggttacaattaaaaatatagaagaaaactcacctattaaaaattgacaaagaaactaagttttttgagtctttaagcaaattttccaagttttttaatttaatgcattgcaaaaccctaacaagagatctgatttacagcactctggtaccataaattcaaacaaataaattcagaaagggctgatctttatccttcctggacaggaagcagaagtacagagagctccagccaacacgaggaagaacactgtacattgtgtaagtgccttgtgtcatttacctgtgtttgcataaggaaacccacatgctcgcaagacaataaatccttaggtttccagtcactaagcccctcaagaacttttatgtagcttctttgagaaagaaagaaaatgcaaatgcagaaaaggtttctacttaatccaaataatttaatgaataattatgaatgaataagaacatctctgtcctcaaactgcttataatccacgaagggagataagacaaacacccaaaaagacatgggctgtgctcaaggtgagggagagggaggaacatgagtaggaaaaataagaaattaaagatgttaaggcaaagaaagcaactgaaattagcatttttggtataaacagagtatcggctggcacagtttgggagagacagtattagaagtggaaatcagggtacctctgaaggaggcaggaacagcaaagaaaaggcatgagagctgcataaaaatggacaggcagctagtcagacgcctgtaaggaaattgtggtagttaaggcta

SEQ ID NO: 46420 - DNA, 1391 bp, Bovine  19866881844208
  misc_feature (1)..(1): n is a, c, g, or t
naaatttctaacccttgtttgtatatgttgttacaggagctttattgcagaaatgaccatttatatcaagcagataggcagaagtaagtgttcctgctttcctgatattctgagtcttgtatagcttagtagtattcattataaagtcttgagccacatgtattattaatttgacagagtccatgctataaggtaccatttagggtgtcttagaatattagtgataagcaggcccagcttcccagttttacatgttgaaagattgtgctagcattgtatttcaaagggtaagaggtggtaggctgctgaggaatgtgccagtgtcaattaatctttccattgatacagaaaagatatagctccttcaggtaaaacttagtgacatttagaaaggagttaatcagatgataggatttgaggtctaaaggtgaatgtgagcatttaagtgtcacagagtcaagaaagaaagttgagaaagttactcttaaggcatttaaggaaccaactggggttattcataaaggaagtaaaaagacaagcatgagcatgtattctttattcttagtaagtttaaaagcaggcagtgtgtcatgcttgaaagtaaacaatagctctgtgtacctgattttgtctctaacaagtttaatgatttcaatgaaatcatacctgtgttgctgggactcagtttacctcactacaagttgagagaagtgggaaaagattctttccagcttgagaattacacacttatgtgtagtggataattcttatgacttaagtgtagtgtatcaaaaacttagaaaatcaagtctttgaaagaagcactaggagatgatgttgaatttttttaatcctagacttaagaatactttgagtggataggagttctaagctttttggaacacagctacagtgatttgtttacatcagggaatagcaaacttagtagaagtccagataaatattttaagcttggtgggtcaaatatataacacattattatttctgtcttatatttatgaactctttacaaacatgataacatttctggttcctgggcccatagtcaaactctagttgaagtgttcttagtaaatggcttcactcttgagagacagaattgagtaactgtgacagagattatatggccttaaagcctgaaatattttttgacccttaatagaagaaaattgcttgactctggtctgggcactttggacccatttttattcctttgatttgctttttaatcctttatttttcagaagttaaattcttcccgttttaatgctatatgatgttaataatgacagcttcgttaaaatagtttatttgcttttaatgtaaagatttgtatgtggtatgtgtcttagtgtgtgcctcaaccagga

SEQ ID NO: 46421 - DNA, 766 bp, Bovine  19866881878407
  misc_feature (1)..(1): n is a, c, g, or t
ntttcttgttttaaaagaaaataaaatagagaaatccttatattggtttagctcaaaggtttatccagcctaacagtgcatgtgacaggctcaaaaggaacatcgtatggaagggccaagtttttattataccagcacgtttccctttaattttcattccactcctatctcttacagtcttatcttttaactcaatctccccatgttatgaaatatcacttgtttatacagaaactgacaacctgaggctaaaggacatctcttatttttgctttgaacttagtttaacttttaatatatttatgggttttttcaacattagatcatgaaagacatctccactgttaaagtgcttccaactccatcttcaaatgtacttgtgatttaattaattcactgcaatctaacttgtttcaacacttctcttaaaataaagagtcaccaatgattctttagttgccaaataacaaaatccaattgtactgtctttctcaatctgttaactattcctcttccttaaaattctttttttctcttgagtctcagatcatggtccttaaataaccatgtttccaggattgcttcttttctcttcttacattttttgtcatatttccaagtttaaaaatgattgcccatattttgacaactctgattctaaatctccagtcccaactaagacccatccatatttctaactacttataagacattttcatttggatattcatgcaggcacctcaaaatcaacacagccaagctgctg

SEQ ID NO: 46422 - DNA, 823 bp, Bovine  19866880422303
  misc_feature (1)..(1): n is a, c, g, or t
ntttttttttttagtttgaagaagaatttcttgaaacaagagaacaatatgagaagttgcagaagggtgagcctagatttattcaatgttatcttacgggaaaaataaaatatgttcccagaaatattcatttcagcacagaactctagaatgacaaccattagaaaaggcaaacagcatgattgctaatactaactcttcactttgcccccagtgtagagctaaaggtgtcatctgctctgcctccttagcctcataaaaaggtatcgagtaggttatgactctggcctcaacttagcaacagcctgggttgatccagtgccaactggttcaataatccccaccccaccagagaaggcttcaaggattcttcacaatgatccagtgggccagaggagagggaaaaaaagggcaggtgaattagatctaaaatattccctggttctcgtggttcatattcactttttcttagtggttttagcagattaacagagataattttaccaggtcacaactgtagaatcaaaactatagaaaagatccaaatttgattacattcagaagttcttaatccctacaattccccgattttctcccactaagagagaagactgatatttctccagtcctacttctcacagccataatgttattttttttatctaaggaaacccagggtccctatcgttgctgataagcagtcatgaaattaccacagattattttttaagaaagactttcagcgaatcatcagcagacctgccatttacaaactgcatggctttggtcaagacctttcatttctcttcatcctggcttcttg

SEQ ID NO: 46423 - DNA, 2180 bp, Bovine  19866880471052
  misc_feature (1)..(1): n is a, c, g, or t
nctcttcccctcttcctcttcatttctgccccattttactctaaataaggacagtcacatagtagtggttaaatacctatgcattgaataaataaatggatgttgttgtataaactcctccatgatcaatctggcaggaaatgccagggatttccctggcactcctagtattccctagaaatgcaggaaatcctagggaaccctccatccctcgctgggtctgtgaggctgttgaggacagcctcctgggcattgctgccatctgtgagcagtcccaagagagcactggactgggagtcaggaggcccccttctgctggcttagctgtcctctctgggtccgagcaagtcactttgccccactggcctccacagtgcattgtccgtaatatgaacaaactgaactaaatgatctcaaaggtcctctccctgtgttcttgatctgagattttcttcaattcttccgaagaggatcatcagctcctagaagcagggatcatttctaacggctgtttgcatcattcataaacagcaacacagagctcagctttagatgtttattcagttttggacaaatgtagaactgtctcaggaaatggaggtttagtagtctctccgctaaaaatagtattgatatttctgaagtacgagcttgcccaaagaaactcagtaaaatgggcagaacagatactgttacagatcagaaaacaggctcggagaagttaaagatgtgtctaaagtcctccatcacccccaaaagacagggacactggctccctggaaagctgccagtggtgcctgtgctagctctctgccaccacgttcccacgtctcattaggtcaattattggaagctggggagattaactgtggcctttgccagtgcactagtgaaatctgactcctattctgggtaaaattccttattctcattaatgtacaggtgtttatgaaaatttaaaggctattcattccttcaagaccccatgaaaaagtacatctttaaataaattatttatacaggcagttcactcagaaagaagaaaaatttgattttactgaaccttgattgttgacagtattcagtgttatacttatgttatgatatttcatcttttcaaaatcctgctcgatggatattacagctattttagagaaaaggaaactggagctcagataagtcatttatttaaagtcacagggctcgaagggccaaagctaacatatgggcctgggacctgggttcttgctgtcacatccatcccattgccatgcagacctagagtgatacctgttgtactttttaaagaattcagactccatccctgaatcagagtatctggagggtggggtgagtatttttaacaaccacctcttccaggtgattctgatacacctgaaactttgaaaaccaaaaacactgatactataatacagtcagagcaaatgtagaaagccttaaataaccatgattaaccaacgtgcaaaaacccatgtacctatcaagcaaatctcacattttccattaaacaaatggtaggcatttcctcaacaaccggggtcttaaactcacccctttggatgaaaactaagaattactcaacaaaattagaagtggatcctcctgtaggctgaccaaaaccatagagggagagtctcttaacctaatctcttcgctcaaaccacagacggacgcctgcttttcggccaggtgcctctggttgaaattgatggaatggagctgacacagacaagagccatcctcagctaccttgctgccaagtacaacttgcatgggaaggacctgaaggagacagtcaggtaccagagtgcccgtgccaatacttggttcttctccaagctctgtcttcctatacggagactcagatcagatgcagcctttcagcctggagggagaggaggagacaaggggagatgcttgtgctaccccgtatgtcttgggtatgctctgaacacctgctcctggacgccccttctactcttcacaatggtctgcatttgacattctcatattctctccccactcctaacaaagtgtgttttcataaaatgatctcataaactactctgcacaatggtggcaatgactgactcagaaaacaaatattgagcattgtatcaatgacctattactgcaaataatgctgtataacatgtcac

SEQ ID NO: 46424 - DNA, 656 bp, Bovine  19866880491547
  misc_feature (1)..(1): n is a, c, g, or t
ntgaaactgtgccaggtggactctttgctgtgcaggagtcaagtctgacacaggcagagctgcacagactcaggggtccgctggccgggctctgccgggcgtggtcaccttcctctgctcttttgtaggaaaacgctgtcccaactgcgacgggcccctgaagctcattccctgccggggccacgggggctttcccgtcaccaacttctggaggcacgacggacgcttcatatttttccaggttggatttacgttagcgattccgtttctctttacttcaagaactgttcacagagcacgagggagacttgcctccgggagaggcacaagtggaggggagtctgcaccctccctgggggaaccctctgggcaaatgaacgtctgtaccctgaaccttgagagaggatccaagggcagagcccaggttccaagggggcgacatgctgtcggcaacatgagcccccgtgcactggccttccgcagaccagtaaacgtggacacattgcgttactcccctaagccccagtttttggtaaaatgtggtattaaggggtcctctccagggaggtggtagaaacaatggaccctgagagctggactgtttggatctgagtccttcctaaacctgcctctgaaaagaaaatgctctgaatgta

SEQ ID NO: 46425 - DNA, 1437 bp, Bovine  19866880588544
  misc_feature (1)..(1): n is a, c, g, or t
nctacctaacgtcatacaaaacagagggcccaatgctgtctactccccagtagtcagcacagccgacttgttcctcggtgacgtggatacttggtgaggatgagcctgaatagcagcccaagcgctctgataagacagaagacaaggaggagctccaaaatacaaagtaattctagatctagagccaaggggaattccctgatctatcttaatctgttggctctttgtctgcagttcctgttagaaactggataaaaacaccaggggccattttgtctataaacgcaaaagccacgcgaaatcaatgtctgataactaatgcactaacacttggagagagaaaattttcactcactgagttacgacagttgtacctgtaatattccacttggtgccacgctctatagaaaccatcaagagactgctccccttgacgaatataggtggttttactgatatacacgcctacagaaagaaacagattttttaaaaagaacttaataaaaaacttttaccatcatgtaacatgtttccagctttatttttattgaggtttcctctaaatatgctgacagtactcaggtctggtatagaaaaatgaagacttatgtatttatcaaaatcagcacaacagatctctgttgctctaaagagttcaactcaccatcaaatcgaacacggggcctttccaaaaacatctctctccaggatgtgtacggaacaagtttaatacagcttctgccccaaactttcaagcaggccaaacgccatatttcagggtctctagggaataaaagcacatcaatatatttaacaggtaagccctatctgcactcagacaagaggagcatttctgccaacaggcatcttctattcagcaacttcggctgtgcaccagccaggcactgtgccgagcactgggacagacggatgggcagggcagaggccctgcttttttacagggaaaacaaacgaaaaacaagaaaatgagagaaaagttttaggcagtgtgctcagtgtgagaagaaacaaagctgggtaaaggaccaggaccaggtgggtgggaaacagactctcttttccgggcaggtgtctacagtgacaaggaagggcatcctggcagacgccacagcaggtgaggcccaagggctggagcgtggccagcatgctcaacaaggggcaagaaggatgatgtggctgcagcaaagtgacctggtgaagtgcagactgcatctgtggagaggtggttggggacaggtgaggtggaaattttgcaggtggcggtggctgtttgagcgaagaggaggccactagaaggttctaagtaccactgatggttttaaaagatgactctgctggtctatggagaatgagctcaagtgtaagagtggaagttcagagaccacacgggatgccaatgccataatccagagcagg

SEQ ID NO: 46426 - DNA, 996 bp, Bovine  19866880941048
  misc_feature (1)..(1): n is a, c, g, or t
ntttgaatttacatctattaggaaccaatgcaatcataagattgaagtctacctttctaatccacagtaaaatacataaaaacacccaaattttgtatttcttcttaacaaatccatttacttggcatttctgtttcctttttttcccccctgtttttaagcagattttcttgaaagaacaacactgaaataaatccttgtggaacagatagagtcggttaacaagtgaagtaattatatgtcattattccacatgctggggggttgtaaatgatttaaaagtttgtttgttttcacatttgtttccaaggacttgaccaagcacagaagctctatatatttatatcagcaactagggtgaatttattctaatagatatttattctaagaacagggatctttctgtttcatactgcacatgaatattaaataaactacctgctggcaactacacaatattttagtctctaattgtaaaagtacactgtattttaatacctatttttaaacagatatcaatttttatggagctgtacatgagttgttgatggataaatcacccaagcatggttaaagacagcctaatctccagctggtaccagatccatttaattgtatcatctgacctcacctcacctgagcctgcattaaactcataatacagttcaagtgtaaaaatgatatactgtttgttcgccctgtttatagaggggcaaacatacagttaaattcatatgtttaaaattagtgtagtcatttgaaaaggttgagttagatcaaactgcctctcagcattttctctttttttttatttcaatgactaggcctccatcaccagatgtgagcggctgttaagaaagttgtagcagcttttcttggacacccagaagactgctcccctccatcaaacacagagagctttcaagcatcatttaataatggaacagtgcatttttttttaatgtgttagcaagcaataggacagaaacttaaggg

SEQ ID NO: 46427 - DNA, 1333 bp, Bovine  19866881042535
  misc_feature (1)..(1): n is a, c, g, or t
ntgcacattggaatcccctggagggctttcgaaactaccagagctcagcccctacccttgaccttctcttagaaatgggacttgggcatcaacatctgttaaaaatttcccaagtgattctacagtttacacagggtaggaatgactaggcatttgcccccttgtgagcatagcaagctcttatacccaccaacctttggcagagttttttttccatctgtaagtcctttctctcccttttctgtataataaaactttgctcattgttcaaacctcaatactgcttttgctctgaagggttgtcagatctctcccccctcccaagaattggctgctctctctactgtgggctcatagtgtttcctgcaacttccatgtatgtgacagctgtgagtcatttaaaggaaggacctttcccttatccataatgtaccccagaagccttgcatagtgcttggcatctcgatatgaatacaattagacactgtcaacctgacttcagtgcccgaagagactaggccgatccattttacaacagtatgtgattactcgaaataaaattaaaaagcatctgctatggtgtgttgagggtcaaatcttgccagagtaattgagttttgttctatgataacgtgactgatggtagcaaggaggaatcatagggtgactgtatactgaatgaatgacccactctatcatgattttgataaagctcttaattttttccagagagctttctcaatggtaatctaggaagacattttcccaattatacaattttagtagatgaggaagtaactatcaaagaaaggcttctatgattaataatagatatgaattattattatcatagtataatgcccattgtcccccccgccaaaaaaaagggaaagcccacatgctactggaatgtagatggttattaaattttggtcaccatagttcatcaaggagatggaaaaatgtgtgaggattcagagatgaatgccaaagataattaaaggagtggaaaaatgggtcctatgaggaaaggttgtgtaattacagcaagaggaggctgagagatatacatctgattactaatttgatgatcatacacattttcatgagatagtttttttatgtccacaaaaaatgcagcatgaggaaattagaatagtcaggtttaagttggacattaagaagaatattctaactaactagattactaaatgcagatctgatcatgttattttcttgtttaaaaaaaatgacttcccactgtctctaggtcaaagcctactttaaaaaaaaaataaagcatgtaatttattagttagctgatttttgacag

SEQ ID NO: 46428 - DNA, 1697 bp, Bovine  19866881044975
  misc_feature (1)..(1): n is a, c, g, or t
naattcggggtatttttagcttttctgatactattcctaaaaagtaaacattctctcttggttccttgttactgaacctttttattttcatagcccctgtgtattctttagaaaactgggttcaccagacagcgtccttctgtggcctgaacacacttgtgaatttcatcaccagaagtgcatttctgagcaccctctaaccttcttgagccatctagagtcttggctctttcttctttgaaccattggaaagctgctttccccccataccttaatcccttccaactgtcagctctcagctcttgcaaattctaatatcacatgggccctgtcctcaagtaactctgtccgtcacttctgctcagccaagtcattgactcagattacaattggtctgctttttcatcctctgggtaatggatttatcagtgagacaagctgagaaggggccaggtacaacacaacagaggctggcagggggtccaggagtggttgaagtccacagcaccacatgcttcctttgggtgtgctttataatctaagtcaaattggcctgaaggaggacaggttggaaaaacaggagccagaaggcatgtcagccacatggcagaactgttgttgatggtacactgtctgtaccagctactggtggagttaataaggcaaatcacattaacttcctatttttttttgcaaatcacttaaactttctgagatttaattttctcgtttatagaatgaaaccagtaacacctatctcatggagccttcatgagattaatatcacataaaaacaaacaaaagcatctgcaaactgtcaagtgctataaaatgctaattacagttattttcctagctctcttcctctgtcatctataaaatgagtgatatggatcttacaagatattttcaaactacctttcaacaaccagtactgccttataaacacactgttacatatcaccctaactcagaatatatttgaaaacatttgccaaagacaggtggatatatctgttttcatttccacatagtattgatatatgatgtgaactgtacagcaattttcaaaggaactatgttgtttaaacctttactgctttagacataaagagtttcaaactattttgaattcttacaccttatatagttcacgattagtggtattcagtactatttttcacccatattacctaataaaatagttcccataatctatataggaatcattcacaattagacatgaacttcatgaggaatgcatcagaagaaaatggaaggaaacctgactagctgttggccgtttcttgggatcccactgtagcatgtctctcaggagctgaactgcttcgctgctggcatttggaatgagggtcttcaagttattgggcacacactggggccagcggaagttcatcgcatttgacagttggtagccttcaggccagtcagtctgaaaggaaaagatagagagtgttccccagccaactgctgaaataggactttatgttccggcacatgtgcccataacagaagggtgacttgtcattaccacatccctactcactatggtggaccatcccagaggtaggtgtaaatttgtgaccagggttataaaggagcggaggagggctaaggatcacattacgggacttctgcatgggtaagagttgtggccatgagagcacagaagggag

SEQ ID NO: 46429 - DNA, 641 bp, Bovine  19866881105565
  misc_feature (1)..(1): n is a, c, g, or t
natcacggtcctgcatgtgtatcaccacgccagcatgctcaacatctggtggttcgtgatgaactgggtcccctgcggccactgtgagtctgaacgtctttggggacaggtgtgagcagagaggctgagttgaaactaaggctctgaggggaaagatgccgtttctgcaggtttctgggtcaggcctttgaccgtggtgtccagattccctttaatgacagtctgcgtggcctgtgcactcagcaagccgacagatccttcttctggtttggggcacaccctgtgctaatgtggcaggatgagggaaagaccagattccagtctggggcacttgaacaaatctgggcagaattttctgttccaggttgtttatccttgtttctgtacacatttggaaggtgtttgactggcagggacagaccaggaagatggaaacgtgccaaggagtgggcttcagggaacaagctttcgctgcagtacctcaaggtgtctgcacatcctctgacatagtgaccctcacattcctggagcatgtttagctgggcagcttctgggacaagcaccaacatttgaagtaaattctctaagaaggatatggaaagcttgtggtctggaagtgtcccgtagttccctatgatgag

SEQ ID NO: 46430 - DNA, 1661 bp, Bovine  19866881480416
  misc_feature (1)..(1): n is a, c, g, or t
ntctgtactttcatttcattttaataactagaatctagcttccccgatggctcagtggtaaagaacctgcctgccagaagcaggtttgatccctggatctggaagatcccctggagaaggaaaggaaatagcaacccactccaggattcttgcctgggaaatcccatggacagaggaacctggcagggtacaatttatggggtcacaaaacagttggacacaactcagagactgcacaacacccaccaccataatgagaaccaaaaaatattacatacacacacacaaacacagagccaattaatcaacagacattgaaggaaggcctaagagttgtgggtcaatcttctaaaacattagtttatttacctggaggtgagggaaggcagacaggatattaggaattttctcttctagagccaaaatggtctggagtagaattatgtctgcaagactcagctgattaccaacaagaaacctttgtccatgaccccgtaaaacctgcagggtataaatgttttacatcggttacaatggtcgacatggagaaactaatatagctatggaatcagtgcagcatctaagagctgaaaccatggcctttttcttttatctttttacaaataacatcaactaagaggaagttccctaagagagaatgagcaaaaaaggtgtagaaatgacagcatccataggtctctgctttataacagaatgagaccctgaaaagcagaaggaagtattaattctggatatagcatctggtgctttaaaaggatacagctattctgtaaatgcgtcagcagaaaagaattagtcctgatgcattcaggagatggtgggaaggatgtaagaagtaagccactggtcctgtccaaggagtctaatctatttcccagttctgtgtttctatgactgtcaggactcacagtcgtaaactagacacgacagtgaagaagaaaaaaaaaaaagcaggcttcctttaacatctaagatcccctggagaagggaatggctgcctactccggtattcttgcctggagaatcccatggacagaggctacaatctgtggagtcgcaaagagtcagacacgatggagcgactaatattttcacttcactttcaagaccaagaaaattaaaagaatgagaattcatcctgactcccatattgagggttaggtgcggagattcacaggaatagatggcgattggaaagaagcaaggaacagggggagaccaggggagagcccctttgcagatatgtgtatgtgcgtgcatgtgtgtgtgtatgagagagagagagggactctaagatgattccaaatcaaacagagtgactggagccagactggagaaagacagagtctggaatgtagtcagaggccagagttccagtcctggctcccaccttaggcatgtcacgcagtctctctgtggttctatttcattatgtgtaaaaagaaggtaacaggattggtggtccagtgggtaagaatctgcctgtcaatgaaggggacacgagtttgatccccggtctgggaagtttccacgtgctgcggagcaactaagccctcgtgtctcaactactgaagcccacgcaccctagagctggcaacgggagaaaccaccatatataagcccacgcgctacacctagag

SEQ ID NO: 46431 - DNA, 1120 bp, Bovine  19866881499275
  misc_feature (1)..(1): n is a, c, g, or t
nattctgaaatatatggactttatggttgagggcatgctacaaggatggtagacattaagaggaaaagtattcatagtcacatattcagtttctttgccagatgctagctcataggtgagcctgaagatatatgatttggggctctcctttgtaggttcaaagacctgctatagattctgcctaggaatttgtgctcagtcgtgtctgacttgcaaccccatggactgcaccttctaggctcttctgtccatggaattttccaggtaggcatattggaatgggttgccatttcctattccagaggatcttcctgacccaggggtagaacccatatctcttgggtctcctgtattagcagatggattctttaccactagcggcatgtgggaagccctcatttgtaggtgatgacagggaaatctactgctgccaccacagggctggcaagtccccatatattttgaagatgcatggagcaaggttacctttatctctgggctctgtttcagcttcgaggagactgaggaagacgccgagtgcgttttcttcactgctcttctggcctcggcttccaatttggtttctggctttggatggtcatgctctccctttgacttaaaggagaagaagcagtgaaataaacaactagacgtactttatggtatgtaaactcttatcctgttctctgctgtcggactgggtgctgttgcagttgactgttgtcacaagatcagagcaaccttttaatatcctcccagggttggatagcatcactgattcaatggacatgaggttgagcaaactccaggagacagtgagggacagggaagcctggcatactatatgcagtccatggggttgaaaagagtcggacacaattagtgactgaacaagaagcccaccaacccgccggcctttgctgatggcacgccttctttgcacggtgcctctccccagccctgccacgtcacattcatagtgataatgagtaacactgattatacatattcttgaatcttcagcgcaatgctgtgagggccacaccattaccatcacccccagcttacagagtaggaggcgatggaggcaggagagatttaccaccgggaaacctccacc

SEQ ID NO: 46432 - DNA, 1152 bp, Bovine  19866881787208
  misc_feature (1)..(1): n is a, c, g, or t
naatgtacacatatgtatgatgctgcactgcatatgtaacattaaaagattattttcatctccttgaaaattttcattgtcctcctttgaaaagttcccagagcaaattaaacaacactaaacacatgaaaagaaagagaaaacattcatttttaaacactcagcctgtttcaggactactgtccaacttggctgaagtgcctgaagataccagcatttctccagttttcttagggctgccccaccaactcaagattttcaccctcttagaccatcactgtaaagaagatgggcatcctcgaccaactacactacaaattccactctacttcagaccctgagaagcttgtctacacaaattaattataattagaccccccactatacttggaactaaagcaactgtatgacagttatctgaccttataagtttggaaaacttcaatctaaggaaaagtatttctgagttacaaggagcaagaagtcacacctgatatatgagtctgactgctctcaagttcaggctgacacagtttgagcacagactcctgaaacgtgagctgctgttggaagtaggacaggaggtctgccatcttgctgtcatcatcagtatcttcaatgctaagaaaagaagggaggtgaataaacccagtgccccagtctatacaacacagctttgaaactgatttttcacaggactttcaaatttgctttagaaaaagtcatctaaaagcaaacttcttactactctttttcaaaaacatggtaaaagtttaccctgccctgcaaaggggtaccataccaactttttgaaggaaaaagcctcagcaattttaattcccacagaggaagaattaaaaatttttggatataggtgttgagatttaattaattagttttatgataaggtagagatttcatgaattagtaaaaaagataatttcaaatgattttttaaaaatcatatgtaaatatatccttttaagtgaacataatccattctaattgaataaaaataaaatatacagatgtcatctgaggtacttacttaccaagaaggctttctaatatatgtaccttataacccttcctttagaggaaaatatataattttaaaaagcagggtccatgagtaatctattagcataaaca

SEQ ID NO: 46433 - DNA, 788 bp, Bovine  19866881804514
  misc_feature (1)..(1): n is a, c, g, or t
ntcttcatactaaagcacttatatctggcccttgtgcttttaaagagatgttagtcttaacaatattctatctacaaccaagtctgactagagtctagcattttcctaataaaaaacctttttaaaaatgtatggtttcaaacagatacaaaaggagaaagtctaattactagtgtaataaaaccccatgtacccaatttcaaccattattaaaccattattaacctttttcagctttggcctgattacactttaatcattttgactttatagatttcagaaagttgaaacacgtccattaatttactcttttcagtaatcaccgcttttattaaaagaaaaaaaaaatcctctttcattaccttatttttgttatatctgtttaaaatgtgcatttctataatcttaaaatttccctaattaaaaaatgtctacaactttataaacaagtcttcatgctaaagactatgaaacttaacagaattagcactgtcttatcatgctaagagtcaacagggcaaagacgcttaactttaacaaattctatatattactgtctatcaaattatatacgcactagctgtttccaacgccatcaccatctggagaccgggtataagtaatcttgaactctatatcaggtacaagttgcatagccctacgataaaacttgatggctaaaagaagaaataaagctaaattagctatgaccacacattttcgtcatttcctttgattacagtgatcgtggtttaatttggtaactttctttacaaacaaccaaattc

SEQ ID NO: 46434 - DNA, 838 bp, Bovine  19866882123733
  misc_feature (1)..(1): n is a, c, g, or t
ngtggtggccttctgcgtttcctgtccgcttcacattctaggtggtagcttgcagattatgtaacttattactggatgattaaagaagcaatcatctggggcacttgtgaaaaataactgatcctgggacttatctggcaatcccgtggctgggacttggtgttttcactgctaagggcctgtgtttgatccctggtcagggagctaggatcccacagactgcacagtgtagttccccgccaccccccgccccccaaacaacaacaaataccaacccctgggcctctccctaaagccctccttcagtaagtctggggccttggaaactaggtttactcacatcctacctgattgtcctcaggctaattgagtgaatacttctaacccattactttctcagttacttaaatacacataacggataaaaagatttaaagtgtttttttgattttgcttttagaacggatgcaattctactgggtcattatcgcttgtcacaagatacagacaatcagaccaaagtatttgctgtgataactaagaaaaaagaagaagtaagtatgcaaggcagaattggcagttttcttttaatttccataccctgctcattcaagagtcttcttaaaatttctttcttaaagtatagttgatttacagtgttgtatttaatcattcaatcattctcaattagaaaggatgaaacgtactcttttataaattatactgttaaacaaaacaggcgttgacttaacagcgtatctctgaagagaactggaaggtttctaaaatgtggttattttttatcaaatcaacttatttgtcctccaggtttcctatt

SEQ ID NO: 46435 - DNA, 1711 bp, Bovine  19866880137876
  misc_feature (1)..(1): n is a, c, g, or t
ngtatacatgtgttccccatcccgaaccctcctgcctcctcccctccccataccatccctctgggttgtcccagtgcaccagccccaagcatccagtatcatacatcaaacctggactggcgactcgtttcatatatgatattatacatatttcaatgccattctccccaaatcattccccaccctctccctctcccacagagtccaaaagactgttctatacatcagtgtctcttttgctgtctcgtatacagggttattgttaccatctttctaaattccatatatatgcattagtatactgtattggtgtttttctttctggcttacttcactctgtataataggctccagtttcatccacctcattagaactgagtcaaatgtattctttttaatggctgtgtgtgttttgcttcaattaaaaaagaggaatagatgttatttccccacctattcctaactgttgtgagcataagactcgtactaatcagagactataatgagcacttcatgcaattttctgttttttccaatgttctctagtgagtgagtattcctttcatgcttgggaaataaagaatatgtcaaaaaattatttttgtttgaaaagtagggtttaaaatctaggattttctcctatctgaactgagagtacttcgtctttaccaaaggaccgggctttagagtgactatttttatttagccgtgtcaccataatcagctaaactcagccgcattttgtgtgtgttcgtctttgactatttttcagatgtttagatgattggtgagaccccatggcacctgtttagaagatgtctgctcttaatttctaaggtaaatttaaggcacattcattaccacctttctccagtcatcggcctttgaagtaggcctttcgttggcttgccacagaactgaacttcaaggtttcccctgatgcctccttggtcttcctacatcacttactgcagttagtggcaacaatgcaggcagcaagtagatgtacagcaaagtctaacaaaacagttcctggaacaaagaatgtaggagcactcggtgtgatatctgctgatgaagagctccgcgtcaacagggagagacagaggagcaatcaaacaaatagatggaaagcatcaggctgaattacaaagctagtcaaggttagcgggagcacggtctccgactgcacaactcaggagctctccctgtggccgatggaaccgctcggtggctctgtctgatctctcttccactcccatccatccctctacatcacatcacctgtataatttctttcatcgttaagagctcacaccatcttgtctatttacttgtgacttacatggtaatgaaagctctgggagcagggacaccttgtgtctctctgggacaccacagtatgttcagcatctagaacagtgctcagctctggtcagcgacgcctgcagaacttctacccaggaactgatggagatggcaacctgtgtggaagaggaatagagttaaagctctattttcaaacaagccctatgttgcaagtatgtctggcatggctttgatggggaggtgttagagatgaggaaagcagctcaagatacctccctccgctgcccccttgggacgccatggtcccatagcattttagaactccagagaggcccgtattcatttattttatccttctaataaaatttaagaggaagcaatg

SEQ ID NO: 46436 - DNA, 2704 bp, Bovine  19866880193889
  misc_feature (1)..(1): n is a, c, g, or t
ntttctctaaagaatgaagacagttaattgaatatgtcgatatatacccacagcacccaccagctgccaaaatgttactagttgaggcaaagttatttaactgctattcaaaagcagagacattactttgccaacaaaggtctgtctagtcaaggctatggtttttcctgtggtcatgtatggatgtgagagtcagactgtgaagaaggctgagcgccaaagaattgatgcttttgaactgtggtgttggagaagactcttgagagtcccttggactgcaaggagatccaaccagtccattctgaaggagatcagccctgggtgttctttggaaggaatgatgctaaagctgaaactccagtactttggccacctcatgcaaagagctgactcattggaaaagactctgatgctgggagatattgggggcaggaggagaaggggacgacagaggatgagatggctggatggcatcactgactcgatggaggtgagtctgagtcaactccgggagttggtgatggacagggaggccctggcgtgcctgcgattcatggggtcgcagagtcagacgtgactgagcgactgaactgaactgaactgaactgattacaattctttgtctatattatgctgagaactattcatcacctttgttgtataactagaaatggtgttgcatgaatgaagtattaataagctatttatcatccctttaatatcttctgtttgatctggtaggcaaaattgattttttttcacttctacctattaaaaaaaaaattactcaaaactggttccactagataattttatgatcccaacactagaggtaaagagcttctctataatttgcaaaattcatcatggtggttcactacagaaatcagatgtcagcattgggtccagtctggtctctattcttttctctttagagaactacacttgttgattggtcatagtgagatatgtcttacattctgaatgaactgtgctgtgttgcattaatcattacatagctacagggaatgaaaataaccaatttccttaattaaagggttctggtaagacaagaaatgctctattcatcacttttcatttgtcttggctaatagtaatagcaaaaaataataccttgaatttagacagttagtttctttcaagaagttcaaagctctagtatgtctagtatatcatgagaatagacagatgagtactaatgaacttggcaaggagaaagagatgttatttatgccaaattaaagcagtaaaatgagaccataatttatttgatgaatgtattatctttcttaagatgaatgcagtgtggtgtaagaaagaaaaaacagaaattagatgcaggctattgtgtgtaaatcttggctctgttattgagtaactggggactcacacttaagcaaaattttaaccttgctaaactcaaggttctcacctataatagagaaatagtgaatatttatcttgtatgattactgtgaagataaaataagagttaagtatggccatatatatgaaagtgaaagtattagttgctcagtcctgtccaattctttgcgaccccatggactatagcccaccaggggtcctctgtccatggggtttttcaggcaagaatactggagtggattgccattccccgacccagcaatcaaacttgggtctgtttctttactgtctgagccaccagggaagctatctatctatctatatatgtattctatatataatatctatatatgtattatatatatgtattataatacatatgtattatactatgtattatattacacatgtactataatacatatatatgtattatatataatacacatatataataatatatataatacatatgatatgttatattatatatcatatgtattatacatgtaattatatgtatacatatgtatacataatacacatattattatatgtactatatgtatgtatatattatattatatatgttatatataatatatacatacatataattacatatataatacatatatatgttatatataatatatgtaatatattttatatatgtaatatatatgtgtatatatagagatgtaatatattataatatataataatatattatatatgttatatataatatatacatgtaatatgtatgtaaaaacatgtaatatattgcatgtaatatatgtgtaaaatatatgtgtaaaaacatgtaatatattacatgtaatacatgtaatatatgtaaaaacatgtaatatattacatgcaatgcatgtaatatataatatataaatgtaatatattataatatataataatatattatatgttatatataatatatacatacatataattacatatataatacacatatatgttatatataatatatgtaatatatattttatatatgtaatatatgtgtatatatataatatatgtaatatatataatatatataacattatatgttatatataatatatgtattatatatgtaattatatgtattatattatataatatacatgcatattatattatacacgatataatatatatgtaatatatacataatatattaacattatatatatattaatgctgctgctgctaagtcgcttcagtcgtgtctgactactgtgcgaccctatagacggcagcccaccaggctccc

SEQ ID NO: 46437 - DNA, 2325 bp, Bovine  19866880499693
  misc_feature (1)..(1): n is a, c, g, or t
naactatgacagagtgcggccttgatacgcccctcgaaatgtttctcctgcagtgacttttgggttagcgcttggtggggggtccccagggaaggtgatctggccttggctggtggcaaagtctggcaggcaccctggggagctgtgttggggctggcctcatgcacagtctgccacaatgagcaggaagagggtgtagctctggctctaatggagttcgcagatgctggagacatgttgtaaacaccaatgggtgtgggtgactaggagggtggagaagcaggcaggggctgctccagcagctcagagcgggtagaaatatgggcgagaggtgatgaaggaaactctgtccactggggcttgtttgggaacagagagaggcctggggacactccctgaacaagaggcaaggggctatggaggcaagaggggccctaatgccagagagagaagtgccgggaaaaatgacacagaaacctaggaagtgccggcctcgtcccctggcaagtgctgacccagcggctcctagtacaagcctccgtagcgagggtctgactctaagagttggtccccagtcaccaaataatggggcttcctaggtggctcagtggtaaagaacccgcctcccaatgcaggagattcaggttcgatccctgggtcaggaagatctcctggaggaggaaatggcaatccactccagtattcttgcctggaaaatcccacggacagaggagcctggtgggctggagtccacagggtcgcaaaagacttagacacggcttagcaactgaataacaacaacaacaacaaataatagcacaattgacattaactaacttgaaacttgactcattggaaaagactctgatgctgggaggggttgggggcaggaggaaaaaggggacgacagatgatgagatggctggatggcatcattgacttgatggacgtgagtttgagtgaactccgggagttggtgatggacagggaggcctggtgtactgcgattcatggggtcgcaaagagttggacacgactgagcgactgaactgaactgaactgaacttgaaacttgactcccccactcactagctggtgccttggcaaatcactaactttaaactctactttttcaatcgcaaaatgggtagaataattagtaccttccacataaagtcattttgaggattaaatgatacaatgcatgtgaaaaaaaaaagaaaaagaaacacttggcatagtgcttagctcaagttaagcccataataaagggtggctgctaatggtactattaagtgcctcttacgtgcccgggcaccaggtttgtcattgtgcaggaacttgcaggaaacagatgacagactcatttgggacacttaaaatacattttatccaagggactatttgttgacgtctgggtgagagtaaggggaagagtaatagatcttgagacacccaggaactaacgacatttgtgacttatcctctgtccctcagcctcagctgaaagccagagcccaaggacatcagccaccaaccacgacagctggagttagagtgtgatgagagggatgcagccattggccaagaaccaagcaaaagcaggaggagtgattaggaggccctctctctctccccgagtgcccctcagtcttctgtcactgcctccccttggctaaacgccaagaagaaggtggaaagcaaggaatgccattcaggtccacctcccaggcaccagtgaagcagggcagaggctggtgaagcacaaatccgagcacagggagccaacagaacaacagcccagactcccaaattcatttattcgtctcattaaaccctaagaacatcggggtcattatctttctttttcagatgagagaatttgactcaggaaggtgcagcaactcattcagaaacccagcttgaaaactggtggagcccccactggaatccgaattcatctcctcagtgtggcctccatggactccatcatgccaatcactaatagaacagatttgaaagcccctccttatccagaaggattgagtgggagggtattcccacataaaaccaaaaggttgcatagaattttaaatgagtgtgggttaaggaatggtggtacaaacaagcagaataagaaaagtggatgctgtgtgcccacgtgggctaggagttcatcgtccttcaagagacatgtccttgagcgccatcagcacttcctgcgggaccggaagtggcacgtcagctggtagacacagcctttaagtacacggcatttccaagggccacagctcttccaagtacattctgtgcatttacacattt

SEQ ID NO: 46438 - DNA, 1089 bp, Bovine  19866880529321
  misc_feature (1)..(1): n is a, c, g, or t
nactgacgggatgggagcaggttattctgcctttttctagatctttgagttgcacatcaaatctagggctgatcactccacacttactcagcctgcctgtgaggttcacaacaattttcccagccctgtgatcatcaatgatttcaaattcgccaatgtaaccatgcttcatcatcactgttagaaacctgacgatgactttggagcacggcctaacaaggacctggcgtttgcctctcttttcggcattgttgatactcttgagagcatcggccaggacattcatgtgcaccattctggcggcacagaaagatggcggaaagagcagggatttgaatctaggagttgagtgactttttcttttagacttcaaaacttagagttgatttctcccctgctttcctcagtagggctaacctcttaacccaccctttctagacaatctgcatatcaagaggcccttaatagaatggaccactctcaagaatttcacagtgattttcagaatctctttcagtgaagaaaacgtagaactttcctctgtacttgaagttagaaagcaaacttgagtactgacaatcttgcaggaaaaaataaattttaaattacccatctgccactctctccagcccctaaatctctctgtaggcggaggtagggatttatagaatataaaatgtaaaatttagagtctttaaaaaccctgacattctttaagattgcagatctcatattaaagtagaataaatagtttataagatggtgaagagtataaggttggtgtggggatagcagatggaaggaccttgccaggtagtcagtcagtggccaaatcatgaaggccgttgtgttctttgctaaagaaatttgattaatcttgtagtcagtgaggaacaactaaaagatttaaagatttgtatttttaaaagatcactttacagaggcaatttagtggggtttaggggacgagggagaaggatctggggagattaagttggtttctgtgttttaattgtctaggcaaaaggtttgaaggatcctagctggaaatagagaggagatggatatgaaaaagtaagagagagaacc

SEQ ID NO: 46439 - DNA, 3579 bp, Bovine  19866880534187
  misc_feature (1)..(1): n is a, c, g, or t
nctccatatggcagccaccttgaggttcaactaggtgagatccacttccaacctcacacagtggctgttggcaggatttagttctttgtggactgtgggactgcggatctggctcttggccagaagcgaccctcagttccttaccatggacgtctctccatacttcagcttacaacatagcaactggagtacagtaatatatcttctcaatgtcagaaatgctgagtagttactgaattccgacatgctcgactctgggatggtttctttgaaaaagaaccttagtggggaggctctctttggagccatgggagcaagcctgatgattgtactggaagtgctgtggtggcctttcaaatgcctgagtcactgaaggaaatacaaatgctaaagagaattaatgtgataagcaagtgctgttggtgaagcatctaaaaaccacagactggattttatctaaagcacagagtatggtggaaagatcatgggctttagagtcatcccgacagagctgggttttagttcaaattttgcctctttctagctgaaacaaataatttaacatctttaagactcagctgtttaccctcaaagttgggtaacaataactatatcgctcacaaggtttcatgagtatcaaggatcacactaaaggttatagataagtttcagctctcatcttcctctaaaaacttgcatgaatccagtagaggtaatacttaacaatgggctctcaatgggtaggagccaagccctgatctgtagcatttgcctatatctatggtgaaaaagttctaccatgtcaacatctagcttactaacctggtcaccaagcatggagttaggaagagatgtgtgaagtcgattcttaggagtttctgtccctctgcctctgtccagctttctcttttattctgacttacgccttttgttggggctatgacccattttttcaaaattaaaaagaaaaaagatggctctgtcttattctatcccctctgagtagatcaaccctcactgaatagactatattccaccaaggataaggcttggttagcagatggcacctttgtccaaagaaaaaagcacccccttccccctgtatctggaagtgtataaccctaagtcaaggcatagggctttgtaagaagaacatggactggatttcactgtcctctcacccccttggctgaggacccttgtacaggatagaacctctccagtttatcaggtggtcttgctttttgtggtttccatttgtcaagtgcagtccctccccttccctgatgacaactgctcaccaataggctatgactaccgtgataaacaaatcaacttttgtcccccattttttattccttcctgaacaagaaagaaagagaatcgtggttgtctctcaatacctggttctgtgcaaaaataagtgtgtagacatgagcatgtgtagggctcagaagattggaggagggaaatcaaaaaagatgtgtgtgaaattttcctagttattaaaatgcttccttgggaatcagctatttgcttaatcactgagattccttttagatcatagaaaatgctcacttaacaaatagaaacttcatctcatttggaactcatcttgtgaggtcagtaatataattatcgtatttagcagatgagcagactaagactcaagagaagtcatagaatgcttaaactgggcctcaaaccaaggttttctggctttggctttctggctttcttgactgcattatctctgttccctgttatcaactcatccttctaggcagtctttcttgattggcatttcccgcctgaaccaaggaatacagaaaatgattagaatggccattatccgaattctcccaaggatacatctagtgcattctagatgaacagggagaagttcagtcactgtggacaatggatgcctcagggcgataggacttagttcaattgcccagaaacacataatccctaactaaatgcttcaggactccacatcaccagcaaagcctgcagtgacctgttcagggctatactcaaagacgttctccttccagttccaccgctgcgtttcacttcttgctagccaacatccaactcccttctaggacaaatgagatatttaaaaacaaaacaaaactgtgctcttagaaaatgtcctgggttatacgtgcaaaactggtcacctggccctgcatgttgtattaacagatcaccacatctctgggcctaggcttctcatctgtctaaaaacttctacctaaatccacagtcagaagatagcatgagcactcgagagcaacaccaccaggcaaggcatgctggcatttgtccactctgcaacaggacgagaatttagagacaaagcatgatctcagcctagtaaagaaactggaatgtaaacacctaacaactgtaataaaagaggaacccagagggcaagcctgggggaggggaggggagtgaggattggatgagatttaacgaagacagagatttttgaagtaagtgctcaagtaggagtaggggtttaccagggaagggtaagagatggggagcagaggatggatcagtagactcagtgagtaaatgatatgccataacccagggtgaatgctatgacccagcgggaaaagaggctgagagtgttggctaatgtcattgtaaaaggacttgcatgcaattttgagtggcttgaactttatcttgaagactaggagctctcaagacagaggaggaagagtagagtttatcctgcatcagattcatttagagctttgtattcaaatgtttgccaagtttatgtagttaaatatattagtctttgccagaataatttgtgcttttggtattatgctttaaaagccccatttgtatgattatttgcctacatctattttctggtactttgttatttgtattttttaaatgtttaatctgtctggaatttatttgccatatggtattcagttcagtttagttcagtcgctcagtcgtgtctgactctttgcgaccccatgaatcgcagcatgccaggcctccctgtccatcaccaactcccggagttcactcagactcacatacatcaaggtcagtgatgccatccaagccatctcatcctctgtcgtccccttctcctcctgcccccaatccctcccagcatcagtcttttccagtgagtcaactctttgcatgaggtggccaaaatactggagtttcagctttagcatccttccttccaaagaaatcccagggctgatctccttcagaatggactggttggatctccttgcagtccaagggactctcaggagtcttctccaacacatatggtattaggtaagactaatttccccctaaattgtgaatcaattacttaagcttaatttgtcaaataatgcatcttttccttacttttattgtagagttttaaatcagtttcttacctgtttttaatcagcttcttactctcggatttgcctaattggtatcagtgctacattgtttcaattgttgtcactcttttttttctggcatatttagcatcagtgaaagttcctctttgctatttttaag

SEQ ID NO: 46440 - DNA, 2839 bp, Bovine  19866880585476
  misc_feature (1)..(1): n is a, c, g, or t
ntgttctccctgatataacccaaacaactctgtgtcacattttattaagcgatttagtaccgtggagacacagcttgaattgagttgaaaattcagtaaaggtagagagccaaaggcaggaaatttgacttactcctctcctctagaaaagacctgtgagatgtggcccaaagataaatccagaagaaatacctgagatgtgcaaagtcgtcagaatccaaccattccatagagtccctggtcagtgtgcttccactgatccacacagttatgtgaaggagcctcccagctcactgttctgacccttcttggccatgctggatagcagcagccttctccaaacatggcaagcgcttgagatctctaagcctgagcttacacttgttcctttctctacaatgtgcgggcatgctcagttgcttcagtcttgcctgactcttttcaaccctatggattgtagcctgccaggttcctctgtccatggggttttccagacaagaataatgtagtgggttgctgtgccctcccccaggggatcttcgaacctgtgtctcctatgtctcctgcattgcaggcagattcttcactcactgagccacttgggaagcccatttctctgcaaggcgttttcccaattcctaaccagcccagcctttctctccccacagatgaaaatgatcttatgttctcttttttcagtctcatctccctctaaatcctcctaagagtcaactcagaaacctgttccctgcagaaagtgatctcacattccctagataccaatttctccaccactgtctgctctctttggagggatttacttagcattttctacatttatagcatggctttctatgcatagattaccaccttccacaaatgtaaggactttaaaggcatgatctgtatctgctgtatattgaggcccccaaaactgattaaaatattaattgaatgggacagttaccatgtatggcggctagtacacgctcagccgtgtccaactcccagataagtccgctcacccctctgggccttagttttcccctccatgaagcagcaatgtctttgaacctgttgtgagaggacagctgttaaggcagagttaaaccaggtgcccaacggcatcaacatttctctttcctatgtagagttagggatgagtgaatactggagggtaacgctttctttgttcattgagacacaccttcactgtacaaatttgacagagaagaaggatacagcagaaccagctgtgcctttgggtggaggcctgggattcaagctgacctatttctatatccccagtgcccttcctgacctggcacgtgaaggccttaggtcaatgttgactgcatgaatgaaggtctttatccagccgaggttcagaagaaaggcaaggacatgttctagggattgcggacagggaaggaagctgatcttttagaactgaagtgttggactggggaatagctatcagccaggctgaaaaactgagttcccagagaattagaccagagcttcgtaaatcatgcccgggtttcgtttagggtccctccgtaagtccgggatgggttgagtctcttactgggagtcacggggctacagctgttaggaaaggcggattgggccattcaggagcctggctgagtctctcctgagggcaagtcaactgcatctttcctgcaggtcctttgagctctccggcttccctggggctccgcctgtctgctgagcagggcttactgccctctcacccttcatcccttctctctccctccctctcctttagctccttgatcatgcaatggcgggttacacaaaagccgcaaattccaagctatatgtagcatagagcggctgtttgtcccaaaataccacgtcgctgactacagcaaacacaaattacaagctttatctaatcacagttatgggacccgtcatttttggtttccaaaaatgactgcgagtggcgtgcttctgcagctggtggtggcaccgaccggggtttcagatctgaagtgcacacagatgcacagggagatgggcatcctgagtgaccaattcagaaagggaaataggacagggaagagaggaagtacaactcaccagatcaacaaactccgctgctcgcgacctcaaaaataaatgctttaaaattgcattgcatcaccactgcacccctaaggttatcagccctcatctccctggcatctggtttcctaacataaaaggtgacaccagagtcattctcgagtggccacgctggggggtggaaggaagtgaggcttgctgggaaatcactgatgtcttcttggggtcgagtttgttcattttctttgctgatcttttcatcaggaggtcacactgaggaaagcacgctgggtgtggagtctggaccctgggttggcttgtgaccatgacctgggtcacgtctccaagtgaccttttgaatcgagggaggctgatcacaccacccagctccccggggctgacaggagggtaagatgaaggcgtgtgtggaagtgccagccacccattgggcacatcttggcctggatgagagggacgggctgctggctgggagctggattctctttatgcgccatttcatcataaccatcacgactgcttcttacgcccatgggtgtgggctttcactcacaagcaacaggcaggagggggcccaactcctctgttctcctgagggatgacctgggattgtgattcagagcatcaaacagggccgctcagattccagggcacacatgtacacactcggaaggaaagctctctctactctctctctctctctcagtagctttatataggccaaaga

SEQ ID NO: 46441 - DNA, 1071 bp, Bovine  19866880586298
  misc_feature (1)..(1): n is a, c, g, or t
ntatctcatttcaaaactagcacgtcttttttctttatgctacaaaagataccaaataactttctaaaattttcttctggttcctgtcataaatctttttaaggcagcaacttattctctgaattgcatggttaatattctttttttggttattctgtagatttttcagcagttttcccttgaaattctcctcataatgaaagctccacgtagatctgacttttaacaagagaagctctgtcaggttagggtagagtgttctcctctcttacctcttggccctttggtacttagaactgatggaagccatgatggcattccggagtccagcgtgcagtgctctttgccgcttcctcctgcctgcaggccccatctcccaggtgtaccatgctgccctctcgcatggcctgacgtgtgactacttagaattttagtccttaaataggtacaatagctacggcatttttgattacctcaaaaagcagtgcccatgctacagagtgggatttccaagtttttctggttgtttctgtcaggcttaattttcagtgttgatggaggttttcctctgactttcatgtacattttaatggcagcagctcccgccggggctgctagccagatgctattgtaaagtagaaataaaattactgggccaaagagtctgcacactgaaaactctctgtatatattgctgaatagcatcccaaagacttggtactgatttgctcttctgtcagccaggaactttttcccaagctcttggatctgtattattgatgtctcatagaaatgattccttcagccaaacatttttattatcatctgtctatgtgcatagtcagtcatgtttgatatttatatctttaaagcatccaactgacaaacttgtatgtggtttttttttttttcttaaatatagcatcagtgtgctttatgtagcaaaagcccagtgtttgctatcaggagttcaagccctgggttttcccacttacccactgggtgatcaggacaagttcttcaagttctctgggcttcatttgcgaagtgtttactgacatgcttgccaca

SEQ ID NO: 46442 - DNA, 1169 bp, Bovine  19866880592556
  misc_feature (1)..(1): n is a, c, g, or t
naaggtggtgtctccggacccagagtgactagtggcctacaggctggcactgcatatcagaagataaacacgtcaatgggacaactccagtctctacagagttggagagtaatgaggattagctgccaacatgtaaaactcgggaaaatatcacatgaaaattcagacttgtggcttttcttggggaaaataaaaagtatatagtaaaactgggcctgcattcttatctggcaaccaccagctaaactgagagctgccattccctgctctgatgctgaagctccagtactttgaccacctgatgcaaagagcagactcactggaaaagaccctgatgctaggaaagattgagggcaagaggagaagggggcgacagaggatgagatggttagatagcatcactgactcaatggacatgagtttgagcaaactccgggagagagtgaaagacagggaattgttccagggcttgctgcagttcatggagtcgcaaagagtcacacacgacttagcgactgaacaacaaattccctattctccgtggtcttcctgatgcccctgcaacccgtttggtacctccctgtcttcattcaactttgcacttgctgacttaaggccctgccagactgagctacaagagacattgggcctttctgaggaaagggaagaaaattcatagaaagtgaatacatttaaagttgctcaggcctgagccccacctgggccctgggccctgactgaagggacaggaatgctccttgcaggcaagagtacaccctacttaatggacagacagaaaacctgagctgcctttggagcgagatggggagtttgtggttgagcacatttatttctgaacttaatgacatggagaaccacaagcctacccaaagtatcaactttttcataaaaaaaaaaaggagaaagtctattgagtcaaatgttccaagagtgcctgggccagggaaacctccagtatatttataccttggatatacaaacaggaatgacttgttcagcggagaaaagtaataagagctaatcactgaacacttgttttgcgctctctttccatgctcacaattatccagaaaggttttatatttacagatcaggaattcaaagctcagagaggttaactaacttaggcaagtcacacagcttgttat

SEQ ID NO: 46443 - DNA, 1114 bp, Bovine  19866880795770
  misc_feature (1)..(1): n is a, c, g, or t
ncattactagccaagagccaatatagcggtggagttaagagcttggtatcctctaaactgactgcttgggcatgagtcctggttccattattgtgaggacttagttatttctgttttctagcccatggtgtttcttgcactaggatggtaagaacagtacctactacacacagagatgttgtgaggattaaataagaaaatatattaacacaccctgacatccaaataaataaagttattagtacaaagctaacttatagtaaatattgtaactatatgttattctttaaaaaataaaagtttagtatttaataaaatgttataatgaagtggaatatgtatttagctctctcagaaattcttagcatggcagcaatagaagacatgtgggaaaaatctgtttgagggagaaaagaatcattaaatttgcttcctgcagcaaggccaatagaacatccacaaaatgaagctgtcatttaactcaggataatgttttgcatttatgcagcatcataaagtggttttcagaagtagcaccttttcaaagacattgctatcaagcatgagcctgactcatctcgagattactgtgataattaggtgacgaatgcatttttaaaaggtgactcaaaatctgtttttaccataaattactcacttttaaaacgatctttctgatgcatggaagtttcttcaagacaagtctctaactttctaggtgatttatggaatcatccttgaagtatgagatttggtcgattgatttattgcagttttcaattttactgtagtttaacttgtgcatagagcaataggagttaatttcagaaaatgtgtgtgtctagaggtacaatgaaaagaaatatgtcaatgtcacctaaaagttttgttgaaaagtaaaaatttgaatcacatttttatatgtgtctgcaacagtagggagtgattgctgccagatttgtctaaataaattaaacagctaatgctgcagagatactaaatgaggtgacaggcaacttcctcagtgtagatgctggattaatggtaacagtctgtttaccagttattgagagtttgctatgtgccagagcctccagttgctgccttgtttaat

SEQ ID NO: 46444 - DNA, 1235 bp, Bovine  19866880802301
  misc_feature (1)..(1): n is a, c, g, or t
ntgctattaatattatcttagcttattaccaaaaaatcaataataggccagagatctaatttgcattcatggcagaaaaagaacagaaaaattgtggaacttctcttttactattttttttcccttgagtatatggtttttggctagaattttatttcggcagtgaatccctttgattaagctcacaggaaatcagcatatctcacttgagaagttaggactctttatctctcctatttacgcttcttttttaagggatcttaatccctaccacctcccgcaacacgcgtgcacgctcgcgcatgtgcgcgcgcgcgcacacacacacacacacacacacacacgctggaatggtaaactacaatccaagtgaagttattatgaacgtcgattggtgaagtttaaatttaaaggaacctgctgtattctaaatcatttttgaaaaacaagaaggcgacttggagagaggcaggagtgtgctgtgactaatgtggaactgaattcaaaccttgttttccggctcagtctttttaattgcagcaaattgtgacttcctgtttttttccagtgcagggacatggctaatgaataaggccccataagcacacttggacatcaaatgactcttacaaaagagcattttgatgatttaagtgtaaataaattagaaacatacttcagtatttgatgtcttttaaagtccccatgaggttaaaaatggagagccagtgaaggatgagagaaaatgagaaactttgtgacatgaactattttgaagtactcttggattcgataagtccctaaataaggctgatttgcatattcttatttgataatgaaagtgtcttcgttaatcctgacaatcagagtaatgccagtaacaattatagttggaatctgtttcagcaaatgagcatgtattttttataaggaaatgatcatatgctaatacattctaagtcataggtaatgtttcctgcatttcctaaagaaagtatcttgtgagaaaaatgaaagcatttttctgctgtatgaggatttgggggtgggggacgaaagacggagagaaaaaagaagagactatatttcctggatcttgaaagtttttggatagtggaagccttggtttcaactgggttggttctaagttaaaacaaaataaattatgaacacttcttgctacatttggtaacgttgaggtcagaacttctcattctggtaagccttcttcactg

SEQ ID NO: 46445 - DNA, 854 bp, Bovine  19866880860585
  misc_feature (1)..(1): n is a, c, g, or t
nccgcactctgacgatggaaatggtctgtgtctgcagtgcccaatacagtagccactagacatatttggccactgaacacttgaaatattgcttttaccactgaatgtttcattttatttgaattaatttgaatagcctcatgtggctagtaattaccacgttagacggtacacggctaaagtcctacatctttagactgacaatgaaactgttccagacctaatacacagtgacagcccttccccctcaatttcagacgtgtcataacttggggttaagccaggacacgtgatgtcagcaagcagaagggaagggaagagaagatattcttgtgactttaagtctaaactctcttctaggtccagctataccgtcttgtgctggtaccccatccgccctcccccggcacccccacgccaccgtctcccccctccctgtcaaaacatggccttggtttgttggcctcagccagactttggactctgtcccgcctccgcttacctcctgtagaattggatgctgttggtcttggcaacaaccttgaggctacacttgtttctctaccagcgctaattagttactgacaaacagcaagagagcctcagggtaggcccacatgcaggactttcagaccaggtggaaaatgtcaagatgtaatggaacttctgctctgaatcacgtctggagaatgaaatattagagagaggcggatcctgaaacacaggaggagaataggagaatggagcacagttctccttggagcctcctcatctctgcaacattactgggaggcaagaaaacttcatgtggatgggcagggccaggaggctgcttagctaaacctccctttgct

SEQ ID NO: 46446 - DNA, 2695 bp, Bovine  19866880888495
  misc_feature (1)..(1): n is a, c, g, or t
ngagaaaatatttacacgctagccaggaatggtagttggagcatatacagtaccattatatggtactttgtgtatcaaagttatacaaccatgcttatctttaaatggcagatgtctctttctctctttttgtttttggtagtttctaattttctacaatgaacatgtatgtcttttataatcaaggaaagaaagaataaatactttatttaacaagacagaccccctaattgtgagggtaaataccaggcagctgaaaggagaaagaaaaaacaaaacaaaacccacgaggtataaaaataactttccctgggtttgatcttccagcaacaagctacaatctcaggaactctttctcccctgagcttttctgagtcccatgcaacaaaataaggcaaaatgtgcccgtggaattatattgttctcaggtagaaaagagaaaccttttgtgcatttaaaggaaaaaagcatactggtcctcccaagtcttatttttagttttactataattcggtctcccaaaggctctgcagccaagtgaactcggaaagtttgtttttcattcttgaagcgtcatttgttgctctgcttcgtgtggcggtgagtgccatgcagcctcactgcaggcagggacttccctggagattagtgtgttccctggcattcctctgatttggccccagcccctagctggcctccacaattgctacattatttcctgggaggagattcagaacttggagcagtaaggggatgagagcagcggagaagctcagctgggactgtggtccccctgatacagccctcaaaacccagacaccaagaggtgagtagtctgccttttgtcgcccacggggaacccggtatggaaccagatgccacaggctgtgaccagcttggcctcaagccttgccctgacatgcccagatgctgtcttttaaccccttggtgacatcccgcctacccagatgccaagaggccttaaaaatcttctcgtgggcaatgtatggagagaggaggacgagttggagaaggaaaggagaaaggagacaagaagagacttatctccgtaataacagccagtgccttctgcgtgccagactttatcccagacaatttactctacagtatatcatttaatcctcaaagcaacacaatggattcggtagctggttttgtttggttggttttgcctgtttttcagagaacaaaactgaacttcacaatgtttatgcatcttgcccatgtcgtttagtcactcagtcatgtctaacttttgtgaccccacggactgcagcacaccaggcttccctgtccttcactgtctcccgtatcttgctcaaactcatgtccgatgtatcgatgatgccatccatcttgcccgtagtcatgtgctattaagagcaggaagtaggacttgaccctgacattatgtgtttgggcttaaatctgagctatgattccttctactgacccctccccaagcacccatcacaggtgcctggagagctgaggtttttcctccaaaacagaaaaataaaaataaaaaggtgtatgtgtgaccagttgtgtctgactgcgacaccatggactatagcccagcaggctcctctgtccatgggatttcccaaaagaatactggagtgagttttcatgtccttctccaggggatcttcccaacacagggatcaaacctacatctctggtgtctcctgcattggcagggggaatccttaccactgagccaccgggaaagcccacatgtggcttggctgcccccaaatattcaggggctccctgtttcctgaacttatttgtcaggattccatatctacctctacagtctctccccaagatgacccctgcccatctacccaaatcccaggtctgtgcaggatggctggtccccaccttgggcctccacccttccaagttcaaggctgtctctggttttaattgccaggtagcttctctcctttctccagtttcctggaatgacttcttttcagcccaataagtcaagaagccaatcatggattccattaagtgcattaactccttcattcaaccagcaaattttcttaaacagccacaatgtgacagaccctgtgatttaaatcctgaataaatactccagtgaaactcatagggaagtcgagaaagactgttctgaagatctggtggttgatcggggatcttaaagttgagcaagaaaagttaactagaacaattggaggagggggtgttactaagaggatcagaccaaaggaaccaccatgaaacaacagacagaccagagacaaaatgtaaactcgctgtgggaatagggccaagttgttctaccaagctttatgaatctcagttacgaaatgatgtgtgtgtgtgagtcgctcggttgtgtcttgtgaccccaggggatgtagcccaccaggcccctctgtccgtggaattctccaggcaagaatactggagtgggttgccattcccttctccagggcatcttcctgacccagggatggaacccgggcctcctgcattgcaagcagatcctttgccatctgagccaccagggaagccctactagataatagagtgtcattatccagtcaactccagatccctgatgtcaccaccatctgttatccctgcccaaacctccactaagaaagggacttcactgtctgctcactactct

SEQ ID NO: 46447 - DNA, 1527 bp, Bovine  19866880912160
  misc_feature (1)..(1): n is a, c, g, or t
ncttgtctggaaaattccatggacagaggagcctggcaggctatagtctgtggggtcccaaagagttggacaagacagagcgactgagcatacacagatcacgtagattatgttcctgctctaaaactgtctgtggttccccatttcttgaagggaaaagtctgttcaccacacatcagcagttaatgggatcttctgcagtatccctttccatacctatcactggaattcaaggggaactacctctattccctgcttgttcttcctgctgccctgcatctttgctcactctgtcccctctgcccataatgcccttctctccctttgcatattcaagtcctactgatttcccaggcacagttgaaattctacctcctccacaaagcctttgcctcttaccaatcagcctctctctcttatcttaaaccaccacactgtctctcatggcttctcagtcttttgtgctttacgttatgattatttatccacatgctcctcctaaccccttctcacatctgcagacatccatggaactttctggaaaggaggcagcatggtggcttcagaagggaaagacatgtggagctggtgaacctgtgtatgtacacctcactcagccacttggtaactgcattggggtagggactcttatctgtacagcctgaatggccagcccataggagttcaggagataatcaaggagccaaggggcaagtcatctcatctctcggagccttagtttcctcgccaattaaacagggaggaaaatgatgataataatacaagcttacaggataacacttgtgaagagtaacgggtaaagaagaaatttcttttttttttttttttaagacttttttgatgtgaccatttttaaagtctaaattgaagttgttacaatattgcttctgttttttgtttgtttttttggccacgagtcatgtggaatcttagctcccagaccagggatcgaacctgcaccccctgcattgaaaggtggtcttaaccactggaccaccagggaagtcccaagaagaaatttcttcataagtattatttgagtattctactattaataggaaacggacatgtctgttgtcaagaaaatcattcatttcctgtaaagtcctgacgctccgctaggttttctatgtggccaataataagtgcacgatgtgctctgttactctgctaagtgctgtcacatgttcccccgtttaatcctcccaacagcctttggagggaggaggtgcagatgttgtccccatgtcacagaaaaccagggctcctgacttgcctgcactggatccgagcctcagccaaaactggactggaagcaggaggagtgggaagctgaggcgtgatgggctaactggacggtgcctccagctggggagtgagatggatttccaggatgtgttgggaccgtcgttcccctgctgggctgggcacagtctcggatctcagcttttgtgggcctggctggtgactgtgacgatctggaatttcggggcctgagctggcagg

SEQ ID NO: 46448 - DNA, 1502 bp, Bovine  19866880979180
  misc_feature (1)..(1): n is a, c, g, or t
ntactaatagaagcccccccacccccaccccaaccctgatacccggactaaacaatgccactgcctccctactaataacaaatatatccagtgatttaaacattggtgcatccaatgtaaacaccattatagctaatgtaaaacagttacccagccaagcaaatccaccagcaagttactgaagaaaaagaacagtttcctcagcaagaatgcattacagcctgccggtgacatttgcaatagattacttaagcccataaagaaatgaaaattgcaggcccatgttgagccagaaatgatgaaattggagagcacgggctaagtgcagtatgggacagagcggcttctgcccagggtctgcaggcccggtgtggcttggaatgcaattgccctgagtctctgcgtagacgcagcctcaggtactcgtgtcctttctgccttgcttccagtctgtggtttccacacgtggaggcacgaagctgaggactggcctttgcagtgggtaagtgctcacaagggctgcagctggccgaacgtgagcacgtgggcgcctctctccccaccagtgctggcacaggagggtcagcgcaatggtttctgcctcacactgtggaacttctccttctttcaggttacgcagaaggccagggttttagggagatgacctagagactttttcagagtcaaagtgggattataaatgcattcatctgatttttatctcacctggagcctctaaaataaacagatggacccccagacaacaagacgtggctgtgttcacaacaagctcttgttcattcttgcctgcttcctcctttcaatccagttccatgacttatcgactcctgacatctttgcatttcctacttctggaaacttcctggatgtagttccagtgattctggatgtgtgctctctcactctctcttgttttaatctgtcaagcccactcctgctaaataacccaactcagcaagctctgtctaccaggacttctgaggggtgattccaaaaagaagcagctcataactccaactctcactcgaacacagagggtgttctatgcctgcgctgtgagccagtgctcctgacttcccactctgctcaggggctccctaggaaagtttcaaatgtccccaaaactgtaaagatccattgtgattcagagaaaggaaaaggaaattgcccaattatctcttccccaactatttcaatcaaaattagccacctttccctactggctcagatggtaaagcatccgcctgcaatgcaggagacctgggttcaacccctgcgttgggaagatcccctggagagagcaatggcaatccactccagtattcttgcctcgagaattccatggacagaggagcctggcgggctacagtccacggggttgcaaagaatcagacacaactgagtgacactttcccttaaataattttcatgaaaaaatgtagctaagcttttctactgatgacagaacttaccaattatca

SEQ ID NO: 46449 - DNA, 2029 bp, Bovine  19866881008293
  misc_feature (1)..(1): n is a, c, g, or t
naaactagtaattatgtacccccagaagtgacactgcttaccactcatttgcaagacccagactcagggaaagctgagcgcaggaaatacttagtgaacagcatcagtgactgttgcagcatttgttatctttaacatactgtatattatatgtatttatcatgtttattatctgtctccatgtctagaatgtctgttctataaggacagaggtctttgtttcattcatcaatgccacttcagtgcccagaacgggctttggcaaaagcagactctcaagagttggtcaaatgaataaataaattattgtcagttctaccctcacttgcaggagagggtgatggtaccccactccagtactcttgcctggaaaatcccatggacagaggagcctggtaggctgcagtccatggggtcgctaagagttggacacgactgagcgacttcactttcacttttcactttcatgcattggagaaggaaatggcaacccactccagtattcttgcctggagaatcccagggacaggggagcctggtgggctgccgtctatggggttgcacagagttggacacgactgaagcgacttagcagcagtagcagcagcaccctcacttgctaagcagtcttcagcaagtctttcatactctgagcctccaagtttccttagataagcaggaaattcatgagataaacaggctaaggagtaatacaagacctagcccatgaaaagctctagacaaatattggtttcttttcacctccagtggccaaagtagtcttctgacagtaatccaattttcaggaaatttatgtagagaaaggaagagaaagcaagagagggagaggagagagagaaggagagaaagaaagaaacagagcaactgtatagtttgaatacattccataacttttctatttcttgcccagtgtgcaaaacaatactgatgttcctcccagaaatttttttccctaattgctggaaaactctgtaagtggagcaagcgttataactcagggtgggagtgaggctgggtacagccactggccaagcctttcaaatagtataacaaatgatgtgtgggtatagccagggaaaatgcacacattcttcaagggtctggagaaaccatgtttggctcccaggtgcacttgacctgttaacaatatttagacagatttatcagctgtaaactttgcaccaagcaagaaaaaaaaaaaaaaaacactaattttttttttctcctttttttctccttttaagatttgttagcaacaggaggaattcaaaccagctaaggagagggcttgatactctcgcctcagttgtctgcttagggtgcaaggactccgggcatgaaattcacagaaacctggagaatttctgggtacaaacatttcagtgaggggtggtgagccctacttataagagcctggagtgagtataaaaaaaggacagcacgtttttaattagcaccataacaaagagggaaaaaataaagcacatacaaaaaaaaaaaaaaaagcataaaaactttccagaactttttggggctctattctttatatatttttatgagatcatctgcttggaaatgtattgtttgaaaaactagcaaagttcctttaaaaacgccctagatcaaactgattgcaatgtcagaataccgtaagccttgtgtttatgaaacatcttttatgatatgggggaaagagaatgggatttgaactcaagaaatgaatccatgctccacaatttactagctgtgtgattctggttgaatcactaactaagcttagtttcctcatttgtaatatcagttcagttcagtcgctcagtcatgtctgactatgcaaccccatggaccacaggcttccctgtccatcaccaattcctggagcttactcaaactcatgtccatcaagtcggtgatgccatccaaccatttcatcctctgttgtccgcttttcctcctgccttcactctttcccagcatcaggatcttttccaatggagtcagttcttca

SEQ ID NO: 46450 - DNA, 714 bp, Bovine  19866881042724
  misc_feature (1)..(1): n is a, c, g, or t
ngctttaggaaggacaggaggatccagacccagattagctctgagggcagggagcttgttaaggggattttaagtctactgtcttaatagtcctttgtagttctttggcacctggcttttcttgaagctcaaagtattttgcaaacattagctcattaataccgccagcagccttgtgaagtgggtagtgtgaatgtcttatccccacttgggattcttgaatttgaggggaaaaggggttctggctggtgactagtgcctggttgaagagaggccccaggggttggaccaaatttaatactcatgtttgtttctcatcccaccagaagaacagtggatggtgagagaagcgcaagccaaatctggataccagttgaaactaggcttctccagctgtgtgaatttggaccagtccctcaacttttgtgaaactgagttttcccttgggaaaggggggctgatgataagaattataaatgtaacgttgttgtactgagttgtgtcttacccttttgtgaatctatggactttagcccaccagactcctctgtccatgagatttcccaggcaagaatacatggagtgggttgccatttccttatccaggggatcttcctgacccagggatcaaacccatatctcctgtggctcctaccttgccaggtggcttctttacaactgagccaccagggaagctggtaaatataaaatgtg

SEQ ID NO: 46451 - DNA, 810 bp, Bovine  19866881053520
  misc_feature (1)..(1): n is a, c, g, or t
nagccttatctgacttcatcgagtttggtagaggcatcccttttcctattcttcctgaacacatttttttttaaattatagaatttttgcactataggttaatcacctgtttatgagcctatcttcccaaatgaacagtcagtttcttgaagactcagagcatgttttatttatctcagcatccactgtgctcagcatagggcctagtacctcaacatatattgaatgaatgaatgagtgagtaaatagatggtttggggtacagggccgggtcaaagtgtagttacagccccaaaatactaagagctttgtaagtcagtgcatgaggggtcttactcagtaacccattaaatcattaggacttccgagagtaaacagctccctaagacaggtgctccggcttgtagagtatgcgatagttgagtggctaatagatcaagtaacttgtccactttcctggagtgaagttttgggctcacctccattcagaaggctgagtacatgatgttacatgcctccttcagtggagttaaattaagcttaatatcttatgactcaagagtttgcacaccaaggcttggcacttaatattgtaattactccttttgattagaactacctttcataagcaaatcgacgcagcgatttgacaagtttgaggaattgtgtttggagctcaccctacgagttccacagggacctgtaatcatagtaattactgttgaagcgagattccagttctcgatgtaccaggaggtgagtgagtaagagtcacaagctgcatcctttcccatctcaggataagctgtg

SEQ ID NO: 46452 - DNA, 929 bp, Bovine  19866881057993
  misc_feature (1)..(1): n is a, c, g, or t
nacacacacacacacacacacacacattaggtcccagtagcaccttccctccgccatgattgtagcaaccaaaaatgtcttgacatggtcaaatgtccccgagcaagcaaaatctctctctctctctctctctctctctctctctctctctcacacacacacacacacacacactcattgaagaccatcaagtcagctgggtgaatcgaaacatctgacgaatgaaggccaactcagatgcaaattcttgttcccttactgactgtgaggtcctcctaggcaaggacttacttcacctgagcctcagtggccccatttttgtatcatgggatcaatgatatcccagaaccagggatgtgggaaaccacctaggccttatctatgtaaatccgtgacatcaaatccttagcgactgtgttctcatttatgtcctaaacatctcgtttgcgtctcctccttgaatgagtccacagaggcccagagcatggacagggtgttcttcctgccctggagtctggagagatggagagctggaattccattccagctaaacatcatattaattccgggcaactctttcctagtaaaaccccaactcatgtaaatactagtatagttttcaatttgtagtcagattagatgccaggagtgtttggttctattttattttattttttaagtgaaacgtttacagtgaatttgaaagcaagctattttctgcctctctgggagaagtgtaagttttggaaagcaagctcccctggaatgttttagctgcaatcagagtggatagaaaaaaagcaaaaaagcaggttaagtcacatgatagaatttctggacccagattcatcaactcatttaggaagtgctctctggaacaaaatacgcacggaaagaaggctttgtgtcattctaaaagctattttatg

SEQ ID NO: 46453 - DNA, 648 bp, Bovine  19866881147567
  misc_feature (1)..(1): n is a, c, g, or t
ncatttagaaggtaatttaagattgtttttatatagagaattaaagaaatagagattgatgatatgtttaaaagaaaaacagtacttatgttacctgcgtgttttatcctgaaggatctgggccattccccacattcccccaaagggtatatcgtggaatgtgcacttcaacttggtggggtcctgcgacagtagtttgccaaaagtatccccttgttctaggccagaggcaggttataggatggcctcttctctcctgttggtttccccactgcaataccagatgctcccatccagaccatttggcaggacaatagagggaggcatgccagcgaagctcccacagtgcttatggtgccagcttcttccttggcatccagcggagtttcatcttcttttgttcgggatttttctggagctcgtgcttatttctttaaggttgtaaaaaggatgaggtatctccacatctgcaactaccagcgcttgctcaatggaaaatgatgagaaattgtttggttgcttctgtaggaagccaaaggtacgggtctatagccactttacaaaatgttctcacacctagtgtttcgctgcaatcttggcaagcctgggaagtacataccacttgtaccagcagtttacaagggctaa

SEQ ID NO: 46454 - DNA, 761 bp, Bovine  19866881163554
  misc_feature (1)..(1): n is a, c, g, or t
ntttctggaatgttttttcccccttcttctcctgaaaactcctagacattctctgtgaggttgccttctctctacttcccatcccatgtccaaagatgtatattgtgacacaggcaatacatctaatatgggtaattctttatatgtctgtctcctccactggattacaagctcctcaaggagttatcttattcacctttgaaacattgccacctaacatgtgcccaatacagtccggatatttgttagcatgatgttgaatgaattttgtcagaattgtaccccatggtataaagcaaatcatacctacattttccctggctgctctgtaatgctgacttcactgagtccccagccacccaagtgatctctcatagttgtcatctggaggacaggagagctttaggggaaaagcagagcccctcaattaccagttctgactatcctcattttagttcaggtttctccatgcgaacagacagtcaacatgtgattggagaagaaatagaagtatatttctattaaaaccatgttccttaggttgtcactctgaatttatatccctctggtccttgccaagttggctgttggctatactctatcctgaaatgagagcattcttctcatagccccaggagatgcctacaatgcctgaagattgaaaacagaccttgaacatggatttgggaatttgtagagtccaaagcaccactatcctatataacctgctccagataatcgagcttcccttcacatctctg

SEQ ID NO: 46455 - DNA, 1798 bp, Bovine  19866881169019
  misc_feature (1)..(1): n is a, c, g, or t
nttcggacataacaacattctacacacatgggcacgtgcttacatacacatgaaacccaaaaaaggagtatggaaattcaaggttaaaagtgaaattcaacaatttttaatgaagttaaaaaaataacaagatcggaggaaaatctgctcaatagtattgagggtctttttctttcccctcttgttccacccactttaaaatgcactttgcattatcgcacataatggcttctcctggaattggaaaaattcaaacacgtgtgctctgaagcaacatttccagaaatacagctcaggaatgtgtactggcataaattcagaggtatcagcaggatttcccacctattaaggtaaattcaccaccaccaacaacaaaaaaccagttgcatgcatgaagctcattatctccagtgggtaaggaaaaaaaaaaaaaggccatcttagcacagttgccaaaaatcttgcttctttaagacagtcaatgcctgtggtatggatcaccacattagaaagtctatacaacatttggagtaaattattctttgaaaacccacttattcaacaacctgagtctctgcttcttttccagtctataaaggcagcagcctcttccctccagaagctcactatccatctggttgtacactctccatctccttcaaaatattcattctttcaacactgaccaaggatgagaaagagggattgctatttcccctacttggcgaaagaggaaatggaagtgaatcattccggaagtaagaggattcaaaggcatgttggaactggcctacacactctgttggaacaaactgtccttgcactgggctgagcgctttgtaccccatgcagtacagcaacatgcgcttaccagctggaaaatagcctggaaaggacatgcgctgccttgttaggcttgaccctgatggctacggcacagctgcacgtctccagggctggcatcattttcaaattataaccaacatttagtttttcctcctcttaatcaaccagtatgagatggtctgtggttgggctggcagaactgcactggaaaactgaaaggagtgcttctgatttcagcgtggggccgatcgtgaggatgtgcagcagccttgctcactcaagaaaatgggtggtggccgacacaggctgcctgggcctcatgctgagcgggccccctacactgcactctggaagaggaagctaatgtgctgtatccgcccctggccttcttttcatgtgcttatacaggatgggatcaaacactgctgattcaccgcctaagctacatctcagtatgatgtctcaccagcagtaccatcttccccagtggctcagtggctcaatggcagagaatctgcctgcaatgcaagagccacaggaaaccctggttccatccctgaggaggctccctggaggaggtaaacataccagtatgtttagccagaatttcatgccagaggtccaggcttgcatctcctgatgaacattctcactgaaatattccacaggtaccatcaattcagcatattaataaagataagttatttgccccaatagccacccttctaataataatagaagaatctgcctgcaatgcaggagaccccagttcgatttctgggttgggaagatccctggagaagggaatggctacccactcccgtattctggcctgaataattctatggactgtatagttcatgcggtcacaaagagtcagacacaactgagcaactttcactttcactaataacaactgacaaaaaaaatccgtattctgtagagcaagatt

SEQ ID NO: 46456 - DNA, 1702 bp, Bovine  19866881233206
  misc_feature (1)..(1): n is a, c, g, or t
nttttaacctacttattttctatagttctagagttactgtttaaattcatcactaatagaagggaatgcatatggtttaatacatcatctcattttctgaaaactggttcatagattctaaggagcagcacatgatcagtgcataatcagtaatggtaataagagaggttgcatgagggagggaatctaaggtgaggcttctgggaatggagtcacatggtgggcttggaccagcgggtgaacactgctgggagggaagtttggggatataccagactgcctttggcaggcagaatccagactttgagtccctgcttgatttcgatggcatgggccaggctcctgcatgttacaggaacctttaattagtcggcattttccactaagactgtgttagtgcgtttagtaaaagtgtcttattactcctggacaggtgggtgagatggggtagtttgagaagtactgagtccatctactttccaacagcatcaactgagtaaattaaagaaattacatgagtaacaaagtatttcatttcttcataattacccatattttagcaccaatatgagtatggatatacaattataaagtataaaaacatttttattttgattttcattgtaatataggaaaaattttagaaaaattttaatatgtaacatatttaattattaggtatctaggcagtatcactgatgttgctggcacaactctttttctatcattaaatacatacatttgtgctcaactttatcatccattttctacattgagttgccccaaagaggaaaagtgtcatcataatcaatgtctatagtttgaggtatctgtcaggtgaccactgacttcagttcacacttgaaattggttcctttgtccacagctcagcagccctggactatgactgcctggctctctggagctgtcacactgagaccctctccaagagaggcctggagggccacatgctgtacattctgagtcagatccactcagacatagttttgaatttgacaataatttccaaccatttccatatgacaaattagggggaagaaaattaattacattcatgtaaatgttattggattaataaagttcatgtatggcttttgtccttcatcatgaactgttgggacacaacactcgcactaaatgaaacagcaaatttaaattctcaaaactatttgcttttttattgaaaaatcagtaaccacagtggaagaaaccaaaaaagaaaaatcatctctaattccaacactcaatccaaagatttattttcattctaaccccactcctagctttagtttacatgattgcaatcatagaagacataaatctttataatctgctgtttcacttcatgctcgattgcaaatattctcagtgttgatatgtaatttttattttttatttcattttttggtacaaaatttaggctttttcttttttttttctgactgcgtagttaatcaaatactgtaactttcttagtcaattctctagtaatttaaacacttaacacagtaagttaacatgtagtatagtttttccttgaaataaatgcccagaactgagattttttagcataaatgtgagaaggttttttggcttttactcaaaccatttattagcagcttggatgagcccctggtggaaatctttgccagttctcctctcctcagtcgacacataactt

SEQ ID NO: 46457 - DNA, 1286 bp, Bovine  19866881291345
  misc_feature (1)..(1): n is a, c, g, or t
ntctccattacaggcagattctttaccatctgagtcactaggaaagcccatttatgctataaacagtatatatatatatatatttttttttttttttttttgggagaagtcaagccttcatgactttcccagtcacacacttggttagtggcagaatgtgagtgagtcctgtcaggtcccagcatgtccttggctaatattctctgctgtccaggacctgtcagaaggtaagctcacgggactgttgcccatatgaagctgtacgtaagtagcttcctcttccatctgacagtgctggccctcacttccaggccaccactggagagaatcataagatgtcccactaagtcatctccaaggtaattcataaaatgtcctattaaaggtgagctacaactatgactataatcttcacacagccatagatgtcctagtttgttatacttttcggttcaacagctaagaaaaaaaaatccacctgccaatgcaggagacacaggagatgcaggttcgatccctgggtcaggaagatccctgggaggagaaaatgacaagcctctccagtgggacacaacttatcgactgaacagcaacaacaacaaagttagactgaggcctgaggaagtccccaggggtctccctgatggccgggggtcaggcggggctaccctctcctcgtctagcacaactgactgcttggagggaaactctggccctcacatggacccctgctgcacttcatctcgctggatgccgaatgttcggctcatcattccagccaactgagatcatttagaagtttgattttgccatcaatcatttcttctctccctcccagctgtgtgtcagctatagctgcgataagtggacttgttatgcctttgtccaagtcactggtaccaaatactgaacaggtctgaggacagttttcgggggcatacctctgcactgaacccagggcatttgcttgggcctggacccctgcatttgtcccatgctattattgattttttattgctatatataattgctttaagagccaagccttgactttatagtccttttaatcctcgctggacacaatgctgactgttaaagcaaaactcagtgtttgcgacagggcactaaacagagccactgatctgatgtcagaagactcaagttcaagtcacaagggacccacttctaatgactttgtctaagctgtttctccttcaagggtctcagtgtctctatccgtaacacagaaacaggttatccttgtagacaacctcattttagttgtg

SEQ ID NO: 46458 - DNA, 1510 bp, Bovine  19866881303900
  misc_feature (1)..(1): n is a, c, g, or t
nactgggacagagagggagagaaacaagagatgctgaattctttctacacgcaacacaataaagtcaaataatacatgttttagtcatcctacaagggagccagatcaatagcttggttggcgacaccgcgctggcccctctctcttcacaagggcaggaaatgtgtacattctcaagggccaactggccaaccacccccgcatcagccattctctttaatgacgctcttccatcagacccctttctcttgaagacaattcattttatgaaacggccgcagctgccattagaagtgggcgaatccaggcatgtgtttgggttcgagatctgtcttgtgtgatgtttcaaatactttaggtttggcagaagccaagacacattctgtcaagttctttttccccttcgtttttttaagcccgtgtggattcgagagaaatgtggccatctgattctcattcgtttttgcctaactcaacaacaaaaattgtctcagaagaactagaaaatgtccaagtggcaaatataacctctttcacagaagccttcttaggatctctgtcggtccaccccgaccgattgacattctccaaacaggccaagcattttcacttctttgtgccagttgcacttgctccctgagcctggaatgttcttccctttcaccctctcctctgctcatcgactcctgctccccaagtcccatgcaaagacgacctccttcgtgaaggttttccccaccgtccaacttgtagatgctcccacggtcccctgaagtcctgcaggacttcacttggagccctaacgaccctctgttctgtgctgctttgtgttatagtggttgttgaaccccatgaatcaagccctcactcatgttgtcctggatgtgaagctctcaaccttaattaaaggccttcacgagaaaggcagacaaggactggcatttgtgggaaagctgttgccaaaaacattaattattgtgtctatcaatgtccataggtgggcttccaggtaagaagtgaacttgaggcttaaggaccagaaataacaatgggcttcttcctctatgatagtgagagctatgttccctttttctcctggctgccaggaagctaagaagcagctccaatgtttgttcatagcaactgtattctcatgccaacttccttttttttttttttttgtggacctgttttcaatttccacattattaacgtataaaggaaaagaaaatctatcgtccaccatccgtcacttcaaagtctccgtagagtagccaagtgaaaataataaagagctatttgtgatggtttcatctagaaaatagctctagtacttagaaaaggttttgctttcagttttaggttgggccctttttaccaggtgcagtcagtcagacagttcagtagctcagtcgtgtctgactctttctgaccccatgaatcacagcactccaggcctccctgtccatcaccaactccggagttcactcaaactcacgtccatcaagtc

SEQ ID NO: 46459 - DNA, 748 bp, Bovine  19866881311402
  misc_feature (1)..(1): n is a, c, g, or t
ntgcgggcagattctttactgactgagccccagggaaagccctaagtaaaacgtagttatatataaactatgtgagtagatagctcagcttttctaccctgttttattagatcaacttgaagatcacctttccatatcagtagcctctcttctgtgacacagaactgccatatactatcaacacaccctctctccacatggcccctttgaaagtgttcaggtggaatcttccaagcctggctgggcccaaggggcacaaataccctgagaaagcacccacccagctgcacatccacccctcagcctcagccctccctccggccgcatcctgaacctcccagccgtatttggccaaagttagagctgctccctggggatccctgagggagaagaaggctgcggggtgctgtgaaatcaggttctcaactacagagagtttggagggacagggtgggcagggtgggggcagggagatgggctggtcaggaaatgccagtttaaagttagctctgacctattaatcagcagcggggacaaagatgcaggaggggcgggaaggccggacatgtgctcgcgccagatttatgggcccagaacaaagggtggccagctcgtttagagagtctctttcccttttcctctggcaaaacgaggacattgtttgaaaagccaaaaagaacaaatattctactgactgaggtcatttccagagatgcaacaggtcctgatggggacccataggcaggca

SEQ ID NO: 46460 - DNA, 1524 bp, Bovine  19866881520297
  misc_feature (1)..(1): n is a, c, g, or t
naaaaaagtactccgtgatgaaatactttgtgaagtcctacataacctaacagcttctcagagactcacagtttacattactatcttaaaaaaccctcagaatttctgctgtgaagaaacctgtttagcctgttcatttaggtggtaacttaaaaaatgacagaatgaagacgcatggaagttgtcacttggcaaagtccttcagctggtaaatggcagagctgatctacaaaccacggttgcctggccctaaagtccatgagtttaatgactgcacaatattgtaaagttcagaaggaattgataataatcttctggcaaaaaggcttctttctgaaagtgcagaaacccaaggatgaactcaccctagcgtcccttcatacaaacgtctgtatgtctgcctcaatagcccccagccagtcccctgaatcccaggggcaagcaaggtatcgtttgagcattttctctcttcctgaggcacaggcaaggcacagtaggagaatgactggcttctagggccctggttctaagaagtcccatcaatcatggaactgcattatgagttttcttccatacacacggctcctatggctatgctaatatgtggtgacacatccacatgtttccctcgtcaattgcatgcgtggagctccttcaataaatagcagtagaaaatcaaagattaagacatgaattcactaacactgttcataattttcagcccccaaaaaaatttttttaattaggtccgtgattgttctgctgttacggtcaatgtctttttcttatgtagacgtctaagttttcgacttgagagaaatgaaggtggaattttctgcactgcattttattcaaggcagggatttggatttcacaggaactgataggacttgaacaacactattaactgatttccattaaaggttaatcctaccccagatgtgagttcagttggaatttatgtgctgggtgtgtcacttttgttttcctaaagctgtacttttaaataagactgtgttaaaaccatctcaactatactcagaagtcccaaggtaatcatacttatgactacagctcattggtattaagttaaagttagaaaagctaactaatgatcatcaaatattctgacaacatagaaattcttcctaagtgaatctttaatacccataatatttggctgcttctttcattaacatttcattcctttcagttcaccaacattttaattaaacactcatattcatattttcaatcctcaacacaaattgaccaagcacttttcaagggccagtctctaaatttggcactgattctaacattaataagacaagtttggcctttgaggagtatactgtggataaaaaaagactcaagcagttaaaagtaaccaaccaatcccttactgattgtagacatggcaacataaatgcatcttaaaatacatgttactgatttacaaagaatgagctgtataataccatggtatttatgtaaattttaaaaagcatccatacaacacag

SEQ ID NO: 46461 - DNA, 1630 bp, Bovine  19866881707779
  misc_feature (1)..(1): n is a, c, g, or t
ntggcgaataccactggctctcgtcagaaggtgcagtggtgggaatgtgccggagtgtcagccgaggccaataggataacaactagtcaatatggagatgggccactgagtgccttcctcaccttactgcctgtttgtttaaccaacaccagtgagagtctttattaagggctgttaacattccaaaatgctgtttgtggagcctgcccgagtgataagtgccacttgtgtttactgtcttgttctcaaggctgttgtagaagcctaaaacacagttctgaagtggctcgctttccgtgaacaaactattcaattctacaaataagtcaatggcttgggaacaaaatcaataacacacatacacacaaagtccacaagtatttgttggctggtaatggatttacttacttgtgaagaaagctgagcgctgaagaattgatgcttttgaactgtggtgttggaaaagactcttgagcgtcccttagactgcaaggaggtccaaccagtccatcctaaaggagatcagtcctgggtgttcattggaaggactgatgctaaaactgaaactccaatactttgaccacctgatgccaagagctgactcactggaaaggaccctgatgctgggagggattgggggtgggaggagaaggagacaacagaggatgagatggttggatggcatcaccgactcgatggacgtgagtttgagtgaactccgggagttggtgatggacagggaggcctggcgtgctgcagttcacgggatcgcaaagagccagacacgactgagcgactgaactgaactgaacccacaaacacaccactatcacataaaatccctgcccccacgcacattgtctgtatttcagaatacactcttaaggtcagtgttcgcttagtcccagctctgaatttatagttcaagtgttttatttcccaacagtgtgagtgaatcgtgcacgtctgtgttcaacaaggaaaggaaacaccaggattgcaggagacacgaaacgagtaagagtttgctgactcccaacacaggtcctcttcgtgcgagcaaaggctggctttcctggaaaactggcttccttcagaactctggtccactctgataccaaacgtggatgcttgtggaatttgccagttattgggctgaggggacccttcccctggcgaagcagaaaagcatcaaacaaaagtttcctctgtgcctgtgggctgcccgcctacctctgccgtgacaccagccacatcctcatgccttaacgttaacaggttgtctgcagtcccttgtggggttctaagactcaatccatagactcatgcatgttttgagagccccagaatcaaagctggagaggtgactttaggagattaacagtcatgatttattgtccaaaccagaaccttttgagagtgaaagggcgtgctattagtcatgattccaggactacaggtgttgggtggcacatttggtcttctcaatatttattgagcccttgttagtaatttaactcatcctttaatacagtcttcccttgaatcctcataataactgtattgactagacagtattcccattttacagatgatgagggttgaaggagtagttcatgtacagtgacga

SEQ ID NO: 46462 - DNA, 783 bp, Bovine  19866881864008
  misc_feature (1)..(1): n is a, c, g, or t
nctccttgaaggggcttctaggcaatacatctccgtgtccaccttactggcccaagttggagcaggctaaaagagtccagaagaaagttctttgaagagatgaaattgataagacaaccttatatgttttaaatttacacaacttaatgttaagtttggggatggatgaatgagtgatcagtacatagaaacctaagcaaaggataataacaagattaactccaaggacaagaaaatattgtgcaagaaactaatcatataatacttcatgtttgtcgttgtttagtcgctaagttgtgtccgactctttgcgaccccatggactgcagcctgccaggcttctctgtccatgggatattctaggcaagaatactggagtgggatgccattttcttctccaggggatctttccgaaccaggaattgaacccacatctccagcattggcaggcggattctttactgctgagccaccagggaagtgccgtaagacttcaagcccttctataaatcatcatcatgctcagttgtgtctgactctttacaacctcgtggactgtagtcctcctccaatcattggtatatggtcatacaattacattgagagaaggaaaaaatgagacgtggatagcaatgaatctgcatctaccatagtgtagtacttaaaatagtattagtatttaaagtagtttttacaaagagataggagcataggtttggtttagatatatagaactaaagactaaaagactctgttagaggtgctgcaagttgctgccttgaa

SEQ ID NO: 46463 - DNA, 768 bp, Bovine  19866881965296
  misc_feature (1)..(1): n is a, c, g, or t
ntggttagatgtggcttcaccaatgaagtagtgaaatgtaattgtatttgttaaggaagcaaaagcactccccacccctaccccctctccaccccaacccccaccccaaaaaacagtcaaatttctctggttagtaaggagctgccaaaggcggcaatcacttgtaggttaaggtaggggaactgctggatactatgaagcaaccaaggagaaggagatggaattttctgtcgcatcgttggcaatttgaggaagtcccaaaggaccaaatgttctgaaagaaatttcgtgtagtaagaatatcccccaattaaacctcttggctaattcaggtcttccggaaccccctggcttcgtgaagggtagtttgcttgcctcctcagcagtgtaaaccaactggattccaccaaatgagggtgagagccaggtaggagaggactccacagggctgattccaagcggtctccaatatactttgttgcgaagtacgccagccccttggaaaagtgcctaatggaaaggggtctcagggcagacagataagggctccctccagccctgctccgcaatttgcatgaccttgaggacatcacattacaacttccctgtgcctcagtttctctttctgaaacacgagggtcatagcagacacctcaaatcccatagaccttgtgagaatgaacttgaatgtttttaagtcccttagcacagagtctggcacccaacaggccttcagtcaataatcataatattattattttcgcaatg

SEQ ID NO: 46464 - DNA, 1907 bp, Bovine  19866880484012
  misc_feature (1)..(1): n is a, c, g, or t
ntataaagatgactatttaagcccacggtgaaaaaggaaaattactgaatgtggaggctaggcagtttgtaaggtattttcactcacctttgtcctgtaatgcaatttgttctttatgcagcaagactacctcccgtcccaaagctttcttctgtctttccagttcatttcgaagcaccaaaatttttaattgcaggcactcactttcttttttctaaataattaaaaatacaggtaaatttatgaatataaaagttatgactgaataacaacatgcacaatatttcatatgtgagtggtttaaagcactttaatactcatgtaacttatagatctcttgagtgatttaattatcagcatctgtcattttaatggaatgaatacagatgtaagcaaaatgcagattagaaataaatctaaagtctgggaacagttctttctaaaagacactataaaatatctcaggcctctttcctgataccacaatgcaatatgacacaagttaataacaaaaaaaaggggtttccttggtgtttcagtggttaagaacctgccttgtaaggcaaggaacactggttcaatctctggtcccttcatgcctcagagcagctaagtttatgcgccacaactactgagccatgctctggagcccacaagccacagatactgaagcccatgtgccttagagcccgtgctccgcaacaagagagggcaccacgatgagaggcctgcacagcgcagcgagtgagtagccctggctcgctgcagctagagaaagcctgcacacaggaaggaagacacaccacagccaaaaaaacaactcaactctttttaaaagccctactggaattagaaattagactgatattgaattgaattaaaaacaataataaagaaacagttttcaaaatgttaaacacagagttaccttaggacccagagttgcacccaacagagttaaaaacatgtccatacaaaaatgtgaatatgactgttagagcagcagtactcataacagccaaacaatgaagtcaagccaaacgtgcactatctgatgactagataaataaaatgtggtggatattcaaaggaatactatttggcagtaacaagtgaagtactgatatatgctacaacatggatgaatcctgaaaacattatactaattgaaaaaaagccagttttaaaaggccacagactcccatttatatgaaatttccaaaataagcaaatccacagaaaaaagatttccatccttaccaagctaaactaaaggtgctctaataacccacagattttggagaaacccaagtagggacctggtgttttcaacccatccaaacagtaactagccaagccacaccacaaggagagcctggagccttgctaacagcgtaacaacgtaaccctcttcctccctactgggtaatatcagaggcagccaagtagagagagctttcactactatgcagtggtgttgaaaccaccctatcatctacaggggcagttagaactcccacccttaatcaacactatcaactccttttgcgtgtgcacacacacacagaaacactccccccaccccccccccacacacacacctctgccacatgggtgtcaacggaagcttcttggggaacttggacttctacaccaacttggcagtaatgagatggttgctcttccttcctctaccagaggtgtcagaggaagtcaggtaaaatagaagatttaaataagatccagagactcataatataataccccaaatgtacaagtttcaatgaaaaatcactcatgatattaagaactacaaagatgtcaagtaaataaaaaaggataatcaacaaatgccaacacttgagacaaacagaaaatataattatctgacaaagatctgagagtag

SEQ ID NO: 46465 - DNA, 1980 bp, Bovine  19866880546615
  misc_feature (1)..(1): n is a, c, g, or t
ntcagctgggccaaggccttggggatgcacccatggagctgtatatctgcgtgaactttcagccccaaatcgtacacaaagcactttaggaatctgtttacctcccctgtgggcctcaacccatttcacatttgtcagggagaaattggaagagtcagagttgcccttcctcacctcagctactcctgggacattcctgggtcagaacagagtgaaggtgacagccgagagaaggataaatcctgaaagacagagccgcatgtttcctccatttgatgcaaactggtgcattccaggcccttctccatacagcagaggggaggagagcagaaatctagatttggataaaaagaacctgctccccctggatgggaaagctcagcttcagtccagctatccaggcaacttcatcctggatttattgcccactggctggcccggagtccgacattctagccgccatcctccgggctgtctcatacatcaggaccaggcagggagtgaagccaggaaggagtcaggaggcctggggtaggacggcagctttgcggggtgtgagcccccatcatgggagggttcaggcagagatgagaggcccactggacaaagaagctttatggggacccagtccagcttgaggccagacagataagagtttgaattttggctcccttttctattagttggttgattctgcacaagtgggcagttgccagagtgtcagcttcctcaactgtggtgtaaggatgctcgcagcttctttcaaggtggctagggaagcaaaagtggcagtgtctgttaagtgcccagccagaggcccgaaacaggatccaaaggctcactggggtggtgggatttgttgttttgctgtctgtactcattttctatggctcctgtaacaagatagctcaaatttagttgcttagaacaacacaattttatctcgcaatgctgtagcccagatggccaaaatgggtctcactggcgtacaagcaaggtgtccgcagggctgtgttcctttctggaggctctagggaaaactccccctccagcttctagatgccacctgcattccttggctcacggcaccttctcgcttcaaagccaagcagtgaccaattgcatttcctcatgttcccttgctctgatgtcaattctccttctgcctcttccactcttagggacctttgtgattacagtgggctcatccaggtaatccaggtaacccaggataacctccttgttttaaggtcaactgattcacaaccctaattccatctgcagtcttttttaaagagtatttattatctggctgcattgggtcttagttgtggcaggcaggatctctgtggtacacagactctctagttatagcatgcagacttagttgcttcttggccatgtgggatcttagttccttgaccaggatcaaacctgtgtcacctgcattgcaaggtggtttcttaacctgcctgcaatgcaggagacccgagttcagtccctgggtgggaaagatcccttggcgaagggaatggcaagccactccagtgttcctgcctagagaattccatggacagtccatggggtcacaaagagtcagacacaactgagcgactaacacttttacttttcttaaccattggaccaccagggaagtccctccatctacattcttagttcctctttgtcatgtaatataattaatataacatattcacaggtttctgagggttaggattcggactcctttgggggactattattctgcctgttgctctgtccaagtaacttgttgctccttcaagacagagttcgctactcctgctcatcaggaactggttgatgctgtggaccagaggccctgtgtgctgcttcttttctttcgtctttcaaataggagttgtgattgcaattactttattctctcttggccattgcgaagtaatagcaggttggggggttatcattcaggccacagat

SEQ ID NO: 46466 - DNA, 955 bp, Bovine  19866880562987
  misc_feature (1)..(1): n is a, c, g, or t
ncctgtaaataggtagggggaaaaaaaagaggtacaagggctgatccctgggcagcccagcacataggggtcaggaagatgaggcagaatcagaaaaggagacagaagaaatgaccagaaggatgggaggtgaagctggagactgaggtggtagtatctgggaaacagctaaagaaagctgttaagtcaaaatgagaactcacagagctagtcatgtgaagtcatcggtgactttgggacgagcaactgtggtggagttagggacaaaagctagagaagaatgtgaggaggaaactgaaaatacagataatgagttgcaaagatagtgagttgctataaagaggagcaattgctagaaaggcaagtgaggtcaagaggtttgttgatttttgttttgtaacttaagaaaataggattcctgatgggattgatccaatggacagaagaaagtttataatgcaggataggagaattgctcatgtactgttcttgactaatgggaagagaagggatttgtggaggtgttgggttcatccattacaacataagagaagtaaattcaggaacaggagggtaggtggggagataacatttgcgtcagttttctgctgagtctcaaatccatatctataatattatctcttcccagagccaaaacccactgccttgacgcatccccaactggatttcctagaagtacttcagccttaggctgtcccaaaccggaatagattaattccttttcttctaatttatggtttcattcattagcaacctcagagctggtgctggaaggagggtagacatcttccataggcaagaaagtaggagaatgggataggcagataactcaaagatggtggaaaattgggatgtggggtgactagggagcagtgagctcagaacaggcccctggaagctattacacacccagaggtcaacaatgcaatctgtc

SEQ ID NO: 46467 - DNA, 882 bp, Bovine  19866880568716
  misc_feature (1)..(1): n is a, c, g, or t
nataggttatgtgttagctagaatataagctttaaaatgtgaaaagataaatagcaaaaaagataaatgattcattacaccagtgaaggaattgtttttaagatagcatcatttctttatttttatggagtacaaatgaataaattctatacaggttcagatgaatgtaagatagttgccagaattaatgtggtttgcttccctctaaaaattgttcaagtagaccaatgctcatgattgtgtctttttttatctttttccttctctttttctttttgtatgatgtggtaggagaaacagctttcgttaaagagaaatggcatgagatttaatctagatattcctatttaggaatacactgggcaagttcttattcttactgtgtctcagtttcctgatatgtaaaatagaaatgataacgcccagctcacaaggtgatagtttatattaaaagagattatgtaaataaaatcaccaggatacttctggacatagaagttcaatagattttggtacgctgttttactgtttttcttttattacctaatttgtgtgaattttttcactatttcattctctttatttttttcatgtaaaatcaaaaccaagtttaaaaaaaattaatgtttagattaaaggttaatgggaaaaaccatagaaatattacagttatatgtgtgtatgggtataacagcactgctattttagttggatcacagagaaacctctatttgctacatggcacacttgtcttggctgacctatctcattttctctggttttctttaaagcaggttttttcagacctttaaaagctgacacttcggcagtgaataccctggaaaaaaagtctagtttcagtggaacttggcccaaaggatt

SEQ ID NO: 46468 - DNA, 1933 bp, Bovine  19866880604854
  misc_feature (1)..(1): n is a, c, g, or t
nagagagtatatagaataacctagaactgtctctggcaagaagagtacctttagtaaatggtgaattttattaatatttccaacatcatgtcatctgaaatcaaattcagagagattaattgattagagattagtttagacattccccagtgggaatcttacaactgagacgtgtagatgtttcttgaaagaaaaggtcctatatgtggtcaaatgagtttagaaattgcttggcttaggcacagaacttctcagaacatttaataagtctgtttcagttatctgtgactgtgtaacaacttatcccaaaattagcggcttaaaacatcaaccattttacaatatcttacaattttgtggtaggaaatttgagcagggctcagccaagcagttcttctgttccacttggccttgactgggggtttctcggtggtttcttgatgccttggctgggcagttggaaaagcgtactcaacagaacctgcttctccactcagtatagtctcagggcctctccatatgatctcacccgtggggtgacttgggatggagggactttttatgaacatttagtcctccaacaaagagggctccaagaaacaggaaatggaagctgtcagtctcttaagacctagacccaaaacacacaagttcacttccaccatgttctactggccaacgcggattcaaagggaggggtcagaggcccaacctcttgctggcagcagggttaaaggatttgaagccattctcacctcatcacatatactaataagcatgcaaatccctaaggaggtagggagagtattcaggtttccctcacttagctgatccctgaactgtatttgagaggaaagccatgccagacaatgtttctctctttcctgctcgggcaaatgctagcctagctgacggggtttgagttctctgacctgctgggctgctttctgcttgttcctgatcccttcggttcttctcctcatctgtctctgagtcttggggagagattttacagttttacaggccataatgtcacttaggtggagaataggcctagatccatattctgtggtgtattgagttatttatccatgatgcttccacgccctcatttcactggctcatccatctgtccatccctccatccatcatccatccacacattcatcatcagtctacacatttgtcattcatccatcatccatccactcatcttttatctgtaccatccattcattcatccatccacccatcacttccatccaacatttctgaggcctctctgtgttcagccctgtgctgggttctaaatacagggggccagatgtccaccctttgagagtccccaggggctgctaaggtgcccttgtgctggaagatgtgggagctgcagcatgagaacatcaccaccttccagggcttcttcgtggcccctgggttagtggtctggtgttggagcactgtgctctgggcaacctggaggacctgctgaggaatgaggctctgcagctggactggaccttcaaggcctccctgctgctggatttgatccatgtgagaccccttcccaggcctggaggtgtgggggcaacagggagggaagggagacaagagaggctcatttcccaggcctcattttccactttgtcttattgagaaaaatctgaacagtgtggcaaagggtgaagggacgcagggagatttcctgggaattctgagagaagcaggagtccttctcattcaccacagtcctaagggaccctcatgattccactctactagggggtgcggtatctacaccatcagcgtttccctcatggccgcctcaagtcccaaaactgtgtggtggatgggcgctttgtgctgaaggtcactgaccacggttatgcagagctcctggatgctcagagggctccccgcccccagccagccc

SEQ ID NO: 46469 - DNA, 863 bp, Bovine  19866880662567
  misc_feature (1)..(1): n is a, c, g, or t
naatgatttagcctgcttttaggccactctggttgttcttgcctgaagtgagtttttgagatgtaaattggaaattcacagagttgattattgttctataactttgacttcattagtgctgcttgttagtttttgaggacacatcttggttagacctgacacagtcattatcacatgctttcacaccacctactgtctttcaataggactttcccactcacgatgctgccatttacttttccatgagggtatgttgatttcataagtagcagtagtgttctgtcttatttaatgccattacaaggagactgtgtgtattcttctcaactatatgcatatattccttctagacggaggaatgtagaagcaagcttatagacctctggtctttagggaagctatcatatttagtaaacccatcaacaagtattttagtgattcccatgtgtccaagactgctgtaggtgctatgaagatacagaagatttctcaggtgttcaaagtccacagcaatttggctctgatcaaccttcccagattcagtaatgttgccttcatgtgccctttgctttagcacactacctattcctgtttttcacatgcagtgctctctgctcccttaatgactttgaaaagctattcccaatactgttctcttacatacagttgtcaaattcatacctacccttccttcagattgaagcttaaatcccttccctttaatgagcctttccccagaaagttaactcagactaatgtgtccagtttgaaagggtaagtagatttgtagatccagataataactctagtagtgtctttggcaagctatgtattaaaaactcagggagaaataagaaggataa

SEQ ID NO: 46470 - DNA, 1358 bp, Bovine  19866880694488
  misc_feature (1)..(1): n is a, c, g, or t
ntgtggctcctattcatccttcaaaacccattcagtgtctcctctgccatgggttaggacagtgttctcagcatggtatcaatataatcagcagcagaatgtctagagactgtacctgggcatttgggcagctacaaaaccccacaagagtctgacctgcagcctgataaccctggttaaaggctctgctctctctgcttctccccttcctcttcgtttggggaatgtctgttcagggtctgttcccctgctatcctgagagctccttgagacaacagtctgcaaaatatcctggttaaaagcccaaggctttttaaaaaaacaactttattaagatatagttcacataccatgcaacccacccatttaaagtgtacgacggcttttggtatattacagtattcattttttaaattgcagttaaaatatatgtgtgagcatgctcagtcgcttcagtcatgctggactctttgtgacctatggaccatagcctcccaggctcctctgtccatgggattctccaggcaagaatactggagtgggttgccataccttcctccaggagatcttcccgacccagtaatcgaacccatgtctcttgtgtctcctgcattgcagtgctgctactgctgctgctaagtcgcttcagtcgtgtccaactctgtgcaaccccataaacggcagcccaccaggctcccccatccctgggattctccaggcaagaacactggagtgggttgccatttcctcctccaatgcatgaaagtgaaaagtgaaagtgaagttgttcagttgtgtccgattcttagcgaccctatggactgcagcctactaggctcctccatccatgggattttccaagcaagagtactggagtggggtgccattgccttctccattgcattgcactggggaagcccaaaatatatacaacatcagatttgccattttaaccattgttctgtgcactattcagtgacattaattacatttccaatgttgtgccactctaagagcccaagacttttggtttctgatagacctgaattctatcccagttcttccactccgtggtgtgtaacctccactctgaggctctacttacttacctggaaattgagcactctgggaatcaacttgcatagtcattgtgagcattaaatgatgcaacgatggtaaaaatgccttacagactgtggaaattgtgtgtatccctgagtggacccctgctgcatggcatcttcactcatgtgctgtgtggactcaggcaagtccctggccctctctggcctcagttcctgactttaacaaggcagtgtttggattaggcaagcccaggggcctaggagctcttctcc

SEQ ID NO: 46471 - DNA, 772 bp, Bovine  19866880711912
  misc_feature (1)..(1): n is a, c, g, or t
ngtctaggtctcaggttacttgactttatgacagtgattattgcctcctggagacagtctgtttctttgactgctgtaacaccaactctcccagctgtccttctgctctggaattgtgggccagaattttttgcagcttctatttctttatttctaatcccttaaaaattgatgttcctcggaattctgttctaggctctgttctctctcattctcacagtcttacagaatgatgtcattactttcatagcattaataaccatctgtgtgttaatgattgccatatttttatctccagccaagatctgtctcctaagctccagatccttacattcaacccatattcaacacctcttctcagatgttacgcaggcgcctcaaactgaaagtagaactttactctcaaattgctcatcccccatcctccctttcaataaatactaccacccttttcctggttccgcaagccatacatcattgatcgttttcttctttttcttttgcagtataatttatataaaataaagagaatgtaaatgtacagtgtgatgagtttgataaatatacacacccgcattgtcatcattcagtgaagatatagaatatttttcattctccaggaaagttccctcatatcactttgccagtcattcttatacctttgccccaaaccctggctgagtcactgttcttattgcctcctcatttattagcttttcctgttcttgaacttcttataaatggaaccatatggtatacttttgtcagcata

SEQ ID NO: 46472 - DNA, 1542 bp, Bovine  19866880716453
  misc_feature (1)..(1): n is a, c, g, or t
ncaaaatatataaactatatttgaagacagataccaagaaaagcacaaacccataattaaaacaacaaaaaaaatagctcttaatttttcagcgctccttgtttcaaaagggctgctgctttaattcagtcttcttggaattatcgttaatttttttttttttttttctttctggatacccgtaagtaatagccttcatagcagtgatatttttttagtgcctttactaatgcagttatatctctgggcctcaagtttcctatctttaaagtgataggattcaatcagattattttctgaggtctctcagattctcgtgagttcttcattttagctctcaatacgtcacaggcagtcaggtgggcatagaaagggtgtttttagaacatactgtaacccctgttatttccctgttgtaaatatgctagagaattgtgaaatgatcagtttgagttcattattctgtttatcctggaagctttgttctcattttgttccatttgtgcctgtggctctgggttgagtttatagttaactcacttaaatttttctgcaacttttatttctaggcttcatagagcccagtgtgcaattaaacagactcaggtaactgttcagaaaattggaaaggaaattgaagaaaaactaagactcacatctacaagcaatgggctggtaggtttttatatattaacatctttaaattccttgatttctaagtgtgatcatcatattcttcttgtattaatttctctctttttccactcctccaaaaccttcaggtagttttttctttttttccccccttaatgtttcactgagacttttgttagtatttaaatgttagaaatcaactttcaacatctgctaatggtgtaagatacaaagtgcctttttgtgctaattgaaactttagattacatacagttacttagaagataatcaaaagctattttagtaatgtctcataaatatgaactcaaactgtacagacacaaattatataataaatgaaaaatagctgccagaagaaaaagaaatagactaatctgctttaaaaatttttttaattatttggattgaatttagtaaattagtttatggacagtgtgtttatggacagtgttctttttcgggaaagattctgttaaagagatatttcaaagaatagaaattccaacccaaatagacagatttaagatactagaataattttggggttgctttatactcttctagtggaatgaagattctttttaagtagaatagtgagtataaccagttacttctctggaagtgaagtcacagggctaatgatagcttttgaagaaattgtgctgtgattgtgtgagtgcattctaataagtagctttagtcgtgtcccactctttgcaacactatggactgtagcccgtcaggttcctctgtccacggaatatccatgccagaatactggcgtgggttgctgtgccctcctccaggggatcttcccgaccccggattgaacccgcgtctcttatgtctccgcttggcaggcaggtt

SEQ ID NO: 46473 - DNA, 692 bp, Bovine  19866880785814
  misc_feature (1)..(1): n is a, c, g, or t
ncccacctcttgctgctgctgcttctcctctccctcccttccttttcttctcccactccctttttttcagcaagcattttgtgagagaggaaaagcagagaatgtgaaaagccatggctttcggaattgccctcggaactgggttcaaatcccagccccagatctcctaactgtgtagccttgggcgggagactcagcctctctgagccttcattttctctttttcaaatggggaaattaatggtattgcccatgaacgatttctgtgctgacgaaaccatttgaagtggactaggtacagtagatgtgtgaatggcaccgttacccctgcgaaagccactctcttcctgcccctcccagctaccccccagggttggagaaggagctaaggatctaccctgcagctttagagcaaaatgccctgtcccttgtcccttgtcgcccggggcaggcggtgactccctgagaacactggcaggcggagggggtggggccagggcccagggcaggcaagggaaggagccccaccacccagcccaacgccctccccctgtccgcaggctctgcgcgcctctctggaaatgaagtgtaagtgccatggggtatctggctcctgctccatccgcacctgctggaaggggctgcaggagcttcgggaatgtggccgccgacctcaagacccgctacctgtg

SEQ ID NO: 46474 - DNA, 1574 bp, Bovine  19866880788207
  misc_feature (1)..(1): n is a, c, g, or t
nctgctcctcttacacaagaggtaagaataacttcttttctgaattttacttaactaaatgataggaaaatatgcttttgaatcatgcaaaatcagttatgtgtttttcactaaatgtggatatattgttagaaatgacctatctaattgaaaaggtagactttagcacagacagaagggaagttattgtacagaattatgaagatccataccagttattaagatgctcttcacgaataaaaaacagtgattccaaacataagccccacattaaatggtacagtagcttacagagagagtaaaaagccagtaatgtatttattaacaaatcggttcttaactgatttgctgagaaatacttcccagatgcccctcaactgatagtaattatttccatgtctttgttgatgatgcatatataactcatgtggcactcttctattttaaattttaaattggagaataatgaggaaattactatacactcactacctattttttaaaattttttgccttttttgttaaaataaatgaagcatttacagataaagtaagcctcctttgttccctactcctactaccattagttaggactctctcaacttcaactaacagaaaatccaaattaactgatttaaataaaaagaatggagaaagattcagttcagttactcagtcgtgtccgactctttgcgaccttatgaatcgcagcacaccaggcctccctgtccatcattaactcctggagtttacacaaactcacgtccattgagtcagtgatgccacccagccatctcatcatctgtcgtcccctctcctcctgcccccaatccttcccagcatcagggtctttagtttcaactaactcaggaacttgataactttatccaaaacccaggatttcccatccttcctctctgccactatctatatatattactagctccccaagtcatatgtggcttagtacataaaaccattcccagaaacacctcagaaaacttgccttaactgtgacagagtttatgcatggaaccaagcactggtgatggaatggaattactctgactggtaaaaagccagttccaatttgctccctggggctgagccccaacttccatacagcaaatgaagagaaagtagtaaccaaatggatctctgctgataagtaggaatccaagaatggctgtgggcagacaagcaacttcacctgcaatggcttttctcacaagccactagctttataaatttggtgaacatctatatacatcactttttatactcttaaaatacaaatgtttaaatcaataatgatagaccatgtatatcattctgcaactcacttttcccctcaatattttttttttattataaggggaataataacagcattaacctcatattgctgttgtgacaataaatatataattatataggtaaatcattttcaacagtatctgaaacatagtaagagcaactataattttctgagtgattactattgttgttattaatctttgtattcctagaatacagaatctattcatatttattgtgggtttttactgtgtgca

SEQ ID NO: 46475 - DNA, 3109 bp, Bovine  19866880873148
  misc_feature (1)..(1): n is a, c, g, or t
naaacacggtggacagacatgttttaagccagctcacgtgttcccttagctttcttgtttcttaaccaatggagttgaaacatatcaccatttttgtttctttttgtcttaaagttctaaattctaaccaagtttcatgactcttaccaggttcctatcataagcaacaaagagtgtcttcctgtccaattctgcagtgtatttttctagtactctggatttgactttgatgggcttccctggggaaggtaataataggtgttagaaattcagtggcagagagagagaggagggctggggaaacgcagagaaggaaaagaatgaccactaactagtaagaggcagcctggcatgacagaaagagcatgcaaccaggaggcagacaactggtgtggccgccccagttccattacttactgtcatgtgatcatggcaagtcacttcatatttctaagtactctgatatgtaagatagtgatcatcacccttgccctgcctctttcacagggttgttataaacttaaataaaaacacggtaaattctgcaaaaaagaaacttccattgtacataacttctaactatagctgagagttaacctaagaaaataagtaaccaaaaaagtaagtaggccactagaattgtgaggtactttcctctaagttcagaggaaggtcgtattaagtacttggggaaaagtagaagggaaatggtgaatattctgtatcactaatgtacaaataagcatgagccattattaaaaaatgtgatcaagaaccatgttctatacctgtttgtaaggagatgactgtagatatttttttatgactgtagattttaaaggaaagataaaatacctataataaaggatggatttaatttttaaaaaagacaactacgatttcatttacccatgatacagttataatactacttaccatttgttactattatgtgccaggaagtatgctaagtacttaatctttatatcaactttatcaggaaggcactataatttccattttacagatacttttaagcagagagtttaaacttgcctgaagtcacagagatagtgagtggtagagctactattcaaacccaaagtcttcatatgctccttagaactgggcaactgcttcccactctggcctgccctgtaatcttcacatgccccagtcctccttatgccccaggtccactaaatgccatctccttagtgaaggcttgtccaggcctcacctacacccctcaccttacactggggagtaaatgacatccttaagaatgttgcagataacttctccaccttccttcagtacttcatactttctgttgtctatcacatcttgttccaatttcagtgcctgctcatcgctgctcagaagctggtgggtaaggcttggtggagagtgaacctaaggcatcaggggagggcctgcttctctgcctgctgagtgagtgaatgaagtaggatgtgagctggaccttgaagtgaaagcaacgtttggagagagcaaagcaggcaattctaggtggtgggaacttgtctgagaaaagaaccgaggtcagaaatgaggggggcctgtctaggggtcggttcagctggggtgagagacagtggagagatgtcactgaggactgtccccagggcctggatgcaggagcccctcacacagtctgttcacagcagcacagcacagactctcttcctctcagcgctaaacatatcatctcagtggcggccgtcaaacagtggctcgcatggcagggaagtcgtcaggcttccctgaccgtaattcagcattggctgtgcatgagcatgtcaaatggaatcctggaccactttctagttagtagtaaaagagaggaaaaatgggatgtttaagtggcatggtggtggcttttaaccaaactattcaagaggacaacctctgagctgaaattctgcttttccaatttgtgttgtttggcagtcacaacaaggttagtgattcaaggatgagaaaatggagacttcttttggaaaggatcagcataaagtactgggaactgtgccccaggtaacttgtgttcttgagaaaagggatagttttatgattagtcaggtaacatcaatatgttagataagaattctgttctgtcacgtgacagaaaagaaaaatcacactgtcttttctttaagaaacaaaacaagctgtcacacaactctgaagcttaccataaggaggaattcagtgactgcactgatcgtcagccagtttgaaattctggacaccgaaagaacacacagcaatctacttccaccgggaccagtctgtgaatggtaaccgcagcacagaggatggaagtgttttcttttacaaaagatgtaagaggctcccttaggggcgttgagtttttttaccctttgccctaaggagcacaggctggggaggtaattcctcagttcacagctgctctcggaaattctcaggtttcccctggggctgaagtgtttgttccagctttgtttaggtttggaacctccgggctgcctttccacagcagtctttcctgggttcgtatgtggcagaccttttgcgctactttgcatctgtctcagcggtccgtttttcattacggcaccaagaagtgatgtctactattcattgagtgttaatgtgcttggcacagctggcataaaggggcactatacagatgtgggcactgggggcttaatgggtttaccatgtcagtgccaggagacctggactccaatcttactgccacaggcttgtggagcagccatgcttggaaagtcactgaatttatctgaacctcagaaatggagagttgctggaaatggttatgttttaggagggaaaagacagtcagggtgcagtgaggaaacacttctatgtaagcattttgggtaaactgtctaaagagattgcagaagaaagggatctaatttctaaagttccagtaactggttatggttttgtttctcacttaaaatatttacttccctccgcctaattttgtattttctgttctgtattgttttcttgaaagggttccctaattatataagctcaatgcgccacaaaacctagatcctctgtgttt

SEQ ID NO: 46476 - DNA, 1538 bp, Bovine  19866880881610
  misc_feature (1)..(1): n is a, c, g, or t
nactgaacctgcacccgctacatgggaagcatgcggtcttcagccctgactgccagggacatcctgactcctaactttagacttaattctataccctggtccccaccaatgccccacctaataataatcccattttgtaaatttgtattattttgtaaacttcacttattcaaaatttttataaaaatttgtgggatttcttcaactcacaaattagatgttaatgaaacaaattattaccaaatataccaactgatttgataagctggcaccatgaaaacaagcaaatctagttatttcatatgagaacattctgggtttagtaagtcaaaaaggcagatatgttgacaccaataaccatagatcttattacagtccaaaacacaacttctaaaatcctagtaacaatattacatacatttattattttggagacttatataaagcaaagtagataaaaggcttggaaataaatccatgaatttttgaaatatccacttgatttcactaaactgatttttcaataactgtgtgcataaatctgttaactacataagtttaaaggttaatttaagatgacttattagaaagcctaaaaacttcttgcctgctttctagatgtcaaagctcaaaattacatacataagttagctagtcagtttcctagaatgaatatgctgtctacaaattccatatactcagtatgtttgagaaagacgtatctcttgtgttttttttgcaattataaaattgcaaaaggaatcacctcaactcatcatcttacccaatttcaacacacaaaaggacaatttaggagcccctaaagtcattctgtttaagtatggatttcacaggaggagggaacttgaaggatcattgatctgggagcaaccaatgctaacatctaggttgtcataatcaatctgctttaattatcaacaaggttttcccatttctgaccagtcatttggagctgacctctgacaagtacttacaagtcatcgaaatctcattttattttattgcctcatatttgttattgggctaatctttacctgttctacatcacacaacagcttaaatatttgaatggcccagcaataaatttccatggtccccctgggtcagtcagatgttagctgttaagtaaagctaaaaggatctatgcttcataaatttccttcagggtccacatttgctcttacaggctaggctttcaagcccaaacatctttatagctttgtgcagtgatttattaactcctccttgtttttatccaaaaagatcaatcacatatgtatcaataagctggttgtgctggtgactgctttttattgtacatataaccacctgcctttaatacaaactcgagtctaaagcttttgtaagcgcttgctggattttaacaaccttcacctgtttctaatttggtacaaaacatatggtttagctctgctatttcattctaggccagcttttcctcttatggacccaacaatataaaagaaaacaaatccagagcacaaaaacagaaattt

SEQ ID NO: 46477 - DNA, 1280 bp, Bovine  19866880915679
  misc_feature (1)..(1): n is a, c, g, or t
nctctgtcttctgacctgtaatgtcctgtcagcccttctcacagtttagatctctcagaacattctcttctgctgccagccagagaaaacggtcttcttttaaaggttcgtgtgatcaaattaggcctacccaggtgatatccctttgccataaacataaaatgaccagggatgtaactctgggctaaaggtggtagaggccatcttaaaattctgcctacggccccacccttcaggctgtcattgaaagataactgcccccctaggtttacctggttatcattcatttaagaggtagcctccccagggtgacatccgtgcctgagtcacgttgaaatattccatcatatgttgcacaccttccctgtagtagatattcagtacacatccagtgaattaattatactttctgttaaatgaattgtgagatcaaaagatgagcagaattgttccagaccagatagtaagagcatccatccaattggaggggcgctgtgcacttgacacttcattaacatttggaagggtttttgtttgtttgtttgtttgtttttgcttctctttttttgaggctacatttatttatgatcaaccaaagagactaaacagtggatgcatgggcttggactctaatgcagttcaaatgaggtcaggaaaatgccacaaaagaaaaaaccttaaaaggcatgaagtagatattatagtaaaattgctattggactgtgaagaaggctgagcgcggaagaattgatgcttttgaactgtggtgttggagaagactcttgagagtcccttggactgcaaggagatccaaccagtccattctgaaggagatcagccctgggatttctttagaaggaatgatgctaaagctgaaactccagtactttggccacctcatgtgaagagttgactcattggaaaagactctgatgctgggagggattgggggcaagaggagaaggggacgacagaggatgagatggctggatggcatcactgactcgatggacgtgagtctgagtgaactccaggagttggtgatggacagggaggcctggtgtgctgtgattcatggggtcgcaaagagtcggacacgactgagcgactgatctgatctgacgtcattagagaaagaaaagagcatgctggaaaactgtgttccatttagggcacctcattaccagattatttaagggaaactggagggagttcagagacataaagaatgatgaagaggctatagggattaatttacaagcaaagattttaaaaaacta

SEQ ID NO: 46478 - DNA, 1373 bp, Bovine  19866880917293
  misc_feature (1)..(1): n is a, c, g, or t
naattcccctccagggagagcgttgtgcaactcactctgctggccaatatccagcactcggctaatatccaacacggatcgggaattgcttgattattcgttaagttgacacatttgcttacaggttagcagcttgctcgtgtaatgactgccattaaggtctcggagaaccatagcaggagctagtaccccgaatcgtcctccattttccagcattggctctggaaatgctttaggaatgattgtccctttttctaggtttgcccaatatcattttggagaaagctctattgcaaacagaaatcatcagtgaaataaataaaacattcagatgaaaatagcatgcagatttgtgggcactgaaattagcattagacaggctctgaggccccagccacggatcttgtgtcaagctcagccccccacttacaggaaggctcatcttgaacaagcctctgtaaacctcagtttattcaattctaaaatggggctaaatcctgcccacctcagtttgctgccaggagctgcccacctctaccatacaagtaagtcaatggtgcctcccagggaagtcagaggctggggaccttgcccatgaccctgagtactgctgtctgttcactccgagagttcaatcaccggtcactcattcagtctttctttcagcaaatatttagggaattcttttatacactaggcactaagcaagacgctgaccaagacagacacaggcccaccccgtgaggaacgagcagaacaagagagacaagcacaaaaggctatgtaatgaatcacagttgtggtaagagttacaatggccctgaatcaaggaactgaagatttccttccgcaggctaagaatcaggcaagctcaacgctgtagggaaacagaagtccaggcccaaaggcaccagggagaggaatcagggtctattgtctgcatgaggagaaagaatggaaggaagaatgggttcagatgtataataacaatgttcataaagatgttgagaataataatcataatagttaccatccttaggaaggaaaggcccagttggtaaagaatctgcctgccaatgcaggagacacaagagatacaggtttgatccctgggttgggaagataccctggagtaagaaatggcaacccactcctgtattctagcctggaaaattccacagacagaggagcctagtgagagttacagtccatggggtttcagaaagtcctacacgactgagtacgcactggctggccaatcgtattggatcagtgtttactctaaggaccatccttagggcacctgctcagaggcaagcttcattctttactctcattattgctaatcctcgtcacactctataacttacaga

SEQ ID NO: 46479 - DNA, 1782 bp, Bovine  19866880975450
  misc_feature (1)..(1): n is a, c, g, or t
ntatattattttgggagttctacagtctacccataattttttttacaagccatatttatcaaaaggtattggtgattcaccaaagaactttaaacagaaaatgtatacatatatatttatatgaatgaaatatatatatttatagggttggccaaaaagttcatttgggtttcctgtacccatcttatgggaaaaccccaatttttttaacgaatccagtatttaaaaagttatatgaaatgcctgaacgtaacattcactaataatcagagctacaaataaaggtagagatattatgtttcttctctcatattaaaaaagattaataacaaacaacattggcaagaggataaaaaactcaaactttaaaatttatgtattctttgacctagcaatttgatacttaagggaataactgaacacaggtatatctaagaagatagatgcttctctcaccataatgtggttcataacaggcaaatcttggaaatctactgctaatgtccacaaacagagtgcagtgtggacaacaagatcttatacaactgtattcatcaatatgaaactatcttcacaatatactgaatgaaaaaagtaagacatacaacagaatgcacaatgtgacactgtttatggaaattttacctgtttcatttaggcatgtatatttgcatagatgtttggaaagctgatcaccaaaatactataatacttatctctgagtaatagaatcaaaagtggtttaatttttttccttaatacttttctgtattttaaaaataaattcatcctgagattgaatcatttgtatgatttgaaaagttacttctattttggaaaaaaaaaaaaaggaaaagtattgccttaacttgaaacaactaaaagctcactacattgagagtgtacaaattatctgaattttccttccctatagcagtattctcactgatgcagctaaaaaggcaactccccctacccttttactttttaacttgcatttagcttgtaatccactgccatacagcttcacttcatttcgtatttgtggagcctggaatttcttggtcacaaggattacactgcactttgcattttatttattttgcaagcactttttttttttttttactacttaccctgtttcaggcactattctaaaatgtgtttcgggcactattctaaatgctttaaaacaactttatatacaacttttttacaactttataacaactctaagagatgggaattataattgtaggtattattatccctattttacagataaagacactgaaacacagagagattaagtaacttatctaaaatcatatagctaaagtgataaatgggcatttgaactttgtaatctaaatccatagtacttgctcttaaatattcaactatgctgcactttattcatttcattctaggattttgacctttcccttggtaaatttacactaattagggtactaattttatcctccctggaaacccaaatcagcatattttaaaatgcttttctctagtagataccaaaatttatatataacgattttttgaagttcttttctttaaaaagcttaaacctaagctacgctggtctttttgatgccaactaaaatcagaccaaattcacttttcatatatattatttctcgtaattcatttcatgaggcttagccagaaaaaagtagttacaatttgtattctaccttctctgaactaagcattaggtatttcatttcaacgaagttcattctttaaatatttttctcccag

SEQ ID NO: 46480 - DNA, 1261 bp, Bovine  19866880979713
  misc_feature (1)..(1): n is a, c, g, or t
nagcccaattatttactggaaccagtgagggatgcattcttggcggcttcagttcgtgcaaatcagagacacgtctgagctcaaatctggttttgatcagttccaaccaaacagacggcttattaaatccgagctggagaggcctcctttctggaaccccctttctaagccctccctgtcccacctcagggctggaaggccttttggggagcagggagtccaacacacccatttgacagatggggaaatggaggcctggagaaactattgcaaggcgcttgctgtggatctgcaacagccaagccaggccagggagggctgtggttctggaactctctaggctaaacagataagctccagagacattaccctggcattcaagggcccccttccctgctcttagctttccaacatatctcctgctcaatctgaatacttccactaggcttccctggatcatctctcctttgcagttgaagatggtggacagaagagacctctgggcttcagcgtcctcatctgctgacgtggggtcccagttcaataagagcaaagtcctcgtgctcagtgggtcctgttgactgaatcacgatctgcctccccacaacttcatctttagacacctctcagggtgaggctggtgaggccaccagccagggtcagcgaggtcagcgggcctggtgcagctgtcggcctcacccacaaggccctttgatccagtgccagctccaatggccggaggctgggctggcaggccctgggcagtgatggatgtgcctgccagtcagtcctgctgggaaatacacgtccagtcacacaggtcctggagcctcagcccaacatgcgaagcccgccagtctcggcccccagtgtctcccttgctcaaccccagccctttatctccacgaccatctccaaccttcactctcactctctgcccctcctgcagagcctgccaagccagagtcaagttcacagctcctggtcaggttcactgtggctttcatgggtggtccctcactatattcccagcacaaccaggacgtgtgaggcagtgcggttgtgatggtccctatcttacaggtgctgccactaaggtttggcaaggcaaagtcaccagctgtccttgataagcggggattggaggcccagtctgtctgcttatgctgtggggcttgaccgagaggattctagaggctcagagagtcctaaaatcagggggctggaaggagcctgggaaggcatgtgcatttaatccaaa

SEQ ID NO: 46481 - DNA, 1173 bp, Bovine  19866881002855
  misc_feature (1)..(1): n is a, c, g, or t
ngggccagggccagcatctcctgcgaagcaggcaggtgtcgaccagtgagctgacaaatgggctgaccaagctgaccgtggcccttccctgatgccgttgagagatgcctcctctgagggagttctcagcttcagagcctccaagaggtgcatgtaggccaagcaggaaggggaagggggcccaggcccctttcaccacctcagggatcccgcaaatcaaggccagcaagggcaggatgaggcccactgctgcctggcctgggaggccccagcagggatgccagaggggctgggaggactggctggctggaggccttttggagatgggtgtgttccttcaaatcacttcattcatctatcctcgtttccccgtccactcatcagtcaacaccaaacgcaacagaggtccccctgtctgggagtggggaactcagagatggaggcaggctcagatcttgctttccatggactccacgcctggtgtgcagaggggagactgactggtagacagctaatgattaacgcaggggtgccctgaggctggggtgaccaagcctgccccgaggtcagcagcagcttcagggagaggtaacatctaagttgagtcttaagtgggaataggaggatgtgggacggtgtgggtgggaaagtctcaggcctcagggggcactaggagcaggtgaggggcaggaaagtggccatatggccctgggctggcctgagttcagtcctttctctgttcaactttccatgtgagacccaccagaagggccctgccctgtccagcccctcggaggcggagaggggctctggaaacggccctgagtgagggtcaaggagtgtgaggctcgctctgtgacccaagccgcacagctctctgccctgtgggacttacaccctggagggatgccatcatctaacctctcaagtggccacgatggagatgactctgctgggaaagatggcaggaaggacagaaggcagctaactcagtctgagggtcagaaaggactcttctggggaagggatggtcttgggtgagggaagggtggtcccatggcagaaagagctcgtggaggatgaaccagaggagcaggcagcgcgtgttcaaagtcaatgcagctggagagcggcgcctggaagagggcccgaggcgaggctgccatcctaggt

SEQ ID NO: 46482 - DNA, 1536 bp, Bovine  19866881039226
  misc_feature (1)..(1): n is a, c, g, or t
ncccttccccctcaaaaacagacatttcagcatgccaaaggcttcacatgatctgtcttcttcctcccttttcagcctcaccttctgctgccacttaccccaaaacccctgccactggccctttatgccaggaaagctgaactacttcactgaggtgaggcccaccttctgcttctgcttttttttaaatccccttttaccccctttacttgatacctccccctgtcactcatgtgctaaattcccattcggtctccactgtacagctccgtggtctttcctactataagcctttctttaccttcctgaatagagttattattcatcttctactttccctgctcaactttaaaaaaaaatactcatttggaacttgcctcgcagcccagtagttaggactgggtgctttcactgctgtgggcccaggttccatccctggtcgggggaccaagatcctacaagctgtgtagcctggccaaaagacaaaacaaagcctcagtcaaatatatcagtatttttacatgtctgttgtcatttattgtatatgtagatgttccctactagactaataaactctgttaaggatgagagaccaaaatttactcatccctttatcccaacacagtgtctagcaccaaaaatggactgagcaaaggtttgtgcctggaagacagaaagcatcagtgaccctcctctgggaattaaggaatgaaaatttaacactaaaaggaaaagcctgccatttgaaaggagagcggggtacacattagtatcaaatgaaattagtgtcttcacttcttataaatgtgctgggctttgcatgtgtctaggacaataatgcagggctttgagaagtggagtgagattaaagagaagttatacagtgagagagcattttcctttggtaataagttagaggttattgagtacctttttctcttctagtcaaacagaaagctgacaaatgttttccaagtgttatcagaattttctaatcttttgtctttcactgacatttttatttaatcatttcagatgcaatagtaaattactgaccttgtgtgtaattcaactagtgcacttaaaatggcaatacaggacagattgttaccagctcaccaggatgtgtgatgtgataccatttgaagctctgaaaagagaagggaagggattgtgtcttcagataactcaaccctggagttctggcccattaatacagtttttagttgtataaaagttacacatgctgctagtttagcgagtcaaatagttccttaaggtttattatgaaacagtatttttccctgtaccttaaaggaaactactttagtaatttgaacagattctgtcttatgtgtgttagtctcttagtcgtgtccaactctttgtgacccccatggactatagcccgccaagcttctctgtccatggaattctccaggcaagaatactggagtgggttgccattcccttctgcaggggatcttcccaacccagggatcgaatccgagtcttcaccatctgagcaactgggga

SEQ ID NO: 46483 - DNA, 1032 bp, Bovine  19866881042762
  misc_feature (1)..(1): n is a, c, g, or t
ngtttcagtagtcatggtgcacgggctttgttgccctgtagcatgtggaatcttcccagaccaggaatcaaatccatgtcccctgcatcgacaggtggattcgcatccattgtccaaagggagaagtccaaaggtagtcttgatttgtagcatttgctgatctttgaggtgctcaagccataatcaagctagcaatgtgacgtcactgaagtctagagaaagggaaaagatgcccagcagcacaccattacatagtacttctaccatacagatgcgtgagatataaataacctcaagagcatagataatagcaaagttgtagtaaaataattaagaagtgaaacattgtgaggattttaaacctgtattttaaagtaattcatttaaatgtaagtttgtgtgatttaacttttagcaatgactgtttaacatccagttctcaaaattcctgaaattttaagagtcggctctttgggctgatgtgagctgactctagaaccttcgttgcatccccctccttacatctaacttattttgctggattgaattattttcttcttactgaagtatatccacttgtattctttcagcaaagtttgtgtaaggtaaactcatcatcttcgcttgtctgcaaatggctgaaaatttggtgtcacttatgaatttaacttgtgcagaattgtagtttgaggtttattctctttccacattttgaagatattatcctcttgtattttggttcccactgttgctgatgaaaaggtgctgtcatagttaacatcccttttggtaatctggcccttttcactgagggcttttatagttttctctttgccttgtggttttgcagtttcatcagggtcattccctctattaaatctttctggaattcctattagacatctgcttgactttctctttttatcactcatatctcttaaattcttgttcagggttttttatttctttctctctttttattctggtttggggaatttcctcaaatttttcttctaagtccctcttcagcta

SEQ ID NO: 46484 - DNA, 1697 bp, Bovine  19866881082821
  misc_feature (1)..(1): n is a, c, g, or t
ncagcccagatctgtctgggggaggggccttcagccttgacgaatctaatcccatcgcctggctctgcaggtacaaaggttaacaccacccccccactggccacctccctcctcacctgccccctgcccctggcccaaacacacatacacccctccctctttcctctttgaaggctctggggagatgatccacaggtcacctgccactggctgtacctccattttctgaccttcctaagacattcctggacccactcgctccatgctgaggcctcttgagccaagagctcttttggttggaaaatcagctccaaacatatggggcccctcctgccttgccaactctctggctagtgaggtcgtctccaaggaccccagctccagcagagggccagagaatccccctcagaagtttcatggctgagaggcatgtgtgctcattgagaggacaaacgagctggtgactcacaccaggcttggagctgtggtcacagttttctttggtttcagctttgagagaaagagaccaaatcccatttaacacttctgtacttggcgctgtgctgacatggccactgcccttcctcagggggagacacaggtgggtgcaggggtcaggcaatcagggagtgagtgcaggagctggggtgctgggggaggcccagacccagcttgggtctgcctggaagaactggagcagaaaagccaggctgggaagttccaggaagctgtgggcatctttgatagaaagggaagcttcagatgcagccatggcctggggtattcaatattaagatggaatgaggaaggcctgttgagaggcaaggaggaagaaggcaggcctcacagggctaagaggggctggcaaagagctctgctgttattcacaaatcagtggggagcctttgcaaggtctgaaatgagtgtggactgtccatgaagaaagcctttctgagggtatgaagaacctgggcatcggaggtgaggtcctggctgtgtgtccaggccacagactcatttagcagcgaccacagccggccagggcccagactgaggtcctgcagaccagcccacaggccctggctaggtagcgtgcacaggcagtgaggctgctgccgcccggcaggggcttcaggagactgactcatcagtgtccccagggcccaacccagggctggggcagagcaggcgccagggaaagtgtgttgtggggagaaagcagctttacaaatgcttgcagcagccagactggagttatttcttcctgcccgcacatcctcagatctggaaataaggaagtgtgaggctccagtgagctcctgtactcaggcatggttgtaagggcttggggaccactggagccccagggagacttttcctcaattttctcgtctttaagttagtatgtgtgggtgcagaaggaatgacaagcaatggaaactggctggggtgctggcagcctgtgcattgggagccacatgaccactaacctttcacacatgtaccagtgcgtgctggtggggagatcccagctcctcctcactcttctctctggcagtgaaataggatagatttgttagccccatttcaccaagcgggcctccccaaaacattgactctatttcccagggacttgatgagccaaatggggttgggatggaggggccctccagggaatctctgtttttctagatggg

SEQ ID NO: 46485 - DNA, 1285 bp, Bovine  19866881105956
  misc_feature (1)..(1): n is a, c, g, or t
ntgaaaatgatccatcctgggccttccctgatggtccagtagttaagacttctcctttcaactcaagtagtgccagttcagtccctggtcagggagcttagactccacgtgcctccagccaaaaaaccaaaaccaaaacagaagcaatattgcaacaaattcagtaaagatttaaaaaatggtccacattaaaaaaaaaaaaaaaaagacccactctaaatgtcaaaacatgaggtatatgcaactgagaagtggttctgacattaccttctctacactcggagacatgggaggtagaagaaacagcctcctcttgaagactccagggtgatactttcagaggagaaacagtgatttaacttatatcaagaagttttatactactgttatatagtaaagaggttgaaaacttgtatataaaataatcactgaagagagatatcagaaaacacagcaaagatctcagagggaagtgagaagagggataatagattggacagagggtaacaaaagttaagtcctcataaaagagtaagaagaggagtgatcttcccctctcctcctttggggaaagacaagaaaaatagaatatataataggaaatcacatataactgtgaaaaactaaattaaatttgatataataggtagtaaaatgccatcacaagtttttaaaggaaaaatcatgtaatgaaaagatttacatcagattattctctttgccaatattaaatatagttctttagacagagctgtactaaaaaagagaagggaatttcagggaaatagaattccaaataatttcagtaagaaggttaaaaataatccccattttttaaaacttggtaagttgcacggttgtggaaattgttaaagaattcaatatcaatttccttgtagaaactttccagtttttccacacccttttagtaactgttgaaaaatagtctataagcaaatttcaatgaacagagcaaaattaaaagatggaaagcatgtctattttaatagctatttttataaaataaaaattctgccaagtaaatcaaaatcacattccacagcattaacagccatctgcatttgcccaggtttaacagcacctgtttcccacaaaatttgtaaaggttttttttttaatcctacaattaagcatgcaaggtgcataaacctaccgtacttggaaatgccaagatgtttccatatggaaaatgaatttggaagaaaaatcactctccattttaaatttctaaagacaacttcacaatgtgtgcatataatatagg

SEQ ID NO: 46486 - DNA, 1741 bp, Bovine  19866881164177
  misc_feature (1)..(1): n is a, c, g, or t
nacatataccattgaaactaaagcctgacagagactgcaggcaaaaagaaaacaagagatcaatttccctatgactactgatcccattgtactatccatacctcatactagctgtgaggcagtgaccaaatggtacaaagttccagtcaaaaggtacaaacttacaggttaaaagacacataagtgctggggatgtaatgtacagcatgatgactatagttaacagtactgcactgtatactgcaagtcgctgggagtaaatcttaaaagttctcatcacaagaaaaaaccctgcaactatgtgtggtgatgatgcttattggagtaatcattttgttatatatatatatatatatatatatatatatatatatcatcaaatcattatgctacatataaagctaatacaatgttatatcaattacatcttaaaaaaataataaaatgttcctatcaagaaagtaaacaaaaaattgaaaatatcaggatctcccaaagtcctgttctactctgaaataaaatatagattccatggaggaaaaaaaaaaatcaattttcttttcttaaagatattaagtatgttatgaggcatttaatctccttaaatctaagactctatcctatctgcctttctagtcaatacctttatgattcagtaacttacgttattgtctcctacccttgagtgcccaatgtgctagcaccctgtgctagagaggatttcaataaactgttacgccacatttcttcactgtacacagtgtcttttaatcttagtacctctgcctagcacctagcaactcatgccaaattcacaatatgacctctaacacaagactccccagactaatttttctactgctcacttctcataaccccagtaggctccagagtatagttctaaaatctgggtttgtttcctctgcttccttttatctctcctgaaagttcactgaagaaaacctgttcctcctgtgcaaactgctttttcattcttctctattcccaagcatcagtttcctctatataaatatccccaacatgagggcctcagaatatactttggaattaaaactcttgtgcttaaggagcctatatgtggaagtaaatccatatatattattacaattttcagagaactggtgactggggaagaattaccatctcctataaacatttttccatttacctgactcctgtttgatttgaatggtaggcttgatacccggtggcaaaggagactgctgaggctgctgctgatgagatactggagaaggctgggccacctgttgctgtgtctgttgctgcacttgatgtaactgctgcttaggagactgctgatgctgtttaggaaactgtgcaagaatctgagttggggcacccactaagcttttgggagaaggaagtctggttgatgccattttgattgctgacgtagatacacctatagaaaagtaaggaaaagaacatttaaaattaaagcataattaaaactacttctggttattatagtagataataatttaaaactaggtaaatcaaagaaacaatgattatccaacacctagggtcagatataatgtatgtagtattttacatatctgatatctagtcctcaaactttgcaagagaggcatcattgctccaacactcaaaaaactaattcattttcccttggtgaagagtcaaaacaaaagaaacatcaaccagcacattctcactcatctctcaataggttttt

SEQ ID NO: 46487 - DNA, 1370 bp, Bovine  19866881171002
  misc_feature (1)..(1): n is a, c, g, or t
nagacagaggaagcagtctggtgtgggtgactctgagtccagtgctcttggagagcattatgtctctcccttgttaatgttttgtaggtatttatattatggtcacttctgggcctttatctgtgtccccagttcccagtacagagccagacatgaagaggcattcagtaagatgtgggtgaatgaatgactgaatgaatgaaactgaccgactgagctgtgtgttgccagcacttggcccaggttctcagtgaatgagcccctagcagcactgggatgcgacccgtctgggggctttgtggtcgccctcaacctcaaccaggctgctcatgagagaagggctggcccagcaggcctgggtgtcccactgtgcaggcggtggcttcagtgaaagttaagggcctggcagcctgttcctggggaagtccacgggccacagtgctgggggcagggcaggcctcctggcggggcttcctgtcaaggctccaggcccagccttcaaacaatggcagggactcggggatcagaaaatcaaaagagaaagggcaaaataaagttctgcgggtggggggattgaggaattccgtttggaacttgagctcagatggggggcctgcttgtggcctgtgtggacctggagtcctgagcttggcccagggcagcccttgaggcctgtctgcctcctgctcacctcctccatgctgtcttctgcctgatggggccttttgaagcccaaatctgaccgtgtcacccactgcttaaaaactcctatccaaggtaatggcttagcccctccatctggcactgaaggccgtttgtgatgggctacagcccctgtttcccaccaccttcacaaggggccctgttcacagcaccttcaagtccagctcccgctgtggtctggggttccctgagggcagctgcagacaggagagggcagtgggagcccgcggtgggaaggagcctgcagtcttaccatcttcccctttcttcctgccctctgcagagccatgagccaccagattctgctgcttctggccgtgctgaccctgggcctggctacctcccaacaccgagacaaggtgccctgtaggaaggtaagacgctctgcctcatcagggagagttcctcatatcccctgcccccgggggtcctactggcccagaagccagaggctagagggctcagaagaggaaaggggatccacttaatgccattaaagctcgcatttactgagcacctactagaatgtctaaatgccctgtttactattaatcctgccaggtaagtataatcattccagttttagagaattggaaaccggcttggagaagttagccttgtccgaggtcattcacttcagtagggac

SEQ ID NO: 46488 - DNA, 1915 bp, Bovine  19866881184508
  misc_feature (1)..(1): n is a, c, g, or t
ncccctagaacccaaggcccaagccatgccagtgcccttggtgagccattcagtaccttctgtgcttttccttcacggctccaatcacaatcacaataatcaaagaaattcataattaacgcgtttgattgttttaaagtctgtttcccttcctaagggcggggctgggtctgacttgcccacggttgtatcctgaacacccagccaaaagcataactgaagccagtgcataagtgaggaaatcacctcccagggcccccagatggccagagttgtgtgtctgtcttgtattttggggttcttccctatactaggaaaggaaggagctaatccttcttgggcaccatgtgcacttctgacttcttccccaggctctgagcccccatggggagaaatctgccccctttttaatctagtccatctgtggtggacatgactaagagactttcacttatctcttccccagtctctatcctagtttagggcctgaacaagggactcaagttggactttctgatgagtcatgacaacataaatatgactagagtgataggatcacagaaaatcatgagataatacgcaaatgctaagtccaggcccgtgggtaccacaggcacaaaaaatgctagtgtctcttctttaagaggttcttgtccaaccaatctttttttttttttagggtttttttgttgtagggttttgtttctttttttttttagtgtaccattcagattttagtatattcacaaagttatacaacaatcactactaattccacaatattttcattactctaaaaagaaactccattcccaatagcattcatgcctccttttcccttctcctcagcccctggcaaccaccagccatcttattttaaagacagggaaacaggctcagagagggcagtgcccagagccaggaccagaggccaggcctcctgacaccctgtctgcttcgtgtctgagctctctctggaggcttccagtgttctctggtgactggcatgaaaaggctgtttagcaaaggcccattaaattgaggctaacaggtaagatgagactagaccatctggagttatgcccaaaacctgcctgtgcctggaatagatctgagggcttttgaggggcagaagacatacctagacaacatctctaactggtatcctgcttcctacaatagccagtatcctttcatagctgggggtgtcttcccccagtcgaccacatggcctcctctgtggtcagagtaggctcagagtaggcatgaggaagcaggggccagacttcccaggtttcccactgtttttaggaccccagaaagctgagtcagcctatgaacacagcgtgtacatcttcctatggtaatttagcagttttcacattccatgccttagccaaaatggaaaatgaaagaaagggaaaaaaggcagtgctatgttttaaagtggccttagctctgtgagttctaacatgggaaactgctgtccatgatgtcatgggccctgaggccctctgggcattgttactgacacttcacgtggtaggctgggccccagatccacacattcctcttgccagagctgtgtgagcctgtgggtccatctacaagcctgggccagaccctctgagccaggatggagccaggcactgggcagacagggggcaccctctggtaagagcccagttcagctccttgctctgtcatccagaggtctctgaggtcttcccctcatgggatctgcagctaccctgagacacggagggtcagcactctgctctgtgtctgtccatggggcagcagagtggtgtggcgccctgctcccggtcacatggttggggagtgctggccttgcccatcactaggggagccctgccctctctgaatgttatgaggagagggcatggtccttgcc

SEQ ID NO: 46489 - DNA, 1587 bp, Bovine  19866881215265
  misc_feature (1)..(1): n is a, c, g, or t
ncccgtccccggaccacactcggagaagtctgggctagaccacgcctctggccagttgacctggggcagaagagcaggtgattggagatgagaagaccaaggatgtgagctgactcacttgaatggttgctgacctcactcaggatagagaccagacaggtggagaaaggccagtgagcctgagggcagagccatcactggatggtggaggggtgcagtgaggggtggggagcaaagggttcttggggccagagaggagctggggtgagggcaggggttcacctgatggcccaagtattacaggagcaggaaagtttcaagaaggtgagaaagccagggtctggtgtcagccttcaaaagcaagttagtcactaagggaacgcataagggaatattcctagcataacagaatcaaaggctgccattgaagaaggccactgggaaagtcacgtactgggaagaaactggttttggttgaagagtaggatatgagcttctctgatggctcagatggtagagaatctgactgcaaggcaggaagcccggggttggtccctgggtggggaagatcccctggagaagggaatggcaacccactccagtatgcttgcctagagaatcccacagacagaagagtttagcgggctacagtccatagggttgcaaagagtcagacacgactgaagcaacgtagcacacacacacagtggtccaggccctgactttcaggttgtgatagttaggagttacctgtcataacaactttaggaggtaaacaacgataaccgctctcaagatattgtgtatcagctgaaacacagagaggtgaagcggcttgcccagggtcacacagaggtggctgagattgtaacgcgggaatgtggctggaaagcccccgggtttacccattctgttctcactagctggaacccactctgggtttgcctgctggtggggaaagttgctctgggcctgaggtcttcctggtcctctccagtccacctcccctaaccccctgccctgcctaccacccttccagctgcctcagcaaaggaggttttgatgctttatttcctgccactcctcccccagcaggagcggggaagcaggagggcctgggcagtgctgccgactccccagctctgctgagagcccccaaaccaacccaggctgagagcccctggcccaggcctgcccagccccaggtgggcctccccagtgcatcctgctcgcaaaggcagcagaccgtggcacctacagaccgtgacctcctcccagcggacagcagctccgtcatcatcgccagctcctacgcctcagtgcgcttggtgggactcagccccctgcctccctgagcccacccatgtgggccggagagggactgtgggtggtggaggaggcctgggacagagaggcaggttggcgttcctgactcagttgggcggcagcatggctgtgtaaccttgagcaagttgtctgagccctctgagcctctgtcccctcacccattcttatgtaggttcactgaactaaggtgtgaaaataggctttgcacaggctgtgtgggtggaaggggcctcccgttat

SEQ ID NO: 46490 - DNA, 926 bp, Bovine  19866881234360
  misc_feature (1)..(1): n is a, c, g, or t
naaatgttgtatatgcttacttgctttttgcctacttttttctattgcttattcaaagagaagtgttaaaatactctcttataattgtgaatttgtctgtttcaccttaagttttatcacatttttctcatgcattttccaatttctattaagtgcataaacatttagaattgttatgttctcctgacagattgactttatcattatgatagtgtctttgtattcctggtaatattctttactctgaagtcaactttgtgtaatactaaatattacttcagctttcttttgaaaagtgttagcatgctacatcttttacttatttgctttttctattttaaccctttttatatttttttatatttaaaaggagttccttgaaaatatcatgaaattgtcctgcttttttatccagtattaaatttttactttttaattggtatattcagactgtttttaagttacattaattactgcttttgttgaatttaaatctgctatttgtcccatctgttcttgttcccagtccctctttatgtgtttattttttgatttcctttgttggcttctcagctacaattgtttttgttatttgagtgattcttttaaggcttataatgtacgtcttcaagtgatggtatgctgtgccacgtacagtattaaggacttcacatcagtgacacatttttctcttactagcctttttgttactttcgtcatatattttacttctacatatgttataaactccatgatacattattatttgtgctttaaacagttgattaacttttaaaaagattaaataataacaatcttatgtttgcccacatagctatcgtttctgatgctattcattctcaaatgtagatccacgtttccatctggtatcattttccttatgcctgaagtatttccttttgcat

SEQ ID NO: 46491 - DNA, 1232 bp, Bovine  19866881244029
  misc_feature (1)..(1): n is a, c, g, or t
nccatagacagaagcccaccaggcttccccgtccctgggattctccaggcaagaacactggagtgggttgccatttccttctccaatgcatgaaagtgagaagtacaagtgaagtcgctcagtcatgtccgactcttagcgaccccatggactgcagcccaccaggctcctccgtccatgggattttccaggcaaaagcactggagtggggtgccattgccttctccactttctccacctactcaggcccattttcagatttagccactgggagggggaaaggagcttaggggcttctatttcctcacttccctccactctgtgtcactcactgctttcagagtcaggtctggatggggggacagagtaaaggggggcatggagggggatagacacaaagtgacacagccaggcttgcctaaggggtgctggaatctggcttggggttgtgggggagtccctttgcagactctgggactttgcaatgtcccagacaagctttctctctttggctgtattatggatttttcaatgactctcactccttgctaagaaaaatgtgttgacataggtgatgccccctcttccagttgatgtccattctcccttcaatgccagttggacacctttgggttgggtcacctgatcctggcagacagcagacccttgaccggtccttgctatatgattcgtgcttcgctccattccagagcgcccacttggcccacagaaatcttgtgttctttgtctgcaaagcctagtagggaagggttgaccctgcagcccactctcctctctctccagtctcaaggcttcagatgccatttcaggagagaatcagacacacagccctctgcccccaaactccaggaccaacaagaggaggggacagtccttgcacatcaagcctgtccttcaactcctccttggactggaagtgagtgtcagacacagaactggtctgaggtcattcttttgtcctgtcctgcacagatgcttttaaatgtggggtgctgggtatcagtggtatgcaatttagggcctcagcatccaagtcaaagaaggtgtccataaagaattccaggcccttctcttcctaaaacaagaggagctagggcttcaaggaaggaaacagaaaagcagaagcagggctacacaaagcatcaggcagagcagagcctccgtgggctcccggagatgcacataaaaccagggattggatggattcagtt

SEQ ID NO: 46492 - DNA, 1166 bp, Bovine  19866881254426
  misc_feature (1)..(1): n is a, c, g, or t
nctctcagtgctgtctgtaaaagaggaagacaactatgaaattgatgatctggggaggcagaggaggctgagagggcctctaatccagctgggagtagatgtttagagtaaagagcaaggaagtcttcctggaagaggtgctgtcttcctagcattgtccatcctgggtgtggttgctctgagcaagcaatggggtaataatgtactaaattttgaggcttgagagggtggccctagtaagtgtgagaaatgctaaatgtgctttgatggctggacatgaagtgggccatcagtggaagtgggtgggaaaccctggagggggcagcaggggccttggcagagccatcaacccctccatgatctagtccctgtgtacctctcaatcctgggtttgagtcccaccctggacaccagcttctgtgtcactttggtttcccctctctgggcctctgtttccttatctattaatataaaacaggaataatgattcctgtcccaggggattcatagaccatgggcagattttctccccctggtagaaattctgtgtaaagctgtgagcctgtgaaagtgaatagccttctcccctctctgcctgccacggggggccttcccaattcaaccctgcccctattctgatcccattgttgggggtcccagatcagcctcagacatggtggaggaggtggggaggagctcccaggagacagccataccctggctcccctgctcttcaccttcacttgtgacctgccagcccccttcctgccacagccctccaggaagactggggctggagagggccaggccctgggctgggctgaagccaggaagggaagggtgcatgggcaggaagtttcagaggtgagaactaactctttgaggtgccaggtaacctgctgatagcattacacacagtatccaggcagcagtagtcaccagtatttattgagtgcttactgtataccgcacactggtatgcagtctgctgctgctgctgctaagtcactcagttgtgtccgactcttagcgaccccatggactgcagcctaccaggctcctccgtcatgggattttccaggcaagagtactggagtgggtgccattgccttctccaggtatgcagtctagatgccttatatgtatcgtgccattgatcatcataa

SEQ ID NO: 46493 - DNA, 936 bp, Bovine  19866881286555
  misc_feature (1)..(1): n is a, c, g, or t
natatctttcacacggatgacgtaaacttacatttatgaacttaaacatatgaaatggtaaaagagctaatgctaagatcttcagttaaaggatgcctagagatccatgaatggcattaccatccacccactaaattaagaaacctaagagccactcttgttccttctttcctttagccttcacatccatttcatcagccagtaaccctgcttgtcaactccacaagggaaggatcttctgtttattcactatggtacatacctggtgcttagcctagcatctggcacacggaagatgcttaactaatatttatcaaataaactgaaattcatgctgtccttgagattaacagtttttaaaagaaaaaaaaataaatccctcatttgataatttgttaaaatatatactaatttttttaaatgtagactatggaaatttcatccgccattttagttgctgaaacatattaaggctaaattctcaaagggacacaggtatgctgtggtaccggaatatgcagaagtagaacataatgactttattcaagtttgctgttacctgatccatgaatatttaaaagatattttattttataaaaacttacatctgtaagtaatggactgaccgttaacagagggcttaacctggaacacatagataggcttagaggcccatgaacccctaaaaattgcaaaacctaacatgtatattggcatgtgagagttttcactttttggtgagagttcaaagtgtcatcagattttcaaagtctatgacccaaaaggttaaaaaaattacttaactagaaacagtcacaaagtcttttaaacaggaatttgtacaataaaataatacccaacagctccatctatgggtataagtcattatcatgtagcagaaataatgacaactacaagaaatcagtgcatctgtga

SEQ ID NO: 46494 - DNA, 1349 bp, Bovine  19866881291443
  misc_feature (1)..(1): n is a, c, g, or t
ntcacagagcaaggaaatgaaatatgaggatttaaacctagattagaactatcaaaaattctatattctttccactgaatcagagaggtggtaaacagaaaagataaaagagggcagagaaaaaagatatctcacctgcaacaaagaaaacaggaattcaatgaaggccaaatttgcacactgataactgtctctccctaaatatagcttctttacatgtaaaacagagtctggcatgtatgagaggaatgtctcattctgttccacgatccatagatagtcaaaaaaagataattccccaaaataatctgacagtaataataatctgcattattttcagggtcattttcatataacaccaaactaagctactgaagtcaactcaaacatgcactctcaaatttaatattactctcggttaccttagaaactccaaggaattttaaagcatgtgtcaatgactagattaaataacaataagaaagccttctccatcagccacgtaacccctaacagattaaacacattgactggaacagagaagcagtatataccactgattccagaagacaaaaacagaactttattttctaaagtatcagttcagcatctttctccggcagctattataaatgacttctattgccttattaattttctaaggccttttatccacttctaacaagacaggttcctatcgaaaaattcattccaaggctttttgcaattttgtgattaatgtaattcacactttgaacaaaagggatatttaattttggctgagactaaaaacttggcagtttctagtttcagaacaagagttattcactacgtttcacagcgtttgaatactgggacaaaaacagatgaaaaataagataacttttcttgaaagaatccaaggaaagtcatctctacacactgaaatatttctttactcaccttccttgcttcctgtttctgcaggcactgggagagatgcattgtgctgaacagctgcattggcaacagcattagctgttacagtgaaggcagtttggggaaccagccggggcatcaggggtaccaatcgacgaccttcaatggaccattctgaggagctattaggtccagacatactaaacaaaaaagaaaatgctgctacaaaagttcttgatagctaaaactgaatcaaatacatatattcaaatataactttttaaattataaaaaaagtaccctgagtgaacaggagaggctttattttaagcaagatcaaaactatgaataaaaatcagaatttaaggaatcttacatacacttaggttttcacacattttattccataatctgaatcttataacgaacat

SEQ ID NO: 46495 - DNA, 1275 bp, Bovine  19866881377413
  misc_feature (1)..(1): n is a, c, g, or t
ncagcactgcagctacacgtcattgagtacctgcaaggcggtagctgggcttgagatgtgctgtgaatgtacaatacacactggatttagatggtttagaataaaaatggagtgtaaaatattaataattaaaaatactgattacacaccaatcagtattttagaattacaggaaaactactattaaaattagtttgcctattcttttttacctttgtgcaatgtggctgccagaaaatgtttaagtttctggatatgtagctcagactatatttcagtgctgatatagatgatatgatctcaactgtataagtaacacatagcaaactaacttaacagtggtttccctccctggattgtagggctattgtttgcccgtcatctgtgtatttttacattttccaaattttattcattgataatcaaaaagaatgatgagagagaaacaaggcacaaataaaaacagaaaaaaaaaatctctatttggttcaaagacttggctgctggagggtgagaaaagcagcccgggatacccaaatgacttctcactgacggagggttagcacacaaaggatgttggccagctgttctccatcctgactggagacagagaaaagcggaaatgggtgttaaccgcagaagggggcctgtaagttaaatatagggaagaatttcctgaagtgagggtgtttaaattctggaatgagttacagaagaagcctggtcccccaaagtcttttaaaatactacagatacccatatgccttgtgtattcctgtctagaggcaatgagataacttgtcaaggttccgtctgaaatagctgtcttaagagtaaataactccaataaaactttctttttcatttatttttgaccagccttcacttttcatattaaggatgccagccagtaaggagtactttgagaggcacgcccctctgatatggctaccttaagtagtactcttgagacttcaaagacaatgtcatttgatctaaatttaaaaaccagagtcagctagacgacatggtttttaagtcccttgggtcacgtgccagagactagttctgaattcagcatgagcaaatgatggagggaaggagagaagatagatctgcttttaaaaaataaggcgtaaaaaaacgttaatacaggatagggtctcattttcacaggtggatggtttggcttaaaagctgaactattatatcactaccctctgtgttttggtttttttttttaccctctggttttaaagaaagatgggttccaaa

SEQ ID NO: 46496 - DNA, 666 bp, Bovine  19866881447794
  misc_feature (1)..(1): n is a, c, g, or t
ntaaagtctctttacaatactgttgatgattttttgcttcagttcagtcgcacagtcttatctgactctttgcgaccctgtggactgcagcatgacaggcttccctgtccatcaccaactctggagcttgctcaaactcatgtccatcgagtcagtgatgtcatccaaccatctcatcctctgtcctccccttatcctcctggcctgtctttccaagcatcagtattctttggagacatttgtaaatgtgtgagactagtaatgaactggtgatccaatgggaagaaaagggatgaaaaaagagacttgtattggtttccttttttggaacagacttgcagagttttaaatagtagtgtgctagttggagcatgtctttggagacacggcagtaattttgatttgtgtccagttaaagctgcaacaaaactgccaatttataaggaattctgtatttgctcattttcttcagatagtaggccaaatggagaaattttttaagctgattctgaaatactgtactaaaaacccaaatgagcaaagttaatcttatgtattagcaatagaggattgcaggaaaacattttggatttttactttctaatactagtaatgagaccatttgtgtaagtataaatatagcatgcagatgtgacaaagaggata

SEQ ID NO: 46497 - DNA, 1180 bp, Bovine  19866881595450
  misc_feature (1)..(1): n is a, c, g, or t
nacgtctgtgtgtgtgctgtgcatccgtgtacatgagaactgatatatgtgtgcgccttggtatgtctgcacgtatgctgccttagctatgtacatcatgtgtctgtgtctctctgggcaccaaagtctgggaatagtggccaagcttccaatatttgtgtccatgcccacaatgtgggtctgcaggtgtggtgtgtgttgccttgtgtgtatgtgggttgtgtgtccaggggtgtctggatcgggctgtgggtgagtgtcctcgctctgccctccaggatggtagtgtgagaagagcagaactgcctgtgctgagaagggctaaggtggctctgttctcagaggcctctactcagaccctccagggtagaacctgggggctccagggagaaactctggtgctaaagccaacacactgtctaagaatagaccccgcgactctggggtcctcatctctccctagcctccccccattagtagaggaggcggtcacccagggggacagccagtgcccatctggctcctgtgctgtggtccctcctgggatgggccctctgtcccagagcctttggggcttatttactttacagtcaagagctgcctgctgtaggccagcccctatgcctggaccttccacacacattatcttaaccacaagccactcttgggacaggaggtgtttacccactttttagaagtaaaaacagaggctcagaggagtgaaaggacctatccatgccacctctgtctcctgattcaaggcggctgcacagctgctacagaagccaggagagaacatgcagaaggggtgccctcaggggcaagcgactgtctctgtgaaagagctgaggctgaggaggcgcttggagctggcccttcccccttgaggagctggcctagcatctgcatggggcttccgtgcataagctcagatggaacgccagagatggggcctcaagtcatgactttcaagatgaatcagtgccagctggtccccatgaagtcccctactctcctccaccagactggggccatcctcctgtccctcggggtcggttcccagcaatgggacacccctggcctctctggggactggggttcttgatatgacagatagggccacaggggtctggaaggtccttgcggggccggtctggagggttcagttcaggtccttcag

SEQ ID NO: 46498 - DNA, 1101 bp, Bovine  19866880478841
  misc_feature (1)..(1): n is a, c, g, or t
ntcattctaacataagtgtttaaattttaaaatatctccaccaatccctttttttccagaacttgtaaataagtgaatccctattattgtaaagatgaaactgaagtattttaaattgcagtggctcacagagcaaaatagcaaaatatataaaaactgacaaatgcaaaatagcactttcaacactgccctctaaagaaagaaaggccagtgtttctgaaataaatttctaaatttaaaacatattttctgtattcagagttttgcatgtgattataataaaagaaaaatttctagagaacaaaacatgaagtaaaatatgggcatttgagcaattatcagaggagaaaaaagtccttgaacttaagaacattttctcaaaagtaatttcttagctgttagatatcaaaagagtccaggcttattccttgtaaagcaagacttcagaatcctgctttaaaaactattccaatatggaaataattctttatattttatagctttatgaagtctttcatctaaggatctccaaaaggaaatgaaatacaatgactgaatttttgaatattaatgacttcaagaaaaatgaagcaattaaaaaagaaacagaagtctacaataaagaaagccagtttttaatgttatacataagactatctggatagttacagaaagtgatagctgatatctgttattttctttctgagtttctgtctaatcagtatcattttgccacatggaccaagtggagatgtctcagaagaaaacatgctttactagtaggaagctgtcccttttatacctatcagaacaaatgtattcataaaatgtttcaatattaaaacatatagcaactgcattcaagattgtttacaacccaaggcctcaaataggaaaaaaaaaatgttcgacctaaaaatgctgcaccattctttacagtcaaggccaccattaagtagtaacatagtgccctgtgaaatatgatttacaggtctctaaaagtcccatctgcttcaaaatgagagccatatatttaaaacagtttcttagatggccatctcagtctaaaccccttttgtcaaaaagggcctctactatttt

SEQ ID NO: 46499 - DNA, 1653 bp, Bovine  19866880782297
  misc_feature (1)..(1): n is a, c, g, or t
ncgtgctgtgattatggggttgcaaatgagttggacacgactgagtgactgaactgaactgaactgcttcattccgtattccaaggccaaatttgcctgttactccaggtgttccttgactttctacttttacattatatctatatctatacttcattatgtcataaagtatagatataatggtgggttatacaatttgctgtaggaatttttctcatcaaaaattagtcccatcattcaatatttgaccatttctttggattttttccattaacagtttaaaaattgatgataattttgttaagtttcctaactgatatattaaccattctctagtcattgaaaatctgtttttagtagggaatcattctgattggcctgaaaattatttaacgtcctaaataactctgacttacagtgcagctgatatcattgcctagccacctgtgtaaggagattttggctagtaattgtaattatctattcaggaagctggccactagcatagctgctgttattgtgaagtatcaaggctcaaccctcaaaaagaatcattctgtgctattgtatgtatgtgtgtatgtttactgataagcttgtttggtatctttttgtccatgtaagactttctgccccagtggagcttataagctattgtagagtataggcaatagcattgtatgtatgcatgtttgtatgtgtgaatatagaaagatgagtaatggcacagctttgaaaaaattaactgaattgtggagatagagagtgaaaggggttactacctgtaaagtgatcaataaaagcttctttgaggtgatattaaaaataaataaataaaaactcaatgaatgaaagtgaaggagcaaattatgtgatagttttggacaatgatactcaaatgtaggggacagcaaataaaaagtcattgagaaaaaaccatatgtgaggcacagctggaaattcatgttaacattttgatttcactgtcagtctgctatggatattataacacagttaaatctccaaaaagtttttaggtctttaagctttgcctttaaagtgagagacagcagtcctggcagagccttctttatgggtttgtatattttaaattgacttgtttaatgccagcataagagacagtaacaacttctttattttctgagacatttccaaatagcaaaatgttaccaatgctattttcagtatagaaaataggatttttgctcagaatatttctgtcttcaatatatatctttaaattcgatgtttattgtgtaaacaaatattgtaaaataaaagaactatttgtttttcaaaatacaattatgacaataaccagggttgagaagggaaagaaacctaaatgacttatgtatttgtaatgtaaagatattatttgctgctttaatagttccctgagtgctagcacccacctgcttgttttgaaattttacctagttattgcttgtctctgggttattatttgtctccaacatgtttgagcaataagctttttgacgactttccatttcattcctccactttccattttgacctagtcgcactgcggcttctcacatgccacagctatcccattcagacatttgcctgaatccttgctctgcacttttccttcctgcaatgaccaaa

SEQ ID NO: 46500 - DNA, 831 bp, Bovine  19866880811935
  misc_feature (1)..(1): n is a, c, g, or t
nttgctctatccatttcttgtagggttatagagttcatgtctctgtcaggaagcattagcttgaggcaagagcctaagggcattcagatggtaatttaagtgtctgatgctacgctgtaagtaataggtttccattaaaaaaaaacaaaaaacagttctttatcagtacaataaaaatgtataagttagagattaggttgtagggagaatggcttataaaaaagaaccactagggaggagattatgatttataatatatttatcataaatgttaaaatgcatacacttgtaaaaattaaaaaaaatcaaaatatctttcagaataaatattttatttcagaattatcagttatattattggtgaaattagaggcaatttcaatcattgtttgtatgagattctatcacttttgtttccaaatcatttttgtctaaaatgttaaatatatgtgtctatttctttttctgaattactcaatgtaagccttggtgatgatagtgcaatgcttctctgcaagtctcatccataacatatttcttgatctaagtcattcattgattcattcactcagtaaattactaagcagctactatataccagacaggtgctgattgctgagattcaatgtcaatcaaaaaagacatattttctgccaagaacatggggagaagaagatatcaatcaaaaatgtatgcaaagaagaatatatttgtgaataaaatattataagaaacatggtattctgagagcacaaaacagttatttctcccaatctcataaatcaagtaaaacttctctaagggactaaaagaattccgaataaaagggaa

SEQ ID NO: 46501 - DNA, 856 bp, Bovine  19866881043280
  misc_feature (1)..(1): n is a, c, g, or t
ncccctggtacttaggatcagagaagcccttagttaactactaatatattacacaatatcatagaaagtagaagcttcagaaatgaaaaatgttctggtctgtttattttaagatatagctaaaagcttgattttatgttatgtcagtttctatagttaaaagctgcattaatgtggctgaaatactttgaagtatgcagagataaaacaaatcagcaggtatttaaactgagggctatgaggtggaaaaatcatcactttcccttcaggtagaggcctgaagatatatctttgttaatgaggtttcctgctgtcctgctggatcttcaatcatttaaaatgcaaatcccaaagaatgaagtaagagctatcctatataaaagaaggtggctgatttttttttttttttaataaatgatcatgccatctgcttacctcatcattctactgactatgaaattcacttatgcaattatatgaacttgtaaactataaacaacataccttagaagtccgcaaatggaattattacttttcctgaatgcccaatctcctcccatagtttagagtttattcatatggtcaggaaaacaggagagtaagaattaacttttccgaacagtggacattctatttatggtttttatgttattatttttaatcagtaatatctgagttaattagaagaagttttgtaaagaattatttcaaagtgacctactgtaggtttcttgaatacttgaagagcttagtcatgcctgaaaatttttttcaggtaattttgtgtgaagtcaggaatgcaggaagagaacttggtttgtgtttccagaggaggatatttttttcctcaaggaga

SEQ ID NO: 46502 - DNA, 2636 bp, Bovine  19866880153565
  misc_feature (1)..(1): n is a, c, g, or t
nttcctcttccttttctaatccgcttgaacatctggaagttcacggttcatatacggttgaagtctggcttggagaattttgattattacttttctagtgtgtgagcttggagaaggccatggcaccccactccagtactcttgcctagaaaatcccatggacggaggagcctggaaggctgcagtccatggggtcgctaagagtcgggcacgacagagcgacttcactttcacttttcactttcatgcattggagaaggaaatggcaacccactccagtgttcttgcctggagaatcccagggacgggggagcctggtgggctgccatctatggggtcgcacagagtcggacacgactgaagcgacttagcagcagcagcagcagtgtgtgagctgagtgcaattgtgcaggagtctgaatattctttggcattgcctttctttggggttcaaatgaaaactgactttttccagtcctgtggccactgctgtttgcaatttgtaatgaataagagaggcaccttatttctaaatatttttaagggggcacagaaactgcccaccccaccaccccccacaaagaaagaaaacattcagaaaacacacaaacagcaaaaacattaaaaggccacatctcttagccacattttatagtgcattagcagatggtacataatcataattttgactagaaagcagaaaacaaggatggaatacttttcccctggttgattatgagtaattgtgaactcagcataaacccccaattatatgtacaccgggggcttccctggtaactcagctggtaaagaatatgccttcagtgctagagacatcggtttgatccctgggttgggaagataccctggagaatggatggctactcaccccagtattctggcttggataattccatggactgtatagtccatgggtttgtaaagagtgggacgtgactgagtgactttcactttcgtatatatactgagagcccatgtggtaaatctcaagataggacatgtctgatagtgggattttacagtaatgtttctgactcctctgatgggtttcttcaaaatatatccaaagaatgttgtaattatgacttcaatgtctcttgtcccactcacagcatgatactatacttcctgtgttcttgagggttataggcatgtgatggtgttctagtggttccagatcctgtctattggcagctctgtgtgtgtgtatgctaagttgcttcatttgtgtctgattcttggtaaccctatggactgtagcccactaggatcctctgtccatgggattttctcagcaagaaaactgtggtgggtttgtatgccctcctccatgggatctttctgacccagagatcaaacccatatgtctcatgtctcctgcattggcaggcaggttctttaccaccagtgccacctggcaagttcattgcaagccctaagagcatcctggctgctcttgtgaaccagatcagagtctggaaggagcctgaattcaccaaccttctctctctccaaaggaaatattttcaagttttaagaaattgccttttcaatgaggctttcactagggagcattgcagacttattcaatgcaatgaacacatgcatagttgctcctgtctggaatagcagatggcacatcctgtcttttaatagtcagtctcccccaaattctataatctccatttttctcatggccctattaagtttttttctgaatttcccgagtttctccaatagccattttatcttgtgatgtgtcaacatttatcctttcacactgaagtgattgctgtggccgtcctgtttaaattcactcttagttataggctaatgacggtcatctgttctgctagatagctatccattaaaaaagactacaggactaaaagagagggacacatctaagattcttgagttgatggaccaatacagtttaatccagagaactaaagctataaagaaagccacaggcaggcccagccttacggtctttgtagagttcatgcttggccaaatgccaacaccatcctcatcggatggtactttgtatttctaaaatatcatgtcttcactttcctgtctctggggaaagaagcagctttgttatttggcaaacacttctggtactgaactatttacagaattgctgaattaacctcctgttctctctcatccttcaggtgtctaaatctcagaaaccacctagggctgggtgaaagcggggatagggattctgtctgttctgaacaaaaaggaatgcagccaatttcctcaaatgaaatggcctgatcctcagtggagctttgtcagccagtgaccccctgaccagcaatgtcccctggggaggcaaacttgccaacctcactgtctctctgtcttccctctgcagacaaggttgctgatcttgctctagataagatcaggagtgttgcatcaaagatgcagcatattatgtaagactataataatactgctttgtttccagttgcagtgaaaagtggtactattgacagtacatatctgcctgctcaagaaattactaaaaacagaaatgcaatctccatgcaacactcccaccacactggatttattatggatcacagttgaaatat

SEQ ID NO: 46503 - DNA, 798 bp, Bovine  19866880181658
  misc_feature (1)..(1): n is a, c, g, or t
ngagatccaaccagtctattctgaaggagatcagccctgggatttctttggaaggaatgatgctaaagctgaaactccagtactttggccacctcatgggaagagttgactcattggaaaagactctgatgctgggagggattgggggcagtaggagaaggggatgacagaggatgagatggctggatgacatcactgacttgatggacatgagtctgagtgaactctgggagttgatgatggacagggaggcctggtgtgctgcgattcatggggttgcaaagagtcggacacgactgagcgactgaactgaactgaactgaactgaactgaatgtgcagtggcagaagcaactgagagaatttttttttttttaatttagaactaactaaataaaccagaacttttggattgatatagcaaatgctccatttcaacagcctgataaataataaataggttattaaaatagcactgatcacatctcttcatctgacttcataacacaagaggaaaagacataaggctaataacttataggaaatttaaaactcctaaaaaggaaatagattgtataaatgagttacagtgttacaaatctgtagaacttacagccatgtgggaaatcactaagatcagttatttagagagatttaaagagcccttgcagggtccctgtcatcaactagagtaaattagcagttcaagtataggtattacaaaaagtaactcctaccctcaagtttctgtatattgcctgctaagaagagcagagggtgaatcccttactcaaaggca

SEQ ID NO: 46504 - DNA, 838 bp, Bovine  19866880431603
  misc_feature (1)..(1): n is a, c, g, or t
ntttatccatatctctaattcaactcaactctcagattagtatatgacttatatgaaccattctagcttatttttttgtccatatttgcaaaaaaatgctgtctactttggtaatagttcagtcttttggaatgaccagatttgaagtgtgttgatcagttgcattacagtgttcattttaaaaatgatgtttgctttattaacttcttttcttttagttattagagaaattcaaagagatgaacagagagatttggggttagcgatctaagactcgggtggttcacagaacaaaaaagaaatgcataagtctcaaagggagtcttagcagccagagattccttatagcaacccatgatgaagcatgagtaaagtaattaatgaaagtagcattgttatttcattccataggcactagggagttagaaccgatggcttttggccactgcccatcttttttgttcagttgtctctcatgcctatgccagaagggtttggtcagtatttgcattattactcccactcacaaaactgacagtgaaaatgggatcttaataaggcaatataatggataggaattatatttttaaatcatcaaaaaaataagtataaatatagtcaaatatatgtcatgtaactttcacttaatctgaggacaggcacgtgagtgggtctttgatgtctccagaaaaataaactatgtgaatatgattaccatatggaaaatatttctccaaagttttaattccctatcatttctcctctatttgtctgaagctgctatttggaatttataataattcattttatataaagatccttttcttagttccagata

SEQ ID NO: 46505 - DNA, 1994 bp, Bovine  19866880529389
  misc_feature (1)..(1): n is a, c, g, or t
ntatccatccacacaccacacatacacatatccatgaaaatatatccaatgtatgctcttttcctagattaagaatattctgattattttagttgattcagagttcaatagctgagattcagctattttttgtattgtttaggaatatttgattcttacaaggaaaaataggagaaattcataagctctattaagtgcagataagaagtcaggaagtagagcatgtatgagttaaacagagagaggatgggaggactaagaacactgattattcatgaagtattaaatatgcatgaggtaccagaagcactaaataacaggatatattaaataaacatgagccatatgaaacactcattattcatgaggtcttaattcagccacccattgatgatacccattttggccctgacagttctatgctcaagaaattcacagaaaactcatggctgttcagcaagttaattggcaagctatagctattagctgggcaaacatgttctgtgtatctgtgataaagtaagagtatattgtttgccctgggtgtcttcctcaggtgggctcccttgcttgaacctcgactgtcattctgggaccatatcatcacagggaaggtagacagacagggcaattgtgtaccatggattgtgtaccatggactcaggtagtacagtccttccaaagcacttgcattctatcctaaataacataaatccttactccagctctttctccttgctttatgctatgtgtattatttagcatgaatcacattagcattgtggttcaggcattttaatttggtccgtgaacctttctggtcctgacctctaagcttccttgttagtgtacatggaaattactattgcatccaggtacttcctcacccagcaagggtaccaagtcttactgctctcatcagtactatcctcttagttatgctgttggcagagaatggaatcggtattatttttgggtgaataaatactgcaattcttagttcttttcatcttcacagaagatcaacttaattttattttcatttatttttttaaatttatttaaattggaggctaattactttacaatattgtactggtttttgccatacattgacatgaatcagccatgggtttacatgtgttccccatcctgacaacttaattttcaaacacaaatcattttgttagcacaggtagacacaaacacatatctatatctatctatttatctatctatacgtatatgtactgtgcttagttgctcagtcatgtccaactctttgcaaccccctggactgcagcccaccaagctttctcagtccatgaggattctccaggcaagaatactggagtgggttgtcatgccctactcaaagggatcttcccaacccaggagttgaacccaggtctcccacattgcaggcagattctttaccagtggaaccaccaaggaagcccaagaatactgagtggatagcctatcctttctccagcagatcttccctatccaggaattgaactgggatctcctacattgcaggtgaattctttaccagctaagctactagggaagcccacacatatacactagtaaatactagttagaaatatcaaatgtatttcttagaatggcttgcaatcaacactcgaaaaacttacctctagagggttaatgatgaaagacactcaaattttttaatcttctcttatttttcacataagcctttctttctacattctcaattgctttctggacatttattttctctaggctatttagctttcatctcaaactgatactcctaaaactgaactctctctactttcaaataattttattctactaaatttccacatctattttattcactatactcctaattactcttggtcaaaccctttgtaatcttgcctgaatctttttcatctcttccttatcttgaaccatgggggtaaagtggatgtggaactaacattaattgagtacttgaa

SEQ ID NO: 46506 - DNA, 1617 bp, Bovine  19866880574772
  misc_feature (1)..(1): n is a, c, g, or t
ncaaaaatcagattcaaagatggagaagctctatacagtcaacaaaaaccaagaccaggagctgactgtggctcaaatcatgaactccttattaccaaattcaaacttaaattgaagaaagtagagaaaaccactaggccattcggtatgacctaaatcaaatcccttatgattatacagtggaagtgagaaatagatttaagggactagatctgatagagtgcctgatgaactatggatggaggttcgtaacattgtacaggagacagggatcaagaccatccccatggaaaagaaatgcaaagaagaaaaatggttatctgaggaggccttacaaatacctgtgaaaagaagagaagcaaaaaccaaaggagaaaaggaaagatataagcatctgaatgcagagtttcaaagaatagcaagaagagataagaaagccttcctcaccgatcaatgcaaagaaataagaggaaaacaacagaatgggaaagactgtcatttactcccctttaattacatttcagactatttaaatgcattagaagcacagggattacatgaagtactaaaatggcagctgcacttctagggaagaatgtgcttgcaatccatctttgctgtggccaatagttgtccatctgacattgaaactaggttttgataaccatgacaggcaagatgcttaaagtgatgtatttgctagaagtattgcaaaatgatgattcaggtattttttaaagcttattatcttcctcaaaatggagaccatttatcatttctctactgatttattcctgatagctagaaagaaatgtatgtgcctttcttgcctccaattacctttccttatctatggtagctgtattctcaattcatctttttgattacttgtaatttgaatggctaaagagtacccctcagattcattttccttgtaaaatatattgtttttaaattacacatgtctgtacgaggtgaataacctttaacaaatgtttataagagttgggacatcatagtattactaaattattgagctattgctcctctgtaattctgaagtaaatgctgctaattggcattgtacagtatgttaactgtactttatttttgatctgacagttcattcaataggtttaggaaactgggatagtaaaattatatttaaaaaattgataagctcattcttgtgttcctccctgttaccttcaaatacattataccaaaagagaaatattacatgtaagaagaacatacagataaaatagaattatatttggagagattaccccattattatattattgttggtatgtgattgaataagttatagtccatttattctaatgcttgattaaatgtacaaaaatagtgtggacaatataaaatgtaaaagttgtcatctgattacaaacattcataatgcatacttttattgcttgacatttaaattttgctatgattctgcagttatttacatgcaaacttaaattacaggacgtgtgtttatttatggtgcacatgtgttcagttcagttcagttcagtcgctcagtcctgtccaactttttgcgaccccatgaaccgcagcacgccaggcctccctgtccatcaccaa

SEQ ID NO: 46507 - DNA, 1152 bp, Bovine  19866880600081
  misc_feature (1)..(1): n is a, c, g, or t
nataatggtgtaaacatttttcaataagacctaaagttatctattatatatgctttgctctcctacttttaaattaaaacatctttttgcaagcatcaatatttgtcaaataattcattacatacaaagaatgcaaatatgggtcaaaaaagaacttactcatgtcattcaagattagtcaagattgatatgtcaataaatgattaaaagaatgtgagagaagtgtaatgatagtaatatatatatgtatatatgatacgatctgtggagttggacagcaaaaggatgatgctttgtgtaaaaagtgtcacatgagtgaaaatacagatgtgaaagctcaagacatagtggaagacttgcaaggagttagctgtagcttaagatgagatataaggggtattgggtagaagagatgtaggcagtgtccagaccatggaagtgtttggatgctccatacagtagtaagtttagagttaatataatattgtagtagaggagtctcacaataagttttacttaagagagattacatggggtctggtggattggaccagaaatcaactaaagacagaaagactttaggtaatagaattaaagaacataaccatatcaaacattcttatacaagacattgcatatcaaggaaaagacacagagaaacctgaatgctttgtaattaaatcttgcagtgaaagcctccattgcctgttggaagcaatctcaaggcttcctagtgttttgtgtcaatgatatagtgtgggaacaaatgacagcccaattagtctatttcctgcaatacccaagggggcaattcctcctctaatcctaacctgtttcattttaattctccaatgtcttcttttgttttgtgaattaaatgacctactttcagtaaatttcctttgtctttaacttagccagaattattttttataggatcccagttggctttgtatagatctgaagctgagctacaagttgcattacaaaatctaagagaacatctttaaatatgtaagaggcgatatcagtttcaaaatactcttactttgaaaagctaaacatcaatgcaatctcaagatattttaagaataccttgtggaaagtaacagtgagcaaaaaacagatttgacatgatcattgtatttaaaa

SEQ ID NO: 46508 - DNA, 769 bp, Bovine  19866880619423
  misc_feature (1)..(1): n is a, c, g, or t
nttattatgatagcattttggtcgtttaaatataatttacctatactaattgagaagacagtccttctatcaacagtctagaggtacaactactcattttggtgtttgtacaattcataatgtcagctgatgtcacgtttgctttagtttaaagaggatccaagacagtctacttctgaaagcaaataaattggcttcattggtatgtgtcaaagcatgcttcttctgactgattgttaaaaactggttcattaacttgtttttggaaattgcttggtgaatgaagtgatattgatgacttagaactgctcatatggttcattagcatgtcatctgggaaagctgagttgtcttgcatgaaatgatgtttgttcaactatcctaacagctcagtatgtgagtgtctgggtctgtatgtgaaagtgtatgtatatgtgtgtctgtgaaagtgtatatttgcataaacacattgattttaatcttgccatatcttgaaacaatagtattgcctttcttctcgtttatgattttttgatacaatatttttggttgaccctagtgattctaaaggacagtagtgcaatgtatgtgtgtgtgttcagttgtgtctgactctttgtgaccccatggactgcagcctgccaggttctctgtctatgggatttcccaggcaagaatatttgagtaggttgccatttcctactccagaggatcttcctgactcagggatagaaatcatgtctcttagtttccgcatggcaggcagatt

SEQ ID NO: 46509 - DNA, 1687 bp, Bovine  19866880729637
  misc_feature (1)..(1): n is a, c, g, or t
naatgatagcgaagtagtgtgtttatctctctaaactgatgcagatgctagtgaatacccttataaagttgcataattataatagtaattttatcaatcaatatgtaaaaaaaaagtgaataattcttaattttttctaatgttatctatatattttttaaaaatatatgcaaaaagcattaagttctatgataggaattcttttattttattttcatgggcagaaacttgttcccagagagttttcaaatttgtaaaatgtttccccctctctgtgggattttccaggtcatgctagtggtaaagaacccacctgccaatgtgagaaatgtaagaaatgtgggttggatccttgagtcattaagatcccctggaagagggcatggcagctcactccaatattcttgcctggagaaccccatggacagaggagtccagcaggctacagtccatggggttgcaaagagtcagacatgactgaggtgacttaccacacacacacacacacacaggattttccagtagaagctaagtaagttttatctgaactcacccaagattatagaaaaaaattactttggaggggaggcaaagataagaagtgggaaaactgggcagtgattgatggtcaaatagcattgctttcttccatttcattaactctaaactgtattgaataccatttacagtgcagttaactcctatcctgtggtgtcttccaggtgactgctctgctcccaaaagtctttatgtgtgacatgtcatttcatactttgacatacagtagaatttgattttcaatcaacttaacacataagacttgtcttaaaattgctgacaaacctgatttagtttcatgggttgccaagtgcctacttctttgcttactgctgttcaatgttttcttaaatttatttaatatagaaatatgtgtttctgactcctttattcctttatcagtccaaatttgtctctaaaagtccctacaatgacacacttgtcctgtgacaatagtcctctttgtgcacattgctttctcacatcagaactttcaacctgcatttaaaacatcccaagaaccttctgttcacagcattcatttttgcattgttcatttgtgtcttcacaaatagatttcaatttttgaaacaccataagctgtaacttactgtatgtgtggtctctctctaactcataaacctgtgtggatattaacagtacacaatgcacgtgtaggggaggaaaattaattttacctatacctttctgagattttagttgtaaaaacagacagattaacaagagggaaacaaacagaattgtattaacatgtatatctcatgtatacttgtgagattcacaggggaaaaatgaatgactcaaaaaggtgacttagaattcaggcttaaataaatgggatatagaaaaatagcacagataaacctatttgcaaagcagaaaaagagatgcagatgtagagaacaaatgtatggacagaaagtggggaggagggataaactgagagatcgggataggcatatatacactgctgctgctactgctgctaagtcgcttcagtcgtgtccaactctgtgcgaccccatagacggcagcccaccaggctcccccgtccctgggattctccaggcaagaaccctggagtgggttgccatttccttctccaatg

SEQ ID NO: 46510 - DNA, 2375 bp, Bovine  19866880735452
  misc_feature (1)..(1): n is a, c, g, or t
nataaacatgaccttaacttgtctaaaatattgttgtttttaccaaatttgagaatttatagcatttgctatgtcctcatatatgaaatggagaaggaaatggcaacacactccagtattcttgcctggagaatcccagggatgggggagcctggtgggctgccatctatggggtcgcacagagtcagacatgactgaagcaacttagcagcagcagcagcatatatgaaaagctaaaaaatttttagttcttttaagaatgaaaactgtcactatgtgccagtttcttttaatgaaatgtcacctctcagtcctaaaagtgttaagcattgtctttgaatactttcaaagattgattatgtatgtcattttaaatcttgtctatgaaaactttaaagacgatgtgtcaacatacataattccttctgactgtcctttttgagcaaagaaagatttcttttggtaaaacactgaatattttctaagttgtcttatagttacatgtatatttatactatgctttataatcattaggggaagaaacagtgggaaaaatgctattttttctatctatattttgtgcaagatattttgtgtatatctcatttagtaataaatgtttagcaagttatagctgtcatatttaatattaaattataatcttgttccagtgtctccttggaagggattgtaactgttatcacattagtgaagagaaactctattaacaaaaataagtaatttaactaatagaaccaagatttaaaagtattcaattacagatatttattgagactagtcattaaaagtaaaatatgtctttatatttccaactattaattctatataaaacactgtcatataaaggtttaccccacataatgccaattatccatatgtttatcatcctgctaaaaacagccattcaggttacagttatatttctattttggtcaaaacatgtgttgctgatggtatttcttttctgcccctctcactactttctcattatcctttcatttacaactgttactagtaatgtttgttatttttcaagtcatttctttcttttaatccttaacagaaaaagacaactaaaatttcatttttagtcaagaggtttgaggaaagttttcttgctgcatgcagttgaaccagatagcttttctttatctcagaaataagatagttgcactatatcctgcaaaataatgggaacccactaccaaataggtatcattttctcttattcagaagaaaaactgaaagtcaaaattgccttttcaattctataagaactggtgtaagtcttagagcacattgtgcagaattcaaaaatggtttgactagatttttgtgaaaaatactttgaagataaaagtcatagtcaaatatttaagctttatgtaaaatgaatataagaataccttgtaaagacacaaaatagccaaaggcaaaccttaattgctactactttttggttatctagtttcagaaaataagaaacaatgataaaatatgaagcctagacttaaggtgaatttataatgctttcatattgaaaaactttcccaaaaaatgagtaaaagtatttgacttataaaaaaacaaaatgggactgacataaatatttcccttctgaatcaggttttttaagaggctgtgttgcctagcaccacattagataaattacaataaattaatttctacaatttttgtcaaaatgaccaagtttgttgggggtgatttgtaataactgacaaaacataattgtgaaattctctagcataatcagaaatcagtttaagataatattgtcaaaactaaattaaatgtcattatactataaaatgttagccacaactcccaaaaatatatctttttaaaacaagcatacatttcaatcacagcaatcttatttggagtcaaagcctgacctgcaaattgtgtaaggctgtatctggactttaaggctatatatggagcgaggagagtgaaaagcttaaaattcaacgttcaaaaaactaagatcatggcctctggtttcatcacttcatggcaaatagatgggtaaaaaatggaagcagtgacagattttattttcttgggttccaaaaacactgtggactgtaacttcaaccatgaaattaaaagacagttgctccttgcaaggaaagctatgacaaacctagacagtgtattaaaaaacaaagacatcactttggcaacaaaggtgtgcatagtcaaaactatggtttttccagtggtcgtgtatggatgtgcgagttggaccataaagaaggctgagtgatgaagaactgatatcttcaaagtgtgcgaagaagattgttagagtccctggacagcaaggagat

SEQ ID NO: 46511 - DNA, 805 bp, Bovine  19866880820255
  misc_feature (1)..(1): n is a, c, g, or t
natatctgcgtctctattcctaacttgcgaatatgttctctataccatttttctatatatgtgttaatatataatatttgtttttctctttctgaattacttcactctgtataacagactcctatggttagccactgatctttccaactctttacactcctcagcagaacaactgattttggaaaccatataattcattattttaaaaaacttaaaagtagtgaagcagaaggacactaacatttattggcttctatgatgtgtcagacacagtgcaagctaagtcatttgcatatgatatgtttaatttttataacatttccactttacaaataggacactgaactctgtgaaggtgagaatactgttaagattgttaagagataattgtgcttggatcccttatttatctaactgggaggccccttattgttattttaatgtactaaaaattggagggatcaagaaaaagtttattcaaaaataatgtgctattaaaacattcaaatatagcaaataatatactgctgctaattgtattagagcattttccactaaaatactatacattgaaggaagaaatgatgtgagaattcagtggagttcagccaaaatgactcacatagtaatgttctttcttcacctttctcatgtaacacatgtagttatcaattctgtacctataacattaaaacacaaggtgtatgacttaaatcttattagagacagttagatatttccatgttatgattgctaaacattttgtgagccaatgaattatacactgactttttagttacttcta

SEQ ID NO: 46512 - DNA, 1070 bp, Bovine  19866881024336
  misc_feature (1)..(1): n is a, c, g, or t
naagcaagaatgagactaaatgtctcattccccattccaatctctacttgataaagacagagactgtggctgtgtaaaaacatcccaatcgtatcataaagactgataggaagatcactatatactcctataattagaaataaacaaatgtaagtggacatcacacacacacacacacacacacacatacatttgtactagattgcagctcactttacaactctacagtctctgcagagcttccaagggaattgcctccattgtgtgtataaactataaacattttatgtttcttccgaaatctgagttagttagggggaaaaaactgatatatttttcaaaatcaaaggacatgagtttgaagaataaattggtgcaggagttttcaagcatgtgtaatctagaacaatatttaatacaatattttcttctaattttgcttgaaaattctcattgtcattattctcttgctacctaaaatgttaaaacataaatgtaccctatgcctaaggtggaaatgggaaatatattttgtatgtataataagaacttaattattaaacattgatcaagtagaataaaatataatggattaaaccaaagaaagaaaaagaaaggaagggaagtaggaaaggaggaagaaaggaaggaaggaaacaaaccatctggcacttgacttttcctcagaaacaccaagtttacacaaagggaagtacctcagtgcattttctgctttcagcctgaggaagaagaggagaaataatgacctctgagtctacaaaatctctgacaatgactagaagttagtgaggaaaggactacaacaaggcagatgtgcttttgactctctattctgtcaatattacttactctgtcagttcagttcagtcgctcagttgtgtccgactctttgcgaccccatgaattgcagcacgccaggcctccctgtccatcaccaattcccagagtccactcaaactcacatccatcaagttggtgatgccatccagccatctcattctctgttgttcccttctcctccgaccccaatccctcccagcatcagagtc

SEQ ID NO: 46513 - DNA, 1328 bp, Bovine  19866881031612
  misc_feature (1)..(1): n is a, c, g, or t
nttgacagctgcatgggtcaattttgaaagatcaattttaaatgaatgggttgaaggaataagtttacttcaaatatcttttgctgagtcttagcaatgccatcattgattctgatcagggctaaaagcactatgctcttttcccaaataaaacatttaaagtacagctttctgaacattggaaaaaggtgtaataatggaataataaaacagactaccattaccactgtactgaaaatgacagacaaaataacagtgagagacattgctggctctgtttttacttatacaccatcatttagcaggattcctcagaaccttatttccttaacccgttagtatgcagtgctaaaaaatggtgaaataaacttagacatttttaatactgcatgatttatcagaatctttaatattccaatgaatatagtaaatctccaagaagagaggcattctgctatattttctaaacctatttgttcacagattttccttctcacaaaccatcttaaaagaagtaaaatgtctctagtgttccctctgccttgagagagaaatcattttccttattcttgtctcttcctgttttggttaaaaatagaatttgaatcacatatagttgtactcatattcataccagaatcactcaaacatgtatgaatatatgagatagcaggtgcagctaggtatggggaatacacacatttaactgataaggatatttttaaccctatgtcaaggaactcaagatgtagtcattttctttacccaactccactatcctgttttgggcaaggtgtcattattctgtgacttcacatctccctgaaatgtcctctgttataatattttcttcattatatataattctctgtgcccatgtgtatcccctaccacttcttgagtagactgcttggaggagattatgcttggtttgagttttagaaaattggcagagaacttagcggttgaggaggggagctgaaaattttagatagaatcaggagcaagaatctcaaggttgtaaaacttaacaaggagcacaagatgagagagaatagaaaccaagattgaagtggggttacagagaagcttgtataatttaaagcagccaggactttatcttgttatgtatcactgaaggaactcaccagtgataaggtttgacagtagaattcaattttcacttttaaagatcatctagggtcacacagagttggacacaactgaagcgacttagcagcagcagcagcagtcataatgtagaatataacataattctgtatatttatggctagttgggcatcaggccggcagaccctggtttttga

SEQ ID NO: 46514 - DNA, 1960 bp, Bovine  19866881043542
  misc_feature (1)..(1): n is a, c, g, or t
ntgatctattctaaagtttaaaatgatacaaatatatgacataagtacctggggcagagggcaagaataggtggaggttaggggcagaaaaaattatacaggaagaaccggaataaaaacattttttttttatttcaacggttaagagactccatttctctcttttctccctcttgcatcttctggtaagttttatattagacccagggttcagaggcactatatcagtaatttagcttagatacaatatgggttaaatggaattttgcaggaagcaacaactagacataacattgtagtgcaccttggagaaaacatatttagaatcccaactaccagacctataaataaaattttataacagaacctgtctataaatgaagagtttttcacctaactaaaataaacactgcttctcttgaaagcaggcgataactcttttaaacattttctttatatttctggaatgtttcaaactgtgttgtgaaacattatagatcccccgaagtactatgagatagttcttctctcaagataatatgtttagagctgtttgctatagtggcaaaataaatgatgtctgaatgcaccggggtttaaaactgtaagagcaagcccataggtttgctttgcagctatgactcagccatactgtataaaatgagtgtctgttccttacaatatgctttaaaataatatttacatgagaaaggaagcaattttaaataacttctgcagatttaatctaatgactgaaatataattacaaagttgaagtgtgaacattatttttattttatgcataagttagttttgcagaaggaaagagtgatccatttcagtctttgttctggaaatatagcatctcatatttaggaagtatcacgggctctttcatccaacggtgtgcttcaataaatctcagcccatgaatgattgatctcaaagaattagaaaacatctctagtgtgatcaattagatatcttcttattgtggagttctagttcaaaaggcatgacattctagagcctatagttgtgaattattgtactcctgaatcctttctcctttggcaaattctgatctttccaaaaagaacccctcccccctccagattcatattcaaatgctcctatgttcaatgatccttataatgcagtttgatgttttagtatctcaaatgttgattgagttcaagtttaaataatactgtcaaagttgccatagatattttgaaaaggatacccaaacaatgtacttcacaaagaaagatgaataaaatgatgcatgattggatacatttcacattgataatcaacttgctaattttagccaatatcaaatgttaagcacacaattttctgtctgctgaggttgtacatagacctgtgattatttctggccactgatgtgtgagtggacgaaatgggtttcacttttggactgctaagctgctgctaagtcacttcagttgtgtccgactctgtgccacccaatagatggcagcccaccaggctctgccgtccccgggattctccaggcaagaacactggaatgggttgccatttccttctccaatgtatgaaagtgaaaagtgaaagtggggtcgctaagaagtcggacacgactgagcgtgtccgaatcttagcaaccccatggactccatccatgggattttctaggcaagagtactggagtggggtgccatctactttttgactaggtatttcatttttgatggtcagttttcttgccctctcctgtcacatcatagtaattgggaaacatgtgtcagaatgaagcctccaaacagcctggtttgtgagtgacagctttgagccaaggcctccacagcaacccacactaggcatgtaggatatgtaagaactaaacttgttttgttaaagctactaagcccaaatatggtagcaaaaataaacctatctggctaatatgaat

SEQ ID NO: 46515 - DNA, 767 bp, Bovine  19866881056801
  misc_feature (1)..(1): n is a, c, g, or t
ntatcaatctaccactgattcaaatgatggcatatgaagagggatagaagccatgtgaggctcatgttaattggggtttgctctagacaggtgtgtcttttccagtaattacaacttccaggggaatgaaggaagcataacactgtcttagtctttgctatcgcttctatcttgttcttctttttaaaatacgattcagcagtttcctgttgatttctttggtaggactcagaattaattacctcttcatcattgcactagaagtcgcctccattttaatcattaaacctgcaattcaaagtcaaaattattttaccaagtatggaaccaaagaacttagatccatataaaggtatttagtgcctgtgccatctcatagcaggcttcccttatggctcagctggtgaaagaatctgcctgcaattcactcatgctactgaatgagttgggtatagatttaaaaagtgtggtaaattatatatcttcaggaaatatgttttattgactttttgttttagagtgtatgtgaatctttgtgtttttctaacattgctttattggtattattttgttctagtaattaaagtcacagttaaacaaatgttttatccaaagtgcacaaatcaattccaaaagatgattggaattctatggctcccatttatataacatttatttttgttccttattttgttaagagaggtaattggatcctgtagtcctctgtggaatttttattttgtttaactttcatgttaaccaaagta

SEQ ID NO: 46516 - DNA, 1514 bp, Bovine  19866881114141
  misc_feature (1)..(1): n is a, c, g, or t
ncccacaatccaggaagtatactctccaagatatttcaatatgttataatgaaagaaaccaatgaaatacaggttgatatcatgccctatgatggatttaacaaataattagttctgaaattacagcattcattattggcctttctagtcaatcaacagcgtaaactgcctttgaagcttgaagtatgatatttactgaattcatctactctttatcttatataatttttatctccaaaatatgcaataatttatacaatgtttactttctgaataatgtgttacttctctactttattatttcctggggatagtttgaagcaaaattacaaagtctgatataagaagaatattttgccaaagggttttttgagactagaaatctttcattgtaaagtctagcactgccccaggaagctctaagttgataagcaggggagttatggaatatcagtaaatttgaagataaaagaagacattctttgcaggtcaaatgaagataacttatttacaacttcatttttacttcaccacaaatgatttggagcttttctaagtatataacaaggggaaaagcttcatttaaacttcagtgtcaaacaataaaaggagcattttcttcaaggaggtccattatctaaatatcatttgaaatgtattataaaataaaaaggtagtggtattgatgttagcaattgtaaaaaaaatagcctttactttttgaatccaattctctttcagcatcaaatatttttttttactacatgatagttactcttgctggggagttgttttgtttattttataaactttttttgtgcagtgccttctacatttaacctttttgtacatgaacaatataaacaacattagatttttttatagcatgtccatgtggaaaaagttatcttttgaattttattaggataagctcctgtaaaaaaacaataatatgcatgctgctgacttaaaaaaagaaaaaagaatacacacactcaacatgagagttgggagttaagttttaattggggcaaaatgaggactgcagtctgggaaacagcacctcagagagctcagagaaattgctccaaagaggtaagggaaaggtcagtatgtatgtcattttggtgaagggggagtgtacacaatcaagcatattttttggcagaaggtttctgctagtcttgagaaacactcatcaccatgaaggattttagtgcttttctagatatgaggaaatataagaattgagctcataaaatctgttcctgaaaatatctgaagacctgttttggcagtttttcccagagcacagagtggctcactgctttcctctactgtggactcctttctggtgttgaacattattagctgcagtagcacacaatttaatcctcgtagaggcagatggcaagtgccaatttgtagttaacagtaacaagcaacatttgatttgtcacatgatttgtggaaaggggttctgtgtatagttgggggaagtcatgcattaagaa

SEQ ID NO: 46517 - DNA, 1366 bp, Bovine  19866881114834
  misc_feature (1)..(1): n is a, c, g, or t
ncaacagtcagcttgcatagatctttcttgtgcatctttacagatactatttatacttagaaatgtttgacttgtgagttttctgttgtgtagatttaataattggacattatttctgtttgttcttgacaagaacctattttttttaactaggtattttcttacttcttctgagcttgtttccaaatatttccagtatatttttatatgttctttgtttatttaaattgattatagcattcaaaaaatggtcctgtaaaatattcctgttggtgaagaaaatgcacatcagccctgactacctaaagggaatgaatgttttcccagaaactattacaaagatatgtactgggttggatcattcaatatttatctttcaaagtggcattaaaaacataaatgtcttacatatattatatggattttgcatctttctgcatttatctgggaagaatatttccatagaaaagcactaatattggaaatcagtatctgaaaacataaacatcaaatacaccttatttagaatgcattctatttttaatgccctgtgaatgtttaagaaatatgtagtacaaggaggaaaatgtaaaataaaaatcaatcatccccactcattctaccatctaaagaaatccatttgataaatgtttctcttctaatgatttttcatgtattatattttcttgtagtagacaaataagcctctgttcatgaactcatagtctgtgcgttgcatcactgcttcaaaattaattgcacattcatatatacatgtatttccacataaacataatggatattttaagtcctcacaataaaaaagggggggggttattgcttttatctctatattggtagtctgaaacatgatttaacttctttaaaaaaaaaaagtcctaaagttgattaccatgtgaaactatttccaccattccataaagttgctagtttataactgattccataataaaactatttgataaggttttgaaattactttcaaagcatttagctttatgcaggcaattaatttgcaatgaaaagaggtaaggaactgaaatgaccatcacaggaattctggtattgcttggctctctaaatactaccatttgctgaacagcactggagctctcacactggaaaacacattgctaagcattttcatgaatgaactaaatatagtttaaaataactttaagcaatttttagtttctatattatccttacacatgtcttatgtagaataatatatatttctcttgattgacttttttgagtgttcaaaatgattttacttactttcaacattttttaattggaatgttattgttttgcagtgttgtgttattaatagtttctgctg

SEQ ID NO: 46518 - DNA, 778 bp, Bovine  19866881298607
  misc_feature (1)..(1): n is a, c, g, or t
nccaaaatgagtaattcagactctaacgggtggtgtgttttgtttacctatacagtctccatcattttcccatgttatccaagatcattccataccaaaccatctttcctcatatttctgaatcacactctaatatttgatctccaaggatgttatttgggactctgaaataatggccacattttccttgctcacctgactggtgcctattctcactccagcattaaagggtaacaccttaaaaacattttttttttttttttacttcacaagatatcgtcttctgtgcttatatacatgtatcatatactttgttttaatataacacttttgaaggaaataagtgtttgtttttcctgcaaagtgaaaaattcatagcatgttaaaatgcatcattcttctttacatacctagggaggagcttcaactttgacatgagtactcagtgagaaaaagagagagaactatgtttgatttctgacctaatattctttacaccatgtttcatatgtgttttaatttccccagcaagcagtcacaaacctctttctaatctttttaacatttaactttctgaattcaaagtcctgttctctactgcttttgctaagaaaactgaggtgatattctgtaattcccttcagtaaagggtgttggaaaattctattccagccagaggaagcagttatgatttatgtctataatattaaataactcccttttgagtcatgagttttattgatagcagttatctaattttacttgtcatttttttcag

SEQ ID NO: 46519 - DNA, 808 bp, Bovine  19866881787123
  misc_feature (1)..(1): n is a, c, g, or t
ntcaacctacaacattctctatctactgtagagagcacaagtcttaatcagtgggaaaggcgagaactgcagtccttaggtcattagtgaaaattcattatgaatggcaaagggagcaggaaacaaatcctactgtggatgagagacagtattatatgctgaatccacaaccatggctaagagagggacacgaagaactgggtaggccacaactcatagacccagtgacacaattgcatgcccaaatctgaggcattgtcaaaaaaacaatgaacacacccactcatcacaagctaacaaggtacagataacaagtagaaacataatattgctgacaaaggggcaagaaaggaacaagaacatgtagagatactgtgttaaaggcactgcaaaactgaaaatcaaaatctcagaatctagcatttctttggtaaaccatcctccaccctgcctacaagctatctctacagaattttgaaatctgatgtgcaatgatagtaaccatagcaacaaaaatatcaatcctaacccaagtcctaagtctggtaaatgaaatcctgctataaaggtatagtggaaggaaaagtgtacacatgaacattatcccagacatgaacattatctcagtctaagctactcccccagaaaatgttcgcctctcatcaaaaaattctgaggcataagaaaaccaaaacaaaacagattctgaagagacaaaatgatcataagaatgagactcagatgtgacacagacataaaagaatcaataggaaattttaaataatcaggttaataagtttaaggcact

SEQ ID NO: 46520 - DNA, 1052 bp, Bovine  19866881972982
  misc_feature (1)..(1): n is a, c, g, or t
nctgattttagctctcgaagccctctgtggtgtgatcttgagcaaagcacatcctgattaaccttgtatagtgatatggacatcttggaagtacagaaaggagagacaactagggagaagcaaaagagggacagaaaaattggaaaagcatgcattcataaagttatttcattagctaaagcttggtgatatcccttaatgaaatctttatgacacgtatcaaaagttcagatggtccatggtacttggttaatattactctaaacttttccagaacagtctttggggactctttggggagtaagttgagattgcctggagatgcattggctctttcatgaccctagagttttatttcttgaagtatataatattagaaactcaaagtacctaacttgctcccagggactcattgatgatcagagagacttggcttcccacgcagtggtgttgaggcatcagaattgggaatgtcaaactgtggtgatgtatgctatggggaacaataaagatcaaatttatgatcctctctgtacttcctcaggaatctgcttatgcatgtggagctgctctcagcatatctgaaaccatgcattttgtaaaatatcagttttccccttattgactcactgtattgagagtttgttggtatgtgttacctaatgaagtgagatactataacttgaaccatttttttctctttcatcctatggaaataaatcagacagtttaatttattcatgtgcagttggagtcaaattctctttgtattttcatggtggcataatagctctcagaaacactcccatggtgggaatgagcactataataagcatagtctcaaagaatgatttcagattatactctaaatgtgcacaaaaataattttggaaaactatattatttacttaatagtccattcttaggcagtttgaaaatactgaatgaataactaatgttatcaaccaccggaacatcttgatagagctagactgatcataaacttgatatattaggatacacagttgcatttccaatacgatatgtctaaa

SEQ ID NO: 46521 - DNA, 1138 bp, Bovine  19866880411858
  misc_feature (1)..(1): n is a, c, g, or t
naacccatgttgtgcaagggtcaactgtatacttgtattaatatatgggaagtcatggggtgaaggtctatttgatgtagtcaggggagaatggacaaaggagtggaatgtttttcctctgaagggaaggaatattgtcaaggttctcacttggcactatattcaaaccctgaccttggcacttaggcaagctatctaacctctatgatcttcatcttcctcacctgttaaatgagaacacgaagtacctactcgatgggttttgagtatcaaatgcaattgttcaggtggctatcctcagtatagtaagagtttagtctacttcaaaattaatgattaatcctagtgaataaggacacatttttgatagtatagtacattctgattttatatccaaaaagataaaatgcactgcgattgagctttgccttgcacatcagaattaaagttcaactcagaacgcttatttcaccagttacctatttaacaacaattgaatgggctgaatgctgcaggttacatttcagtttttaatcttaccactgaacaatatggttaccctagaaaggttttaattgtgacatttaagtttaaccctattttctcattgagactcagtaagtaccgcttggaaatcctctttgtaaatttcccttgtttgttattatatcatgtttacacctctattatactgagtcactcaagcaaggaataaatggtaattgggctacattaaacctactccaaattggtttccagagacttgaagtatgatggaatctgttttgaaaatgtggagatcttcagtcctgggtgaagatgtcttaagctttctaagaaaaaaaagtgccaccacagaaataatcttttcactctatttacatgagtctctgttttgaggagaggaaatggggtttgcattttgcaatttttcaaagttattttgtcatactaatctcggatagtggaagaacttggaagacattcctcttaatgtttcagaagcttgatttacatgacagattatgttactgagagttccactattgttcaccaagttcaaagagttagacaagtgaggaaaaaggctcttttgcaaatgggcctagatttaggacttttcccccctttaagttaa

SEQ ID NO: 46522 - DNA, 1209 bp, Bovine  19866880638857
  misc_feature (1)..(1): n is a, c, g, or t
nttaaagaaagcatgagccaaacaggtattttattgctgtcttcgctgtcaccttaaatgattacagaaatagaaaggctggttcttgactctctttcctaacaggcaatcccccaaagtagtaaatacaataccagaccagatcttttctcactaagtgtttccctttgcttatccctggaccaacatatatttcatgaatgagcaaacagaatgtcataaaggaaaccctgtgttttatggtagctagctgcatttagtttgtgacattacaggtctattgctaggtgtgtggcatcttgtactgtttggataaatttgagctatggaattaatgactcttggtcttcatggattagaggcaggtagcaactagagttgggttggttcataggcattcacttgcaaatattttgttttctgtcatcccttttgtgacatttctggctaggtggaggtgggggaacccaactcttccttgaaggaaaaagttactactttttcattttcacatgttgacctgcaggccattgaaaagttggaggcttaatattgtcttgtcctctcccttgtgatttcaggtgtgggtgaaaagcagatttcttcctccgtctttccttcttgtgctgacctggctgtgataccacctgtccttgtatgggcgtggaacctcgaagctgtattcttttttcctctaatatgattaactctctggctcccaagggcatactctccacggcccatggcgtacgaggcccttctcaggttgtctcagctctttttccaggcttacttcctgctgtcccctacctagtactccaactcagccacattgggtgttttgccatctggtaaacacaccaggtgctttatagtttgcatgcctctgttcacatgagtctgaccactgactgctctcccccagtacacacatctcccttttagaaataactgtcaacttccaatgcccagacttgtttttctctctaatccccaggaagaaataggaactccatcctgtactcccatgtccttcttcacagtggagagcatctctacactgtagggtggttggttatatttgtcatctccagtgggtggtaaatccctcaggtcttactcatcttctgtatttgacttgaaactattgtatggtgatagcaaagggaacagaaactctggaatgaaaaactctaggcggaatctcaa

SEQ ID NO: 46523 - DNA, 1042 bp, Bovine  19866880664342
  misc_feature (1)..(1): n is a, c, g, or t
ngagtctgtaatgataatctgacacagtaaacaaaaggaagttgggtcgctccctaagcatttaaagtctagccctggtccaacgcttgcagtcttcttctctccaggtgaggtcggtgggagcctgtgacgagctgtcagctccctcggatcggggtgaagaacgcctccccacaaggttcacccccgggagctaccacctccccagcagcccagctccggttctggcagggacaggtgctacttcctttactttgcctgataatgctatcatttccctggcgggttcctttggctggtttttgttttttatgctacgggagttctcaattagcctctctcctccaccatctgctgatgacaacgatggcgttcgtgacagcagcgacagaggctccgtcccgtctgggctctgaagcagcgagagggcactcagagcctggctccagaccagagtcgctgctcgcccgctgtgggcagaccagagatgacagagatggggaggggctgagtttgctcttagaagagcaaataaaatgaaacaattccactcctaggcgtttacctaagagaaacaaatgtatgtccacaggagcccttgtacacaaatatccacagcatttttcttttttaccacctaaaactggaaataacccaaacgtccatcagctgctgggtggattaacaaagatacatccgtacaatggactgctacttggcagtaaacaaatttccaacacacacaacaggattgaacctcaaaaagcattatgctaaggggaggaaaccaaagacacaaaagactacttactgtcaattctatttatgtgaatctctagaaaaggcaaagctatagttaaagaaaaataaaccactggttgccaagggttgggagctggggaaacagattgactacaaagggttatgagtgaccttcggcaactgatggaaatgtcctatatcttggattgtgctactggttagtaagtatatacattcatcaaaactcatttcaactgcactcttaaaatgaccaaatttt

SEQ ID NO: 46524 - DNA, 1079 bp, Bovine  19866880730809
  misc_feature (1)..(1): n is a, c, g, or t
natctgcaacttcagaatgtgcatgtccacgtccccttagtctttgactttggggagtatggagagaatggtaggctcaggaccaccttaagtctttgaactcttttcaacaaaggtaccatgatcatcagctatcaccaggacattggtcttttaacttctctttgacccaatcctatcgaaataggcaattccatgacttcactacacgcaacgaccctcttatttatagacaatgtgactgaagatatgatctatacatttcccatatctaaaatgttcttatttttgagatttcaattgggtatcaaaataataggtacaaaaaacacgctcttttagaaatacatatatatttaatacaataggcatattttgaaatggcaagagtaaatacaattttggaaaattaaaccatgttgtgataaggttgatatttaaactcagtgggaaatcaagttaaagagagtcccttcaaaatgcaaccaaccactccaaagtatgggaaaagatgttttaagatgtgtgtataaagccatttaattcaccaaatcgacccaatcccgttacatgaatgcaaacaaaaatccccactttgctatgttgtaatgaagtctcttactttgctttgagataatgctcctggttacttctttcgatggcccacacggttactgcacttggacttgacaagcacagctggcgccaattcatggggttaaaagtcatctggctcacatctacaccgggttgtgacttcctgcacagaatgacacctgattcccagttcctgagacaaagttgagtttggtgaaaaataattcatttgaatttcatgtcttgagaacatatatctaattattgggttggccataaagttcattcaggcttttccataagagagaatgaaaacctgaatgaatttttggctattcccaaaacttgaaaacaacttacataacttgagaatttattatataatttattaatctattatcttaatatcaagattaaaataattatgcttataattatagtgtacccttctaggaaagcaagacaattattttaaaatatta

SEQ ID NO: 46525 - DNA, 2832 bp, Bovine  19866880740718
  misc_feature (1)..(1): n is a, c, g, or t
nttttatttttcagttttggggacctctgttttcccatgtccttctttcttgcctttggagatgtaagatgttattttttgaaatgatagcatttgtatttatttttgtgcattcctttcctttatgaaatgactagtaagagctcctgacagttccctggttgtcgagcacgtgggtcctggagctggacgactggagtttgaatcttggcggtgccaccagctcgtgccagggtgcttagttgctcagttgtgtcctactctttgtgactcttttggactgtagcccaccaggttcctctgtctatgggatttttcaggcaagaatactggagtgggttgccatttcctcctccagggcatcttcctgatccagggatcaagcctgtgtctcctgtgtctcctgccttgcaggcaaattctttacccgcaagcctgccaccagctcagaaacactaattcagtttctgcatttgttcagtggggatagtcatgcgcatctcacagcattgctggggagattatgttcatatatgtaaaacatttagaacaatcccagacacagagcagacactacattacctattagtctttctctttttcatgtcaaaacttagcaaaagaagatgcaaaatgatgcttttcaagatctgggggaggggacttattcagatccaagaaatctaaaatcagaaactacttctctatctcttaaactttgtaatgaccccatttaacaggtcaagaaactaaagttcagagagctttatgggtcctcagaaaatgcctctgccattattggcagccctcagggatagggcaatcgtgctgcttgtctaggacccattggtctcctttatgggagcaggattttaatatgcagatgttttggtcttttctgaaaattgtgttcagcttcatttaaggtaaataagtttctcagcctgtgtctcttcacactcgcctaggtatacttaatgttcccaattatcgaagcccttttcatattccctctcactagttctctataaatgtgccagcaataacttcctctagcattagagtcctgcaagctttaagagtttcttaaaaagagattggctctggtagactccattaggcagatggaggttaaaaaccagtttataccttcaaccataagtaccttaaacacttgtgatttcagccagcctaaggaaatacacagctgactggtgggctagacctttgattgggttaggaagggttttgttcatgttatgtggtttgaaacaagtagtttttgaaaggggctgacttgatcaacttctttctcctcacccctgtttcattttagtattgagttagggttgaggcattttacaagtgtcagaaatccagagcaaagcaagcctgattccagagatttcattagcaaagaatggacagacagtaagtctgtggtacatactgaggctcttctctctcctcatgggaataccttctacacccacgagaagaacggggcttctgcccaacttcccacccatttctctaactcctgccaagactccttttcctcctcacactcatccccctaagactggaaaggggggcattaatcatcttattggtcatagcctgagacttgggccacttgttgctgatgggccaggttgtcatatgttagatagctcctgcccctctgctgaagctctgttgctcttccagtttctgtgtcagaggtcagcaggccagagcaagacccaccatgttcaccatccatctcactgtatcttcaattgggtggctaggcttcattgagtctgctctgcccgatcacttaagattcaagagaatatcacagccccgacaattctccagcccaatggacaagagaagcctttcatagcatatggtataggtgatatcagacagaaaagcatagtgattaagagctctgactcttgagcaaataaaatgtgttaggccaggcttactcataataccacgtaaccccaaccaacttactttctaagcctcagttcttgatttgtaaaatgtaggttataataatacctttcatattaagtttttgtatagattaatcaaggccatttttatcatcaagtacatagcctcatgcttgcagtgaatgagtgatacctgctaaatatcatagattgtacatgggatgtagattttagaaggatttccaaactactagcttataaatggcttaatataactcaatatttcataggcacactcactttgggaaataaaacaaagtcatttattagattttgatttcttcagttggcaatttaggctgagctcagccagccagttcttctgtttggcttgccaggactcacttgtgtttctagagtcagctggcaggttgctaggagctggttaacttagatggcataattcacatgtatggtgctggcagctggctagagtgatggagtgacagaccgcatgtgtccactaggctagtccaggtttattctcttgaataaactggtatcaatttccagattaccaagagcagcaagaaaagacaagccccaacatgcaggtgctttttgagcctccatttatgttatgcttgctggtgctccattgaccagagctagtcacaagaccaaggccagataaatgtgggagaggactaagatcatgagacacgcagccattcttgaaacaatataccacagtctcctttctttggtatatctaaaggggaaatactttgtatttaagcattcaagtggtacaagatttctttttttaaatcctttgtcagatatgggattttaatatgcttggcatctggttgctctc

SEQ ID NO: 46526 - DNA, 2411 bp, Bovine  19866880959301
  misc_feature (1)..(1): n is a, c, g, or t
ntgcctgtaagcgttttctggtctcctctgaagtaggcctccacacgctagctctccaaccctctggctgtaatagaactctctacatttggatgtgatttatctcagagttggtttgaggtatctaaagtataatcagttaattaagctccaggcccatagctggcattctgcattctctgatatagccatttaaactggaaacattttgctgatgaagggttttgtgtctacctaatactctgcacattttatgaattttcaggatttgaacctctatgtgacattggtttgaatgatttccctcaaaacaaattgagtcccaacacttggaactaaattgctttgtgaattgtcttttccctttgtttctctactttaaaaatttttgctgttatttaaacaaaataacctttgatctttttggtatcatgatgggttcctattatccccagcttcaagaatctggaaacaagttagactttgtgtactgttgtttgcaaaaagatgaacctggctagctgggtacccactccagtgttcttgcctggagaatcccagggacgggggagcctggtgggctgccatctatggggtcgcacagagtcggacacaactgaagcgacttagcagcagcagcggcagcagcagcagctgggtaccccagaaagaaatgcccttggttacatcttttctctggagcattattctgtctgtgcaaaggattattcttactgtaatatttctcaaagtgattgaacaagcaatttttttcttttctctgatgtgctgcttgatattctgaatgctgatgatgctgttcaaagtattttcaatctattcatttccctgaccccaagaaagatggtcatgtccatagaaaggctacatttggggctaagatagtgtctttctttaaaaaaatcaaacaagtaacagatccaggaatggataccttatttaggtttcccgtttgttcctaacttaaacatttttagttgctagtggtggtaccttaaaaggccacctgctactcattttcaagggatagatcaaagagacgatggaagacggagtgaaatgtcttttcatttcagatctacccacatgcctcttctgcaggcctcctcttctcaagttttctaattttgttcctttaagccccctaaccaacaatgcaagccattcaccactgagtctgtatgtattcttaccttgggccattttctttccacacaaagtgggtgatggaaattaataaaaataaaacagcaaaataatataaaatacgttgtacaaggacttcccttgtgtccagtgtctaagactccacactcccaatgcagggggtctgggtttgatccctagtcaaggaactagggattccctggtggctcagaggataaagtgtctacctgcaatgccggagacctgggtttgatccctgggttgggaagatcccctggagaagaaaatggcaacccactccagtactcttgcctagaaaattccgtggatggaggagcctggtgggctacagtccatggggtcaccaagagttggacacgactgagtgacttcacttcacttcaaggaactagatcccacatgctgcaaataaaagaccttgcatgctacaactcaagagcccatatgccgccttaagcattgaggatccgcgtgctgcaactaagacccggtgcagccaaataaatgaatgaatgaatataaaaaagtactttgtgcaactctggttgcataaatgtaaaagattgcttaaaatagatatttttcttgaaaatatgtacacacatcaaggcttgactcaaggagaagtagaaaccatagaaagattaataaccatggaagccaccgaaacatctgagagagaattggctccagtgttgtcactgggggtctaattattttagaattgggttccttcaaacttttaagaatcagataattcccaggctatgtaaaattttttttctgtatatgaatttagaaaaatgtattatatattcttgggggtatttttttttctgttggaatttctgtatttcatttatttttctcttttatttattttttattggaggataattgctttacagtgttgtgttggtcttaggggtaatattgattggcgttactttactgacctaacccatgccttctgctgtgatagtgaacaaaaactccaggccttggagaaagcttggggatgaatgggtccttgggtgggatgatctaggaacaagaaggaagaggtagttctcacaaattatgtaaataccaaatattaacttcttagataagatgtttatggccaccctattatcctcccagtgtttaattctcctcataacaccctgtgcatatctcagaattattggttggatccattc

SEQ ID NO: 46527 - DNA, 998 bp, Bovine  19866881143310
  misc_feature (1)..(1): n is a, c, g, or t
naaatcaaattgaaaaagcattggaaaagcatgtcttactctctgcaatctgactgggttttagatgaaaatggaggtctctaactgggtttctggggaatatctgtggctggtattcaggtggagatgccgtgacctctacaccgtgcagatcacaggaagaggagtgctctttctttcttagtctggaggtgaaagacagactatccccagaaaatggacttggagggacaattgaggaaaatgggtgagttctcactgtgaatgatttttgatattagaaataaaatctaagacccataattttttaatctaatcagtgatgcaaggagcagccctgagcttccaaagatgataagcagtgtgtttcactatttttaggaagcctgcaatcctcctaaacccattttagctctttcaactttctttccttgcaaatctccatcccatcatcactagaccagtcctggacagattaagcctaatcctcaccttgaggttttatccctttgtagatctcagcttgtcttaaaggccaaaagagcaaaggtctattcgagtttatggagctctaaaacccaaaacctgtccagaaccatccacaggaaaacaaaacaacaacaaaggacatttattttccaagaagaattcatctcactcccagcttctcagcttttcttgggttgtagccaagctctgtgatatctgaaagatgacttttctcatctcgctaaaatattcacccatgaagtaggttttctaggatctttaaacatggaaaaagattatacagcatattggaaattactccatttattaagtacacgtatcaatgaccttctgtgtattagacaagtatttgctttttgtgaaaggcaatgtgtacaagaaaattgagaaagcaacatgtgagcatcatttctctggatagaaagatgtaaataatcaaagtttttacagtaaaggtaagcagttgcaacagagagtatctacttatt

SEQ ID NO: 46528 - DNA, 1196 bp, Bovine  19866881144269
  misc_feature (1)..(1): n is a, c, g, or t
nctgctggggaccactccatgaatagtgagaagatagtcccaccaaggaaagcagatctgggaggcagagagttagagattcctggggacctagatcagtcatgcctgacccacccctggacttcagttacatgagtcagtcagtcagtccccttttctgcttaagcctgtttaatcttgacttccgtaacattcaaacagtgttctcactagactaaaggtagaacatgggcctttatggataggaaaaccagttctttgttttcctggctgttctatacctgggtttagactgtctttgctttcttgctgccaataaagtgggtgggtgggtgatgggtgatggtagaggagttgttggcttgtctgttgtcatctatgcctggctttaaggccccacttggttgtaacttcctgctctgtctagaaacaagcctgagattcttgccttaagaatactttggccacctgatgcgaagaagactcgttggaaaagaccctgttgctgggaaagagtgaaggcaggaagagaaggggatgacagaggatgagatggttggatggcgtcaccaactcgatggacatgagtttgagcaagatccgggagttggtgatggacagggaggcctggtgtgctgcagtccacagggttgcaaagagacggacatgactgagcgactgaacttaactgagcctgagattggtctcctctcacatttcctggagttcatgcattaatagcacacacagattgaatgataggtgctggatgatggaagagaacggggacagaggtcacagttcacccttgttcagcttgattaatagttaggtgttgctgctgctactgctgctaagtcacttcagtcgtgtccgactctgtgcgaccccatagaccgcagcccaccaaggctccccccgtccctgggattctccaggcaagaacactggagttagtggtaggtcaaattaggatttgaatatgaacagagttttttggtatcagatatctatatttgtcattcctgttgttgtttttatattgaattttactttagctgccatttcacttgtgccccttgagatcctgaggtcccgtcattgccccagggactgagaatgttcctgcacatttaacgaagtcagcaacgggtatatttttagttggcttgtttgcatctgttctctccctgttc

SEQ ID NO: 46529 - DNA, 747 bp, Bovine  19866881260016
  misc_feature (1)..(1): n is a, c, g, or t
ncaattttttttcaaggtcgatggaaaaagaaaactggacacttcagattaaattcactatcttggatacaatttctgcccagataacatctgccctttgatttcccccacgctactactagataccatttctaatgccccaaataagttgtgtaatgtgatgcctgcccatttaaaggcctattatgtgctattctaccattagctacaagagagataaggggactatttaatatttgtaattttataaaaatccacatttgtcaatttttaagacctttaaataggtcaaatccttactaatttctttgccattggtactgggccacaagaaattccattcaaaggaatagaatcaagacatttgagatctaagtttagttacactttcactcctatagacattactcaatgtgttagcaatttttttttccaccttatttatctataagatgaaagaattaaatagtggcaaaattgacttctaatttaaatgtaaaataaatggctttagtaacagtctctgtataatttagagatgtcaaactttaatattaaatttctgttttcaggaaaaaattgaaatgtactgagttacaaagtcctaggaaagaaatatgtctgtttattatgagcatttaaaaaaaacggtaactccatatttaagtatttaaagaaggcatttctgtactattaaaagtataggcatttcctgtactattaaaagaattagctattttctataat

SEQ ID NO: 46530 - DNA, 1519 bp, Bovine  19866881284534
  misc_feature (1)..(1): n is a, c, g, or t
ngcttctgtgatgtcctgaatacgacacttttttttttctaattttattttatttttaaactttacataattgtattagttttgccaaatatcaaaatgaatctgccacaggtatacatgtgttccccatcctgaacaagaaagagacattgaaggaaatgaaaaagaaacctttaattctttgtgtaacccagtgtccatcacacctgatcattagcggagcagacaatttttgtttgtttcagggcttccttaaggtctgtggctgttcagatatccccatcctgtttggacctgctcctctctgagtctgtccaccgtctttttctggacatcatctctctctgcctgcctgggttcccttggtgctccctgggaaaaccaaggaagaactgaggagcctaagtgctctcctactagtatgaacagtgacttgtgttctcccagctgtcttcttgaatggaatggtggaatcagaaacatgtagtttatacttgtagctcagtcatgagctgggtgagcttgggcaaggcgttaagccattattagtattgttgttaaaggtttttaaaatatttagaattttaaaaatttcttaaaagttatcatgtgcataataggaaatcaaaaacaacacaagaagcaaaacacgaagtcatttgtaatcacactttactgtctgatgtgtccttctaggtctcatttgtgtactttcacaactaagcatgcatttgtatatagttaagatcacacagctattgtttttaatttaaggaagaaattctgaaatctaaccttcagagttgctttacgagggccgagtccactgacataccctcgctgacaacatgccccaggagggtctgtgagtacagctctaattttaaaatcgtctctttattttaaacatttctgcagggtttcactatattctagtctattcatgcctgtttggctatccactgagcatctctgccccacacttctttagacagagagctgacattccaggatgatggtatattgtgcacacgctgcaaagccctgtgacgtgtgccatcagccgcctgtccccaccacccactcccctttcaaaggcatggctgtccgaggcagcacaagcacagggcctggtgcttggtaaggcttccgtgatattgcttgaaaacaacctctggaattcaggctgaagagatcagcaggtaaagggctctttggagagcgcccgtttgcccttctcctgcccggggacctgctgccctctgctccttcacgtggccagcctcccactccccctggagcctaacactggctgcttattgagtctgtcagcatttcctccgtggagctcagactgactaattagtcttcccctcctgatgactgaagccacagggcatagacaggccagcacttctccacaaggcatctgctgaggaaaggcacggccgagcccttaggctggtcttgtcaactctgcgtctctgggtaggtcttttgtatgggtgcctgtgaacgt

SEQ ID NO: 46531 - DNA, 1049 bp, Bovine  19866881297966
  misc_feature (1)..(1): n is a, c, g, or t
ntggggagctttggtttaataaggaggagagaggcggggtgataggctgttggagaggaagcaagatctattagatcatctcggccatctcgctgggcctgcccgagattgctcccagctgcactggcatattcactgctgctcaggctagtccagttttaagtgatttaagggtaatatattaaaggctcatgaccagctataaagaggtgcttcttcctgagacactagcaaaggcttggctgtaattttagatggatgctcatcccaccagaggtcagggggcacctagctgtccttcaggctgtatcacatcagggccacagaggtcacatccatttggactgtggtcgccattcaaaagagagtaccaatgccgtgtgcatttatcaaaattcaaaagcaaccatgagctgtgtgcattcttattgtccatgacactccgtacaggtaggtttcaaaaggaacagacagacatcacagaaaggtgccgagcaaattctggaactgataatataactgaaaccaaaaacttactacagggttttaatcatagattttagtaaaaaaaaaaaaaagaaaagaaagaaatcagtgaacttgaacataggtaaactgaaattatctagtctgaggagtagggaaaaaataatgaagaaaaatgaacagaacctaacaaatctgtggaaaacataaatgtaacaacatacacaatcaaaacagcatatattttgggcacaaaaacagaactatgaatccgtggaacagaatagacagctctgaaataaccgcacacacctatagtcaatcagtcttcaacaaaggagataagaaaacacaatggagaaaagacaatctctttagcaaatggtgttggaaaactggagtcacatgaaaagcaatgaaattagagtacaccctcacaccatacacaaaaataaaatagctaaagacttaaatatgagccatgacatcataaaactcctagaagagatcataggcaaaacattctctgacataaatcagggcaagtgttctcttaggtcagt

SEQ ID NO: 46532 - DNA, 1299 bp, Bovine  19866881339961
  misc_feature (1)..(1): n is a, c, g, or t
nataaaaggttaggatgcatttcctatgagacaagaactgtgtcttccctcagtaaaaacctaaggctgactgtgaatggaagagaattccatataaaggtccaaatagcatctctcccacaaaggaggaaaaaacacacctgggtttccccaagcgtgtctaatggcagactcttgtgggaaatgttcattatataataaacatttttatataattttaagttttaatgtataaaataattttatttccataaagtttattatataacataagtggaaaaaaccacaatgacttatgttctgattatagttaacgttttaaatatatgttcaaggattgaaaacaagcatggaaaaacataaacaggtgtaaagctgtggaaatttggttgaaatttttccttaatattttgtgtcagtgcaataaaaagttttaaaagcaggcccatgacaaaacatttttaggtattttggtttgtatcttaaatacagcagcttacagctgctatctgttgtaaatgaaaatttcctatttgatgctatttctaagtaccttaaactcattttggagatgggagtatgaagaaaagaggagaaatgagtgtgggtataatatatcacttaatccaataagaatcaaggagaagggattgattacctcctctagcttggtgatttctttatgcaattcttcttttaggccagagcagtcttccttattttgtgttctaagaatcttcaatatcaaaggtggtacctagacagaaaataatgtcttagtttatcagtgtgaggctaaccatactgaccctgtcacataaaggcaggatagaaccctcacagtccgtgtcagggtattctatacacttgatatgtgcacgagttcctcttcacagaggttatatactgatcctagaaacagttttgttaccaaagatgctatactgttcaggattttataagctgcaaataagccattttggtgagtctgaatcaaatatatcttaaaaggacactgaatggcatgtactgtacatgaaagagacttgaagacaatttggcaaagtgagaaggagaaagagtcttttagcaagaatagagaagaaggtggcaagtttgggaaaaataaaaatattcagcatgacatgaatataaagtattaggagaacagtgaagagatgtaactttgaaaagtaaacagggtccagattatgaaagagctcattggacatgtcagagctggcaagagcataatcctgtttgtctttccctcccaaatcactgaacctagagtgacag

SEQ ID NO: 46533 - DNA, 1416 bp, Bovine  19866881489499
  misc_feature (1)..(1): n is a, c, g, or t
nagttgcgtgaggagaatatccgtggagattattctaaattattccatttggaaagaatctgtagaggattggttcatcaattcagctgtctcttagcagaattgatttcattattataaaaatcatcctccataaataggacaaaagcttcagccttgagtggatccagcaaagaagacgccttcaagtactctgacaacttgtctacctcctgaccgttgttagatgcaggcaaggcccccctcctcctgacctctcttgcctcaaataacctaaattttcctctccaaaggaaccaaagcttaatgcttctggcctgacctaagccgactaacgggaataatgtctcctttacatgatctttttaatgtatttatagaccatcctaatgactcccttcagccttcttcctttcagtctaaaccatctcagcacttttgttcttgcctggtcatattttccttcagctccttaatcttttttttttccctgctgttctcctcctaagaactcatgtttttctgtctccctccagtttatggatcccaactaaatggaaccaccattgatgccctctggagagatcaatcacaaggaataagtatcaaggcaaaagcagagagtctagagcagggtactagaactttccatgatagaaagtagaaaaaccctgtacctggcctgccagatacagcatccactagccacatacagctactaagtaggtgaaatgtgactagtgcagttaaggaactgaatttctaatttgatttaattataattcactttatataaatagccacaagtggtgtactgcctggggcagcacagttctagtggatgggccactgggaggagctgagctatcagactttatttttctgggctccaaaatcactgcagatggtgactgcagccatgaaattaaaagatgcttgctccttggaagaaaagctgtaaccaacctagacagcatattgaaaagcagagacattactttgcgaacaaaggttcgtctagtcaaagctatgccttttccagtagtcatgtatggatatgagagttggaccttaaagaaagctgagcaccaaagaattgatgcttttgaacagtggtatcggaaaagactcttgagagtcccttggactgcaaggagatccaaccagtccatcctaaaggaaatcagtcctgaatattaattggaaggactgatgctgaagctgaaactccaatactttggccacctgatgcaaagaactgattccttggaaaagaccctgatgctgggaaagattgaaggcaggaggaaaaggggatgacagaggatgagatgattggatggcatcaccaacttgatgaacatgagtttgagcaagctctgggagggtggtgatggacaggggaaacctggcatg

SEQ ID NO: 46534 - DNA, 1315 bp, Bovine  19866880539218
  misc_feature (1)..(1): n is a, c, g, or t
naattctcccaatcatccactgaatgggcattgttctccgtttcactgtcgggagggagttcagaacaatgaagtcctattatcattgaattcccaagttctgctttggaccctgtttggtctgaggctggtgagttctctgaatctagtacagcatcctgctaaatgggcctggccagctgcaagcttttggcaggttcctaaggtgtcctcattcaaatggctccaagatccaaaggttgttggtcatcatctgttgtgagcaatccattctctgaggtaccaaaactgggctcaacaaatgtcaacacaaaactctaggtaaataaataggaaagctgtgcctttttttaaagtgaagtacatggtttccccacagtaattaggtatcttatgagggggaagaaaagccaaacatttaggaaacaattgcaaagtgacgtgaactgaggatggattacaaaaagagaagaggtttgagtctcatagaagagttggatgatataaaccataatgtaaaagaatatgaaaaagaatatacatgtatacgtacaactgaatcaacttgttgtacagcagaaattaacacaacattgtaaatgtatcctgggctctaaccctttggagggctgtgcacttagaaatctagtctgaatcatgtccacctgccttttcaaaacttcacaacacaacctagagtgtgaaattacaagagagaaactagggtttctgcaattcaaaaagtcccctctttataaacagcttttgggtgaatggactcagtgttgatgctgacatggtgacaatatttatgactaggctaattattttgctatttcactaatgaaatcgggatactaccaaaagagagaagactgaaagcttctgcttcatgactacaaaacaacaacaacaacacacaactcattgtgtaacttcgaaagtaagttatttgacatttcattgcaacatgtgaatagtttcttaattttataagatttttttaaagaaggaaaaacatacacatataaatgtcttttttggctgaaccatacgagagttagagtatattgcatggtacttcataaatatgtcagcatgcatctcctaaaaacaaggagattctcctacatatctgcaatataatgatcgaaggcaggacattcaatactgactcaataccacactgcactagtatcgaatgtatggtccagactaaaacgtccccagttgtcctatcttttctgtgtcctgcacaagctacccctttccttaatccagaatctaagcaggattagatgttaaatgtacttgt

SEQ ID NO: 46535 - DNA, 1045 bp, Bovine  19866880619017
  misc_feature (1)..(1): n is a, c, g, or t
ncaggtggtagccattaggaacacctcgtaaagcggcttcccttttgctcttcaggctgtctcctggaggccccagggtggcatgtcttatattatggagtattatggaactgattcgtaaatatcaatatgaaaagaacccataaaaatatggacactggttagaacttatcacaaataagtcatattgtttaagttagatttccttttccatccatggacaagaacctctccccttttctgttattgctcagatgtagggaaatttatcttgtcttgcaaaacattatgccaaagaaacaagtcagcgtttcactgtgtcttgagctcagtagaaggatgtccacgtacttaatccaactcctgttgagtgattgacttctggtagaactgttaatttgcaaattcttaaagcagaaagtttacatttttccagctgccaaactttgggcttcctgatgaatcactgggacagactttctgggtcaagtgtgagtggtgctctggggctgccggtccgaggctagggaagcatgacaagctttttcagatgcctggccagagctcaaacacgttggcttggggaccagcctctagggcccaggtgacttcccctagaaaacgtcttcacaggtcttcccctgtatagagtcctcacaggctgaaggaaagggttaggaccattgatcagaaaagagctgcacattttttccttctctgtctgccgcagagatgttagtcaaggagaaagcttactcacttgaaagctgtggattacagagcagctcagaaagagccattggcgacggaattttctccttgttgaatatgttctttgcccctagaataccaagccaaaggaaggaaaagatggaaaataagtccctctttcacaatgcatttgagtcagcccaccaaaggaaacgagatttctcaactaacaaataaatggcaatactgcctttgggaattagaaaaaggctccttgataaagttatttgggaattagtcatcagttgacacctaatagacacagagcacatca

SEQ ID NO: 46536 - DNA, 1149 bp, Bovine  19866880775833
  misc_feature (1)..(1): n is a, c, g, or t
ncactctcttagctagatcagcctgcaattcacaactgcttcttgatgttttttattgtcaactgccaagagtctgcgtcctctctctgggtctgacgtactgctagacgttggtgtcccagacacttagctgtgggcaccagcacaggagaaaaaccagatagtagcagccggaaaaagagaaagccccagagtggagtgtggggcgcagtgaaatcatgcaaacatattacaggaatatataaggaattttctgggcctgcagaaagctgtgaagtttgcctcagaaggaaaacagaatgaagcaaagcaaaacttaattagtcctcggttactaatggtcttgggacctgtgccctagggttttccttgttttgagaatgttttttgcaaatggctgcccgggtccctgttccagagaaatggctctgtcgtttccttagtttcctggggctgcagtaacaaatgcggtgaactggatggctttaagacaacacacgttaatcctctcccaggatggaggtcagaagtctgaaatcaaggtattggcagtgttggttccttctggggaaccaatctgttctgaacctctttcctgccttctattgtctatggtcatcctacgtggcctaaatactaataccaacagaggacaggttaacagtgatgaagaccagggagatagggaccaagttgctgtggagagaagagcagaaataaaagtcctctgatttctctagcagtcaatttctctggaaagatatggtagcagggtgaggcactggacagactctaattgtcgttttctttctttcctcctagcaaactgcctagttgggctagagctgttgttcccaaaatattttatgtaacagagaaggcgtggaactattatccctacacaattacgggtaagtccttgtacacccaatatgttacaagcatccatgcaaggacatagggggattcagattcactgattgagcatggattatcccagcagggactcacaggagccctgtgacacctccctgaccctttgtctccatacttttaagtcaacactcttcctagcaggaggttgtagggggttaagctaaaccattctatcttccttcttgaagtgatcattgtaaatagcatatagag

SEQ ID NO: 46537 - DNA, 1722 bp, Bovine  19866880853558
  misc_feature (1)..(1): n is a, c, g, or t
ntctttggtttagaagcttatttgaaggtgttaagcccaggggacagaatttataaaatgacttccttctagagacaatgctctgcaagatgccagatttctgccacgcaggaagagatgtctggctcgctctgccctaaacctaaatgtctttaacattagcattccggaggattcttgttgctgatgttcccaagcaacacagtactgacaaagaccctgacagaagggaaagagtgattaactgaatacaaactcactctaatcctgccgaccttgacgcaggtcactgaggacaccagcttcttattgaacaggactgtcacagttcagagcccaactcctccatttgcctgggagcgactctgcaacaagcccaattgcaattccttttttccattgggaagatgaggtgtgtatttttacttctgagggctgaatctgatttgggctctgcaaagacatgagtggctagccccatcagtctttctggctctgtgattcaatgttcagatttctccatgtagacagagaggtttaaaagaaaaaaaagtgtaaagttcttcggtgtttcatcagctctctccctggcaggtcaataaagcacgaaaaccaatatccgatgccacaaagaaaatacaaacctgcagctcatatttcaggatatcagtgcatcatcacatatttatcttttctcccggatctttataagcagccctcagaggtgccatgtttacgtaatacctgtgtcattatgccagggtgcaggaatgaaaaagctgataaaaagatttaagaaggagctgggttatcgacatttaattcaaaaatccccttttcatgacaaactaatataaacagcatcatatgctggtgcttaacccatcctaagttttggactgaactggatagaaatagagcaacttaatgccaggggaagggctcagggtatgctttgtgctggtgcaagcaagcagaactctatgcttataactgtgcaaaactgcaaatcgtttccagtacactgggaggtccaggagcatgatccacttgactgagtacaggagagtatagtatatgaaaaataaaagcgcatactttaactgctccttccaacacagacttatccttgggggaggtattctagccttgagaactcacttaatgcacagatttaaaagccaaaatgataactatcagcacatagaggctattttataagcattagctcaagtgagaggtatcattccccagtattgataaatgagaagctgaacacattagcttttagagagcagcatgtgaaaccacagagcaaagacaggaactgccaggactcagttcaaaaccacaagggtagtctgcccttggggcagaacatgggatttctccaggcatgggttgggggacactctgggtgtagagtccagttccttctggttcatgcattgaactaacagagtacactaggccctatagacactggaggtagagctataaacaaggttgacctggtctccaccaaagaggagcgtttcctgagttccatctcaaagacacgaggctgataagcccaagaaacttgaggctgacatcatagccattgaaccatttttcaacaaacatgaaatcaaatgcaactcaagtaaatggagaggtttggtgacagggctgacctttacaaagcaatcaagtctcttgtttactaccaagcagaaaccc

SEQ ID NO: 46538 - DNA, 1301 bp, Bovine  19866880928212
  misc_feature (1)..(1): n is a, c, g, or t
ncatgccttggggcaactaagcccctgtgccacaagtaccgaggcctttgctctacagcccgtgctccacgacaagagcagcccccgcagtgagaagcctgtgcgccgcaactagagagcagccctcactctccacaactagagaaagcctgaaagcagccaatgaagacccagcacagccaaaaataagataaataagaaaatatgaatctttaaaagagactcagtctttttaaaattaaagtaaaaaatactcagtctttgttctttaataaaacaaataaaaaatacccccctgcttattttttatcttgcttttccccactttttaaactttttattttgtattggggtataactgattaacaatgttacaatttcaggtgaacagtgaagggactcagctgtacatacacatggatccattctcctctaatctcccatcccatccagcctgccacataacattgaggagagctccatgtgctatacaggaggtccttgttggttatccattttaaatatagcagtgtgaacactctggaacctgactgagctcagttaaccattttctttttatgacagtttgatctgtttgccattgaggaaaatgatccatatgaaaataccaacacaatgacattacagacttcttttttagtgtaagccacgatgctagaggctcttaggacaggaagaaattaaatgactttatcaagccactgagactgtccaatctgagtaaaatagtttgaatgtatgtctttctagtttcaaggtctttctataagggatcagatcacagactataaggaaaagcctccccctccatcgataataaccatcatctctttaataccacattgctagaaattgttctattatagtgaactaccacaagtagagcagtcaagctatttaaaaatacaagcaaaagttaataatgtaaagtgactatgaaggcattttaaattacattcatattcttgaacaaatgagaacattcaaattattgcactgtatataactatataatggcatatatttaaatatttctgattctgaattattcctctattttttaaattacattaataagatgagaagtacaagggaagttccaattactcctctgatcttaggctgaatatttttaaatgattaaatgaaacttactgtgtattctggtccccagacgttcatttgggcaagacggaaaagaaaaaaaagaaaatgatgattaagaccacattatatccaatataaagccacagaactaacaaatattgctgaattataat

SEQ ID NO: 46539 - DNA, 1332 bp, Bovine  19866881296992
  misc_feature (1)..(1): n is a, c, g, or t
nttttcctgctgacttcctgctctgccttcccacaccccctttctctctcaccctcccccacttctctttcaggtcccactgctcctcttggccacatttttcttctgatgcagcctatattggggaaaccactctccaattcatcctcatctgtcttacttacatactgttcctttttgccttctctttgctttaaagttcttctacttttttctccacttgggttccccttctcatttttctggacctatcttctttgcaatttttttttctaactactctgtcattagggccacccacctagattgtatagtcatacatgaccctgggaacccagaacagccaagaaagctcaaatatctcccttattttatttatatcagtccctgcaggatgactgagattctgaatagatgtgggacagccagacatacaccttcttgaaactgttgtgtctattaaagattttctatgcacagaagagtttatattaccttccaactatgggacaaatcttcagtcaaaatgaaagggtaaaaattttccaatgaagaattttaaaagttgaaaggtactttaaaatctaggttgtctactgcctctacatacagattcaccacccacagtctgctgttttacaaatagcacaggctccagctctgaattcctagaagataataaatcttaaccattaggcttatttcactaggttcactggaacaatctgaacgtaagtctcctgttattgaaaggacgaggcatttgcaagttcagttttttgaatgatcccttctcaagctgaaattccctttatggccttggagtatatttaatatgataatacagaatatagtaccagagaatcaatgtcttcatgggggttccattagagagatcaagtctgatagagttttggaacaagatggtcagagaggaatgcattgaattccagataaatgctaaaaggaaatgatcttttaaaagcctataagtactttatctgccccaagccagagtctcaactcttacatttaattttcttgactccaagcctccttgtaaaatgatggctgtcagacatggaagaatttcggctggtaaccagaaataaagcattgtattactgggctcagtcagcgatttccaaacttttcttcttttggtccaggaagttccatgaatatgcctcactagccaccggatacttacctaacatattatttgaagaaagaactcgatgccatttaaaaagtggtttgaactactgaactgtatcacctctcagatccacctcgttctaagactccataaaagtgtatacaggaaccact

SEQ ID NO: 46540 - DNA, 1312 bp, Bovine  19866881358847
  misc_feature (1)..(1): n is a, c, g, or t
naaggcagagcctgtagtgggagaaaggtcttcgcctgcaaatcatttcaggcattaggcggaatcaccgttagaagctggcaaccctccctgactggcagctgccagcacagcctaattaatccagcagccatagtggagaagaacatgacacttcatgactgataaacaagcctaaaaataggctccatcttttctccaattcccctccgcccccatctgcttctctcgtgagtttcagtgagaggggaccggagtgaagctaggaatgaggtgaaaatgaaaggggacaaaagaaaagctccatcctcgtaagattctggatgacaggttttatttagaatcactattccagatttgtatcttgactcttttccccagacgccagttgaaatcaggatttttgcagacaagccaagaaacaccacttatttggttgactgaactggactgaaggcccaaggacaaccaccagatgtactaatgtattagtactaatgtaatgttctaaatgcattagggcagccacccaaatgtactgcgcacaacagtgtataagacactataggaagggccagagaatggagtaaccccacaatccagggagctaagcgacaagaactaaaaggataaatggcatttgaaaaagacactacactcaatttaaaaatgggcaaaggatttcaatagacatgtcttcgaagaagacatataaatggctaatgagcacatgaaaagatgctcaatatcattagtcattaggaaaacgccaatcaaaacccaaacaagataccacttcaaaacccactaggatggctgtaatcaaaaagacagacaataacaagtgttggtgattatacagagacattggaaccctcatacattgctggagggagtataaaatagtacagtcactttggaaaacagtctggaagtccctctccccactcactagcagccaggcttgacctgggaactcagtgggatgtttatgcctggaattttattttatttggccatactgtgcatcttgtcagagaaggcaatggcaccccactccagtattcttgcctggagaatcccagggatgggggagcctggtgggctgctgtctatggggtcgcacagagtcagacacgactgaagtgacttaccagcggcagcagtgcatcttgtgggatctcagttcaccaaccagggattgaacctggtccatggcagtgaaagcctagaatcctaaccactagaccaccagagttattccctatgtttggcattttagaacaaaggctagaaagaaaaaaggacagct

SEQ ID NO: 46541 - DNA, 1627 bp, Bovine  19866880368315
  misc_feature (1)..(1): n is a, c, g, or t
ngtttcctgtttgttagttttgttcctgttgtgtggatagaagtgaagacttccaagttctttatgtgtcagctcagaaactagaagtgccccccgtttacgtacagtgttccttttctcaagtttctcctaaatctgatctcttcccaaaatggtagcggtggtcccaagcgagaagatcaataaaattaacaggaataaagagtctgaattaaacaaattgggtgaatcacaaggcagggctcacaacttgaagctgcctccgtcttcttgaggtgctctgtttccaaaacagtctcactaagggaagactgaccttttaaactccactgtttaaaatgggcaatgttcacacaggaggttctattgtgtggagatcaaccagcttcaccgataggccagtttttcaggattgcctcccggaaagacaattgagttgctccattttgtggacatttgtgtacaaaatacatcttctccacattcttcagtgtgacattcacagatcagtgaatgctagtgaaaaggaagaggagagtgacgcacagaagttgcagaaagaggatgttgaattttaggcaaagcagcagaaaggaagcaccattcaagtccctgagttcaccaatagccacctgggcttctacagaaagagaaagaaaagaagggggcagaaaggcagaaaagagaactttcctgtcttcttttcattcttgttttgggactttatgggaaggaaaataagaggagcagatccacttttctaaggtggtccttcttaggctttactgtgcccctggatcacatgtggaatcctctgaaaatgcagattctggctccatggacctggcccagggcctgagattctgaatctcaaacatgttcctgaatgatggagatgacattggtgccacactttgaggagaaaaggcctaaggcaccttccaaagagtcatttctcagctcttcctctatgttcacttctggaaacaacaatgataaccaccaccactttccacttatttcctgaatccaacatgcacattcttagctcaggatgatccccatttttagacaactgctggcttcttctccatttccaagttctccgttttccctctaaatgtcattcaaatctctgtccttcaccaggaccctttcaccactcagggtctccataatcaatgtctccattgaggtcctatacctttcctgtggttctccttagccatattttttggcaagtatatatagttattgatcttttacatctgtttgtctccttactgaattgtaagcctcttgagcacagggtgtgtgttttgtcacccttttattccccagaccttaaatagagccccgcttattaagaaattgcacagtgtagcgctattaccccagggagacaggggttcaaaccccagctctaccattcaacagctgttggagcttggaccaagtgttgctgcttgagtcttggtggtggcagtggtggtactgtacgtagaatatttatatctcccagaattgctgagaggaacaaagaaaataaagttgcctgcatgtgaaaccaaggcacagagtgagcatttataaatttaaagtcctctgcattcaactcatgttcccc

SEQ ID NO: 46542 - DNA, 2742 bp, Bovine  19866880490292
  misc_feature (1)..(1): n is a, c, g, or t
ntggggtgagctggagaagacaggagtctgggtcccccaccaaccttcagcaacgtgtacctctcttacagactgggtagccacagatggcagcttttgaagaaagggctttgcagctcaaagtagtttttaaagccctccctccctagtgtaacgtcctcactttatcttaaaaccattctatgtaataaaagctgactccctaaggccacacccaagtgaccagtgttccagcactctgtcaatgcctgttgccagattggtattaaatcttgtctatgattcagcagtgcctgtacctctgtacaaatgctatacaaatttttctctttaagagcttgagagtcaggctggacccaacgtcaatttgactggtaaatctgatgaccaagttcttcctttgacagtccagatattctgcacagacaccaaggtctcttctgactctgtacctttatatcaacatgataattgacttagcacactcccaactcagagcccctctccagcgcttttccataaggacccaggagtcttctgcttgtttggagcactctagtctgattactcagtcactctgatcactggctctattgcttgtgtgtggtctgactctggtcttttagatctcatctacatatttgatttacccagtttttgaatctaaattcttactcaagaagtcaattctaactcaagaaccagagtcctggttctaccccttatcagctgtataaacttggactagcattatttgacatacattgctgctgctgctgctaagtcgcttcagtcgtgtccgactctgtgtgaccccatagacggcagcccaccaggctcccctgtccctgggattctccaggcaagaacactggagtgggttgccattttcttctccaatgcatgaaagtgaaaagtgaaagtgaagtcgctcagtcgtgtctgactcttcgcgaccccatggactgcagcccaccaggctcctccatccatgggagtctccaggcaagagtactggagtggggtgccattgacatacactagataatttctaatcattgtcccactgctaaaatattacttatttaaaattccttggctcctgattttatggttggcaaaattacgataagatctgctccatctttctttagagttgctgtaaatatgctattagctgatatatatgaatgttctttgtaaactgtattttgtacccaggggaaaaaaatgtattgtgatttctggacctggtctcagttctgtcactcccatgagataccataaagctgcaaggaacacctggctatcagagttgtattactcaactgtttcttttaaatcttgctaaactttatacccttgaatttttttgtacactaagatatgaaatctctgggctttgtgacatttctttgatctgggagaagaaaataacacaagaaatcctatctaaggatggagtcagagacatcaaagcagataagtacagtatgagaagaaatgttcatgctgcaaacatgttgactgaaaatctgtcttgtcgcaaagtagtggtagtgagcacattctttcagaacaaagtctaaaggtaaggctgtgagtccaaaagaaaaatagaggctgagcaggaaaacctacaaaactgaatcggagatttgactgtgcccaatctcaaattagtttaaaattgtttttgcaccagaatccatacacacaaacacatataacaacacacacacatacacatattctgtatacccttctacatgctgaagcaatctaataaattgtataaccatgggtttgcttagatgaagaatattatgtaaataagaactaggtgacttgcttagcacccccactggacacatctactgaaataagttgtgatgaagagaaccttattctgcatattaattaggtcaagccatgtgtctttgattctaacataaatgtaatattctcactcgtggatgaatctatcaagtttttaaatgtcatgtaaagagatccaaactagaaggtaactgctgcaatcaaactgctggagaataaaaaagttaaaaagacctaggaaatcacgagtatttggtagtaaaattatctccttaatttttgtttctttggcagaagttcctgtggcaacatgcttctttattgttctctttcctttctcctttcttctgggtttttacccattctctctcaactgtggctttttagtaaaattattattactataattataatatttatttttatatagttgtttgagaagataaacaagaaatcttcaagtatacctagtgtttagtttaatcttggatagagaacatgacttatagaaggaagagtcttgaaggatagaagcagacctgtttcttattttatttctatatgatggatgctttggatgggaagatgacatagcagcaccatacttatactgcgcaataagtccaataagtggaataagtgtggtgcatttattttgttaccttttttaatccccaaaaatgtcttagaagaggaatatttggtgacgaggcttgtctacatctcaaaaatgaccacaaacggtatagtctactgtggactttcattgcttaatgaataaaccggctcacttcatatttgactagtgcagactctactgtgaaaatgtctgagagtctctaaggaaatagccaatgtggatatttcatcaatttggggagcaaaaaatcaataggagagtca

SEQ ID NO: 46543 - DNA, 2176 bp, Bovine  19866880506656
  misc_feature (1)..(1): n is a, c, g, or t
nctctggggatactaattgtaacattttgaagtttctttctactttctgtactatttcaataccctatgattttctttttggttgttgtttggttttgttccttatattttttcttatactctgaaggtatttgttatttctctgaatctgaggcattcagtagccaccctgatatacgctgtgagtgacagaggcttttaactggtcagctatataccatagattaatcttccttttctcttttatccctgtatttcttcctcttttctttttaagtctttattgaatctgttacaatattgtttctgttttatgttttgcttttttggccatgagacatgtgggatcttgaacgcgtatcccctgctttggagagagaagtcttaaccactggagcaccagggaagtccttggatttttccctctttccttccttttccttccttcccttccttcttttgtttatttgttttatttgtttattatgctaatacttaaatatattctccctgtaagatataaatagctgcccacactcctttggcccacaagtttgattctaaaacttgtacttctgattttactttccatgaattgaggaaactttaatgaggtaagaacttcacatggcttaaaatatatattgtgtgtcacagacagaatgcagtgctctgcttaataaaatactatgattaacagtcaaatataagccatgaaaggagtaccaatttccaaatatctagacaaaaatacaatacaatgaacagtatttttatatagaaaaccatttactattttcttgattattcaagagattgtttaggatcatggaggcctgtatgttttcattctgaatactgttatagatgtggcagtataataataataatagtcaataaagtacttttgaattctaatgaataatagaatttcctatagcaaagttattagaatctcatatgttctggtgattcctaccaactatatcagggccagtaaatgtatttggtaaagggataggtagcaaataatgttggctttctgggcataacaatttgttgaaactactcgacatttacacagcaaagcagctgcagataatatgtaaataaatgagagtagctgcattccaataaaactttacttaaaaaataggtggaaggccagataaaccaaaaggctaatttgggccagaagagtcttatagtttgtaagactgtagatagctgatttctgatctatttgcatacaggttccaatccaaatttctactacattttaaaatatttctctttaattctaacatttccctttaaatatatttctaacactagtacctaagatccaaaatatcaaaaataaaactcagaatgtctgtataggtcataccaccacatctatttctcttataatttttcttccatccttttcattttaattttatttatgtatttattttggctggcctggatcttcgttgcttagcccagctttctctagttgtggtgagcaggggctacttttcactgcggtatgcgggccttctcattgcagtggcttctcctgttgtagagcatatcctctgggcatgcaggcttcagtgattgtagcacatgggctccgcagctgaagctcacaggctttagagcacgggctccgtagttgtggtgcatgggcttagccgctctgtggcatgtggaatcttcctggacgagggatcgaatctgtgccccctgcattggcaggtggattcttatccaccacactgccagggaagtcccttctattctttattccccaaaatgcatccttcttccttgctctccggctctcttaattagttcttagttctgttgtttctactttcatgatgtatttcacatctctctcttttttttttaactacgtttcctttatcactgtctttcattaactagtgttcaggttctcattaacttgtctagactctcactggatgtggtctctctacttccatgtcatatcctttctagttccacatatccacagctgccagtttaatcttcccatagcagagggctgatcataccactttctagcttgggagccaccaccacctccttattaaccaaaaataaaggcccaaattcaaatctttcatgatctggacctactcagctttaccaaatatcattt

SEQ ID NO: 46544 - DNA, 1833 bp, Bovine  19866880524801
  misc_feature (1)..(1): n is a, c, g, or t
naaaaactttaaaggaaattaagtgcatacatgcacacactgacactctaaatcaataatactaatagcaaagaactgaggaggaaatgatagcaaatgaggtatgggaaacaaagagaggaaaggaaaacagttgaataagtggtaacgtatttgatagattagataaagctaatttttatgcctgaagagaggaatgctaataggaaataagacaatttgtgcagaagaaacccagaatgctttaggaactgaaggttccaagtatctctgaagatagggatgagagggtaaaactagagaaaggactcttcaaagaaagtctaaataaggagcagtcagacccccaaagtcctcccctataccagcagctaggtgagtacctcttacacatctaaaaaagatagtagagatagagaatctacattttcttgtattaaaatacatcacaacttcaactgacaattacaacacaaattcaagcccacagggtttttacttaacctctttgatcttatatttgaacgaccttcttccgtgccaaaaatctaattcccaacaccaacataatttctcatttttttattccatagtatacacatagtattccctggtagcccagttggtaaagaatctgtctgcagtgcaagagactggggttcaatccctgagtcgggaagatcccctgaagaaggaaatggcaaaccactccagtgtccttgctggaaaattccatggacagaggaacctggttggctgccgtccatggggtcacaaagagtcagacacaactgagcgactaacacacagagggagggagagaaggagagagagaatctaaaacagtaacaatactatcatcaacaataaaattagaaaacgcagtttaaaatttttttgacattccccccaccccacccctgctcccttagggtatttctacagatgagttagccacttgaagtactttctctctgagtttatggtattaatttgagactcgtgttcatttgtgccattttgctttcaatttttaaagattgctttgtcttgagattagctttgctttacagttatgtaaaatgcttgtgtgttttttaaatttaaatcagaaacaaaaatatattcacacatttaccttttaaccctgtcccctctgacctcatttcctctctcactccctcaaagtatcttcttcctgagtctttttttcaatataagcaaatttatattcagactaccttattctcagagcagcataccataaacacttcttgcaccatgatttttttaattaacaataattgtagagatcattccataagcttactaatttttgaaaagtatgttattttgtagcccacgtgaaaaatttggctataaaataggagcattagtggccagctgctggaaaaaaagatttaatccaaatacttaaaaaatatatatatgcagatttttggagctttgtagtaaacctttaaaaaatgactcaccagattcacagcatcgtgctgggaaaaattagagtaggtggctttgcttctgagaggcatacacagtgtacaattttaccatgcaaaatgcttctgctactacaattttcctttgctttgcctttttgaaaagtaatgttccttcctattttagcagcaccatttgcatgcctattattcacattgaactgggatttccatttttatcttccttttgttacttgttttcattccagcactttctcttcttgctctttgcctttcctttatcttgcccttaaatggaggcctcatgctatgggaaaagtgccatgaccttatcctccatcaagccagg

SEQ ID NO: 46545 - DNA, 801 bp, Bovine  19866880571868
  misc_feature (1)..(1): n is a, c, g, or t
ncctgggaagatattatacccctaaacacaaaagctattagcagccttttctaattctctttcaatttagtaagggaattgttgactatattttctatataaaaagacaaaaatatacaacagattgaatagaaaacatacagacaaatgctttctatttcattcatcagctgactactaagatggaaacacacccacaatgtatgttataagagtttccccactgccacctcactcagtggttcttcaacttccttttcttttttatagcatggggctaatgtattttttttaaatgaaaaagaaaacccattatattgcctcaaatctactccgtctcattgcccccacttcaaattctgattgactatcactgtttttatttgagaccacagacagattgatgaaataagatggacaggggtatcacatacccatatttaggtataaaagggcattgtgctaggagtggtttagttatacagcccacttactccttcaacaaatatgctgaacagtagtattagttaaggcaatgcaaatggacatattaagtaaaccctcacatttcaatgggcaaattttaataccataaaggtttgccattgacagaattagtgcaatgagagtgacttagattcaaagtcagaatcccttctccctgtgtttcttgcaccttctagagcctcagagtcttttacatttatcccagataagagaaaaatgcttgtgaaggtcccctgcttgtaacaccttctgctcacacattattgaaatgaacaaatcacacagtcaccccta

SEQ ID NO: 46546 - DNA, 1277 bp, Bovine  19866880611104
  misc_feature (1)..(1): n is a, c, g, or t
nctggcaggctggagattaaggaagagccactgctgcagatgaggtccaaaggctacctgtcgtcagaaattcttcttctttggggagggtcagtcttttgttctagttgggccttcacctgatgagacgcggcccaccaacactataagggtctgtttcacttaaaacccatcattgaaaatggccatctcgttcaaagatacctttacagaaaaatccaaaataatttttgactgcatgtttggtcatcacggcctagccaaactgacacaaaaaattaactctcacagtcaagaaggcaatgtggtccaatactggtctaggaagtgtttgaaaccacctaggtttcaaaagcactgctacctctaaagtgtctctgtcagatgtatgcttggaggaacaggccaagtggcaacactggattttcagttgcacatgttatctggcagaagaaacctcatcacaaaagtgcgagctccctttttctagaacactggagaacctctgcttttctcattggcagatcaagggcccaccttttattaatgtcattctatacggcattttttctgtgattttgtcatagctggaaaggaacaaatcttctttgtgtttggatagttttcttagattctgccatcttttcgaagcttattgatatggataagttgaaacctcattgtcacatttgtatctcttcctctcttagaatagtgatttaagaggctcaacccttaacaggaaatttctccaaggaaattgagcagagatatgaaaaataaattgtcgtttgtttataatcaaattcattcccctttaataaattttgcattagaagctgccaaatccagtctcagcttcctgtttctcctgcaacctggatacaaaagcgtttcattcaaccacccctcctaagtgactgactccttgccaggaactcccagcatgcactgccatctgttcacctctcagctgcttgaatccactcccctttctaaattaattctaaaatcttttcttccaaatgccagtcctttgcctagatgttttaggcagtatcgggctccatccactactctctaggaggaaacaacagcaacgcaacaaagaaaccaaacttgtctcagtgtatgtatagctcaaataagttgcttaaaaacagtgctgcaatcttgaagtgtgtatccctaacagaatatctgagtctaatgaggttctttgatacgaggtttgaattgaaggacactttagagccaaatcctgtttttctcatcat

SEQ ID NO: 46547 - DNA, 1200 bp, Bovine  19866880611223
  misc_feature (1)..(1): n is a, c, g, or t
nctctttgaggtgcaaatattaaaagaaaataaaatttgtttctcttttatttcagagcaaatgctagtaaatctggagggctttaattcagacctccatcactattgaattaactgattggccttcccttggtttaagtgggtggtgggaggtgcaaaagaataaagagaaaagactttttttgagtatcagttgttggtcatttaatctatattataccatttaatcctcactacaaacttgtaagggagagagactttacactttgtccagatctaacagacaccattcacagagaatacaatgaagagcgggcctgcggcagctgtgtaatacaacacccctaaattagagggcataaccacttttgtttgtctagtgttcctccttttggagaacccgcctcccttctgtagcagtcctgctccatccatgttatccggtgagcctgttttccttgccacaggcctcagtctggtcatttgacccagacttggctggactctccttctgttagccactgatgattcaaaaatgttcttaacagaagacagaccaatgagatacctcctgagacattttcgggagcttttcttcctcttggatcctgagttgtaaagaacatgtgatcctttaaatcttgtagtggctatcttattactcagtagcaagagcctccctacaaatgaagctgtatcattatttgagaacgcagatccagtaatgttgaagacactgggctttttcagttacatgagtccattaatatgtttttctgataaagctagtttgattatttttttctgtcacttgctatcaaaaagtttcaatgaatgcaggtagctattaccatctcaatgaggctgagaaattaagtaacttggccatgctgagtcggtaattgatggaaacaggattctaatatagggcaatctggttctcacatccatcttcttttcattgtgctatgttgcctcccgaagccgatgaaaatcaatcacaatttatgaaagtcatgttgatttatcattaggctttctaaaatagaacatcatttctacaaatatagtttccatgtctcaaattttatgccaattctagctggtaagtttgtgaagcagggttattactctttgttatggaaatatttccatttttacaaagctttagagaatgtttcaatgaggcttgtcaacaaa

SEQ ID NO: 46548 - DNA, 1353 bp, Bovine  19866880613992
  misc_feature (1)..(1): n is a, c, g, or t
nctgctgactccttgctaagagtaatcaccataccccactgcctcccatatagaagtaaataatgcaaataacagatagtatttctcatattcaatttaacaaatatttgttgactgcctaccaagtgccagggtctatgttcaaagctaggaatatactgatcagttgagtcagagataataaatctataaaatatgcaaagatatgtatattttctaggctcaattccagtcatagttctctgtgaactatgtaagtgactgggagggaggaatcaggaggaaaggtacattctgtgaaggcaattttaagaactttaatgtagcagccatttaaaagtgcatcacaaattaattttgcagccagcatgcagttactcctagacattatctctcaaaagaattataagttgatggaattttacagcttatttgcttagctttattactgttttgaagtggttaataagctagctaattttttttcttttaataacatctcgttcccttgtctggggaaacttgaatgtagcagcagcaaggaaagagactccagtgagtttctttaatcatccttctaagcagcatgggtttcttcaccataaaacacaggcccacttggtttcctcctttttactccattcctattcagtggtgcatagtccttttaatggtgcgtagtcctagggagggggcttcgcaggtggcacagtgggaatccgcctgccaatgcaggagatgcaagagacccaggtttgaaccctgggttgggaatttcccctgaaggaggaaatggcaacctgttccagtattcttgcctggcaaattccacggacggaggagcctggcgggctacagtctatggggttgcagagagttggacagcactgagcacacatggtctagggagataccatatcgccttctgcattcctagacaaactgtatttccccgtgaacacgtcagcatcgccgagctggtgcaaaaggtataacagcagagagaatgcagttttggggatcaacagacttggggttgaatccagttctgcctcgtctgtaatagctgttgactttccatgttgctgaacttttattataaaatccttacaacatatttcagcccacccccctcccaaaacgtgtagggaatgatatgatgatttacccatatgctcaattcttagattaaaagtaaagcatggcaatggaatgaaagcccttctgtgtactttctccccattttcaactccactggcaaagaatcatgctgttttatttatttatgtatttgatggctcgggtcttccttgctgcgcatgggctttctctagttgtagcaagcgggggcta

SEQ ID NO: 46549 - DNA, 2525 bp, Bovine  19866880708843
  misc_feature (1)..(1): n is a, c, g, or t
nagaggctggagtggaagataaacatgaacatttgtttttcctaaactgatcatcgcagttcttgggccaattatcacacaattttcctctcttttgaaggactaaccttacaaaatacaaaatcacaaaatgatgtcatcccatattttcctctcccttatttcattctttaatatcagacattgaaaggagaagttatttcatgtaaacctgaagaaagtcataatgcatccaaaacacttaaatgaagggaaaggaaataatcaggctcccattatgcaaaatggtgctcagttaatttatcgcactgcactgaataataagctgttagactccacattacgtttttcacgttagatcaaatagcctactgctgctggagcttacttcatattgcataaaatttggatatattacaatggagtagatattagtccattataagagacagacttaagtacttcattgataggatctctccatttggaaaatggcacgggagaagaagagatgcaaacaaggaaatggacagagggggatttatgtgcgttgcctatcaacccgctctgctgtgggtgactgctgtttgccacacatggggctggtgccttggagaaaagcagcatttctagtgggaagaaaatccaaagagagtttatgttccttttcagggaagtgttgacattttaattactttctgttttctttggagctaaacttgagaattggaagcaagttagaaaaataaaaattggctttattagaaatcagatgaattgacatgcagccatgacctggagaaagtccagattcagcccttgacaaactcaagtctccagcaggactcggagagccaaaaaatccagccattgaaaaacgaaccagaagaattcctgcttggggcgtgtcatctgtgagagcagactgcctttttctgagcagtttcatcttttctgccctgtgggcccctgttcttcactttcatatactttttcctttaaactttggtctctcagggatttgtgaggataagtagaacaggggtgcaaagagaatgatcttgaagagttagaatgagttgtgaaaactggtgggtgggtttagcattagtagtttttaagataatcagataacttttggtatttcatcaaacaaaagtgcctgtcttggtgtaggtggagctggagtaaatggtttagggaaatgtggtttatttgcaccctcttcttacaagggaatcaaactagtcgatcctaaaagaaatcagtcctgagtattgactggaaggattgatgctgaagctgagggtctaatactttgggtacctgatgcgatgaactgactcattagaaaagaccccaatgctgggaaagactgaaggccggaggagaaaaggatgacagaggatgagttggttggatggcatcaccgactcaatggacatgagtttgagcaagttctggagttggtgatggacagggaaacctagcgtgctgcagtccatggggtcgcaaagagtcagacacactgagcgactgaactgaactgaacttgcatctgcctgcaatgcaggaaatcagggtttgatccctgggtcagaaagatcccctggagaatggaatggctagccactccagtagtcttacctggagaatcacatggacagaagagcctggtgggctatggtccatgaggttacaaagcgtcagacatgactgagtgattaacacttgcacctgtggttgctgagaactgaagagatatttaacaaaacaggtgtacctacatgggctccaggatcagcaagactaaaaactgtaacttgggacaagattgaagctgaaaaaaacaaaacaaacaagtccaaccagcatgttcatggttcccaaaagggtggcacatgaggatataaactcttgtcccctcctaagccttcctggagaaggcaatggcaccccactccagtactcttgcctggaaaatcccatggacggaggagcctggtaggctgcagtccatggggttgctaacagtcagacaggactgagcgacttcactttcacttttcactttcatgcattggagaaggaaatggcaacccactccactgttcttgcctggagaatcccagggacgggggaacctggtgggctgccatctatggggttgcacagagtcggacacgactgaagtgacttagtagtagtagtaagccttcccagtcttactacacttcagagacagtgtggaaactctgctaagcttagatcagttaattcagtaataagtgataaatctgagcccctaaaaaataatttctcaattatctacagcatgccaagtgtttaaatccatattttaaatttttcaaaaatcctgtaaggagatgttattcctgctctagataatattatttctgttttacaaatgaaaactaaggttgggcaggttaagtaaatttataagttatacaaacctgtattataaaacatttcaaatacatgcaaaaaaaaaaaaaaaaagg

SEQ ID NO: 46550 - DNA, 1576 bp, Bovine  19866880731265
  misc_feature (1)..(1): n is a, c, g, or t
nttatttgaacctggttctcttctactttggaggactgtttccctcttacactagaacataaccaatttctgtttcccaagagtttttgtagtaaacgaatactcctaccaagaagtgaaaagtattaaacatttaatgtgtataatgtaattattctacctaaatccatcaacctccttcccacttctctatatctctaggattgagctagggagtgaggcgtagcagctcatgttaatttgtcacctgtccatcatcatttgatcagtgtcatttagacatatttcttaaaaaaatctgatttctgaaagcttctttcaatttctcaaactacaaaaaaaaaaacacccattactgtatgtgatttttcattttctatctgaaaaaccaatataatattgatgtatataccttatttataagaaaaagggaccaagaaaacaacttgaaactaattaagcataaaatacctccagctttaagtctggtgctatttcagttttcagttctttgtttatgattcatataatagtttgctttagacaaattaattagttgtatgtgtcaagctagctaaatgcatgctaaatattttcccaagagaactaagttgaaactgggtgctattaaaaccttcaaatgaacaaaatctgttttaacaagtcacacattattaattggaactggagagtgaggcatatttttggatgcttgccgagaataattatggagtttcttttattttttattggaagatgacaagttaatcaagaaaagctaatccagctcattatggccaaagcttgaaaacatgaccataaactactcactttaccagtttggattaggcttaataatgtaagtgagcgtcaggaatcatgcttatgctgtacttgataccttagagagatttctgcccaatttattcattataagtaggcaaaacattggccagcacccccccaaataatattattgacccaaagtcacacaactgcttagtggcaaggccagaattatgaaatgtttattttgccatggccaaaagtggctaaaaaacaatgcttattcagtaagtggtattataactttctacattaaacctgaataatactttaaaaaacttactataaatgtgtataattttttaataaaagtatttttccaaatagtggagtcattgccaggaatgattcattttttgccataatatacttttttcccatttgtgtttgctaggctgcagtccatgaggtcactatgagtcggacacgactgagtgacttcactttcactttcatgcattggagaaggaaatggaaatccactccagtgttcctgcctggagaatcccaggggcgggggagcctggtgggctaccgtctatggagtcgcacagagtcagacacgactgaagcgacttagcagcagcagcagcagcagcaacaacagccacttaatcttcttcttttggtactttaaggaattatcttgcctctattatgcatggtcattcagtgtattactgcccaccccctaactcaagcctgtttaatcagattctctctttcaaga

SEQ ID NO: 46551 - DNA, 2287 bp, Bovine  19866880822642
  misc_feature (1)..(1): n is a, c, g, or t
ntctaggcttttaggaaaatgtcatccatataaaggctaactactgttttacatataaaactgccattcttcattgattttttaggaaagagaaaaatacgataataaaatgaaacatcaccacaaagacttcttactttcctgtgaacattgtttccaaggatatatttttttcagaattcttacatactaggaagaatgcttttaggcttaaggcaaaaattagggaatttcagcttataaattatgaaaacagacattacaaatctatttcttgataataatagtattaacttaagtacacaaccaataagggtggattctaatccccatataattttttataaaatcggcatcttaaactaaacttcccccctttttactctttttattttcccccataatctttcatggatatgtacttcttttacagttaaaaaaaaattcccttttggaaaataattgttgtataatacatatattacacttagttgatcaccccatcagtttgttccgatcaaattcataattaccaagtgtctttgtaaacctcagaataaagtcctgtgggatgtgatgtggcaggctaggtcctgggagtcactattacctctcttagataaatcaagctttttccacgtgacaagtctatcccgcaatccacatccacagtcaaacaaggaataggaaccgcccactcccaatccacttcctacccacccccttgagagttcccttaagaccactaaaaatcaacaagacgatgtcagagtcaacagctggtagaaatcaggagactagtgacaagaattccctaagccccctgaactgaagtctgacattcgtattccatagagaaagaagagacgagttccactgaatgctcgtgttcagaggctgggctttcttgcaagcttgatattttccatctgtgcatatatttggatatctaaacatgtatttataacatacaatcctattattaaacatctagagaaataagacaaatgcattggagggaggggtgtttatttactctattaaagcattttcacatgaaattataaatccctattgcattctttgcaaagtaaattgcctgaaactctgaggtgccagatttcttttcctaaaccaagacagaacacacagactgagagcataaaccaaggcaactatggcaaaggggaagaggggtgtagacagacaggtgttctgagaagtccccctaaaaataaccagccccaaacatcctaactagatttcatttttccctgtagctcaaatggtaaagaatctgcctgcaatgcaggaggccggggtttgatccctgggttgggaagattctctggcgaagggaatggcaatccactccagtattcttgcgtggagaattccacggacagagaagcctggtgggctacagtccatggggtggcaaatagtcagacacagctgagcgactaacacacacacacacacagaaattaaatgtatccatttgtaccatttgtagaatcacacgtatcatctacaggaagatgcacctcggtagtaaatttgagtatttgtatcagtgaaagagaagatggatctgtggatttcaggtttggcatccatccgaagcacttggagtggtcttcaacttgtgccatctgagcccacagctgaaaattttgattcagtgaatctgacgggatccagattcaatccagaacaagtcgttcccctggatccatccaccaggctacatggatctgtaacataatgttttttatttatagcatatatttggtttaaaagtaaaagggaaattggtattcttctgttgaaaccttctctcataacaaaccttggccttatttttgaactaccttacccattctccatatttctaatattgcaattcttttttttttttagttccccaaccaggaatggaaccatgcccactgaggtgggagtgcagagtcttaacctaaccttggactcccagggaagtccctgcaatttctgatacagaatttcaccggtgaagatcaagagacacctctaagaaaaacaagaacatgaaaaccattatctgttcttaacactcattaacaaatgactcctgtgcactgtcagtcagctggacctaccataagcatgggtcacagttctggaggctgggcggttcaagatcaagccaccagcccatgcggttcctggactctcttcctggcttgcagatagctgccttctcactatgtccttacatggcagagagggagagagaaagagggag

SEQ ID NO: 46552 - DNA, 2482 bp, Bovine  19866880837319
  misc_feature (1)..(1): n is a, c, g, or t
ngaagagagatctatatagattatacaccacagctagttctctgttttctttttcctctgccttgaacagcagtcctctaagctgtataaatgaactagtacagttagcacagagctgcattatttgaccaaatagcaagattagtcatatcagaatagtgtttgaaagaaaggattccactagctgctttactgttttttgtgtcttatacaaaagctagcatcactgttcatgtgggagttaagtcagtgagcactgagctttcagaaagactttctgaattatccaaggtaaaaaataaattataaaaatgaaaatacacacacatacattcacatgcgtgcatgtacacatacatacaggaatagcaagatgattccatgattttgttgttaagtcactcagttgtctgactttttgagaccccatggaatgcagcacgtcaggctccctgtccttcactatctcccggggtttgctcagattcatgtcctttgagtcagtgattctatctacgtaaccatttcaccctctgccccttgtttacccttttgccttcaatctttcccagcatcagagtcttttccaatgagtcagctcttctcaccaggtggccagtgttggagcttcagcaatagtccttccaatgaatattcaggattgactgatttgatctaagagtcttcaccatccctacaatttgatagcatcagttcttcagcactcagccttctttatggtccatctctcacatctatacatgactactggaaaagccatgatagatgaatctatttttaaaattgtaaatgaaagcatttgttaaattattaaatatcagcttctatgtgacacttcccaaaatgatacaaatttcttcttcgtatacttcattccaacctctactgtagcctttatgacattttaatcaaagtttgttacatatcacccttcttcccaaagagattgtaagggcatagcggacagacgctggcctggtcagccctggcagatgtgtggcatagggtagacaacaagtatgtgctttggggagtgaattagtgaatgattacaaattattcggtagttgatctatcctaagtggtatccaagttttccttttgatctaaggacacaccttggctcatcactcagaagatgcagtattcttaccacatggttctcctggtaggtcatctacaaactgttaatacagaaaacaaactatgcaaaattttatgaaatgcgcagcacacgccataaaaaacaagtgcttgggccatctctgagccctgttttgagggtatattatttaccagatactttaatgcaccttctctaagtttaccctcacagcccttagaagcggtcatgtcctccatttccaggtcaggaaatgggtaattcaagcaagttgcccagaagtacacatctcggcacatgatccaagctttcagaatctatgctcggggctcattttactgaaatgcagctgctttcttcctttaagagtatttgtttagacaaatatcccaagggggaaaataggcaaactaactgcttggcattgcattggttcaacacgaaacaacctgttgatgagatgaattactcactcttcactcgattattttgtcgtcttgtacacacaagcatactctggttaaggatgaaaaatgtctttcataagactgttcagctctgcccctggcgtgttctgttcagtatgatgttgttatttttcttttaaatcttcatgcttcttattccaaatgcaaaacaatccaagctcctttgcgttctcattctgtaatttattcttgaagttattcctcatgttttgtttaaaatttttaggtttttctttttaaatgcaggtgtgaggcatatataagttttaataaggagggttgatttttttccacctgacaaacatacctttaattttacagataaatagacagctatgatttgctatattgaaattcaccttacagacaactttttaaaaggcatgctcttctgcaaaatgcaacacctgttcagaccaagggactaaaaggaaaaaggtataaaaattcctcttgtagcactatgaatgctctgatcggttgtcacttttctaaatgcgattttcccccaatcactacatttccaagcgtccaaatggagaattataattctggacaatgatggaatgaattgggctccacagatgctgaggcagccggttcactattagatttcaaaggcaacattcccaaactgatgcctgaggagatttgtttttatttggataacagagaacttgagatgaataaaatgatagctttacaagtactattcagcactactatgtaaataagtagcttacacagccagacttagtgataaacaaaggaacatgtcaactgacattcaaaccgcattactgcagtaatgtaatcttcctaggtatgggggaaataatttctataaatg

SEQ ID NO: 46553 - DNA, 834 bp, Bovine  19866880852463
  misc_feature (1)..(1): n is a, c, g, or t
ncgaactagcatctgtcttatattatgcaatttattatcaactttaatgtttttaaaatctatgacctcactcattatttatcctagcacatatctggcatagagaggagatacaataaaccttttctgtcagttgagcaattagatgtatttgacccatattaggttttgcaaacatctgtgaagaacttttacaaaacaagggaggatatgatattagcaaagaacagaacttgaaaaatctgttaaaaaaccttaacggtgagtcccagtaaagatgctgaagcactaaagtgagcagtgagagcctagtgaaccacacaattctagtgttgtccaaggcaaatcgatatcagcattcaccagagttttatcttgcacaggaaaagagagaaagcaaagaggcacaattttggaatcactcctccaaccacggaaatgattttaattaccagttcatctgttggcagactcttctggcagatgtacctgcaacttggaaagataacaaatgaaccagttccttgctccggagttgacgctggtagtgcttgctgaatttgttctcagaaaagaatcccaggcaacaatacatctggcactctgttcgaggaatttgtcatgtcattgacatgttcagcctccattgtccacaccaccctgacagcaggtcctttatatttcaaagaaattgcagtctgaattaatataattagaatgtaactgctattcactgcacaaactcctcgttttcaggactacagatctgatagcatgtctgtgttcagaatctttccagtgatggctggaggggagcaagcagatgataaaatg

SEQ ID NO: 46554 - DNA, 1149 bp, Bovine  19866880871184
  misc_feature (1)..(1): n is a, c, g, or t
nccttgcatttatacactttccagtgtatgataatataaacagtggtcattttagcctcatatccatcttctgtgagatccacaaggtgatggtcgttgtatccattcctggggaaaccgaagttcaagttgtgaaggtcaccaatgttttagaaatgtccaagttcacatcactatttaaaggcagaaccaggatttgaacttaggttctgttcactctttctggtatgcagtctgcatgagtcaggatgagcaagattacgttgcagtaacaaatggacttcagatctcaggggctcacagtaatatagcttgatttcttgctcatgtcccatgtcacctgtggcttttgtctactttttgtttacagggggatctggatgacagatcctctacctggaacacaggcggttatgggggcagagtgaaaagcaggagtgacggacctcacactggctctgaaatcctctgatagaaagtggctgtcagtctcagttcattggccaaatcaagtcacatgcacttaccccatataatagagcagagatgttttctctttccacagggtggggccccaaacaggagtaaaaatgtttcaatttatgttagggtagtgatagataaagtcattttatccatcatcttcttgtaccatgaaggtattcactaatcaatgtggtaccgattaagaaacatttcagataggctcagccaagcagtcatcttatacaatttaaaaataaaataactaaataaatttaatatttaaaaaataagctctaaaatatgcctattgtgcatgaaacctcctgcattttcaaataaagcaactttagctctgggaataaacttcccattgttggcagaaaaattgtatactaacactgacgtgatcctgtgaatggtcatcagagtgtcatatttgaatgtgcaatgaataaacattgacagaaatcccctttgccatgtgacttcaaaacagataccagtcggtagggaactacccgttgtgctgagtaggggaaaaaaaaaaaaatgttcatacactctccctccatggagcaaaaatcccctgccaaaaatcacctctccagaaaacgcaggacacacgtggattctcacatgtgtttgagcacgcaaccccacccc

SEQ ID NO: 46555 - DNA, 2405 bp, Bovine  19866880913876
  misc_feature (1)..(1): n is a, c, g, or t
nttttgttatccttttctttaattaaattggtgaaattgatgatcaagccactgttgggtgttttggaaagtcacactaagtggggaaatgaaattctatgatttctggacaaagtagcttagtttctttaaaaggcatccctggttcaggaagattccctggagaaggaaatggcaacccactccagtattcttttttttttttttccactccagtattcttgcctggagaattccatagatagaggagcctggagggttacggtccataggttcaaaaagagttggacacgactgaagtgacaaagcaagcaaacaagcaagtgaggttaatagctactggaaatttgtaggacagttttctgaacaatgtgaaatgctgtgtataattaaggttcttcttctattagcagatggccataaaagccttctgctagtgaagatttattaaatttgacttatttgaattttgcagccagggccctgatcctaaattgtaagccttcaaggaaagtcctagaaaaggcattctcatgaaacatgccgcttgaagaaatgactcacatcatgcctccaggaatgtatgcagttggtgcttatggtgtccctgagacaccaagagcaccctgagcatgccaaatctctagactggcactgattcagtctccaaaacacaatgaactcttaaaaagttacaagctctgttagaaaaatagattaatactttccataagaaggcgtagagaccttgggtgttgatttatgccttttccctatcaaaaagctgggggtgggtggagctgaggatagaggattttattttggaaacggacccagttccactgtgtcacatttgtttcttcccagtctgatttctgtgaccagtcataaaaggtacagtctacctttcctaggtaactaatgccgggaacattgattatacctagctccttaaattatgaaaatgacaagtacatgaaattttttatgcaagcacttctgtggctgaattagcaagcatactgagctaagtagaaactgaatgaattctactgctgggttctacacaccaaaatttaattaagtctctgatctaaagcccctgttgttttatcgattagggaagtcatgagtggaccatgtcattctcaggacagtgcaattgtgaaatctgagcagtctgtatgtcttttttttttttgcctgaatgttcctttcaagtctcattagattattatgagtgttacagctatactaatctttttttctgggaaatgaacttttaaaattgcacattttaaaagtgacttctagagttaccatggcagcttcattataatgcacagagatgagcattatcacagttcggcctgatctttccagggctgtcaggaaatgagaattccacataaagtgaatcctccagtagggctcataaaacttgccagatcaagtgcctagtctttcagtttaacaattttaaatgaaaagctttctatcatatactgcacacatctctgtttccttcaatgtgttcttgatgactcaggatctctgttatcaatagcttattgtacttagagctgcacacagtgctgtttgattttttagtcttcttttccatttcagtttgccagaagtttatgatgaccagggacactaagaatcatttcagactctgaaagggtttttgtcctcccacctcccagcaaagatagatctataaagatatgtcacccagggcacctaggtcctttgctgaagtcttcaggggaagaaatgacagattcatcactaatatgcaatgccgttggttccagaaccatctttctagaggcacaactggtattttgtcctgacttcctgcccctagtccaatataattcagttcagttcagttcagttcagtggctcagtcatgtccgactctttgcgaccccatgaatcgcagcatgccaggcctccctgtccatcaccaattcccagagttcactcagactcacgtccatcgagtcagtgatgccatccagcaatataattactccttgccaatttctagatttatcatattctgatgggctttttcttacctctgcactgcgtaccttaagcagttccttacacagaagtttctagggctccaaacaaggggctaagactcaccattcattgtgaaacttaaggatacaggcctgcttaacctcctcgggcttgttttctcatctgtaaaatgatgtttttaagataaaattcagttatatatttggagtacatagtatagtcttcagctcatagtaagaattcagtctgaaagcaactatatgtatggaatatgatggtgattgtatgtaaaaaacagaagcaaaacaccacaactgataaacggtagtatcgtagactgtttt

SEQ ID NO: 46556 - DNA, 2218 bp, Bovine  19866881022989
  misc_feature (1)..(1): n is a, c, g, or t
ntctgagaatgatggaaccgagcgattctgtcttggtccatctatttgtatattacaggggcatttgttagcactctactttagcataaatatcgcatacatgcatagccacgtttcttttgaacaagaccactaaaacaaaaaagccctgaaatagacaacataatccttgcaaagatttttaaataggaagcacaaatattcccacacttcagactggcaaggttagaaaaaaatagatgaggggtcacacatattaaatactaatgtaagtgattgcaaacacccatgctttaattggcaccgtggtttaattcaggacattttagaaattctgataatcttagaaaggagtttcagacatctatatttgtcctcagtctttcttccaagattcaatttatggaccattttttaaaatcctgctagctcttcacattgtgccttctaaatttcctctaagtgaacttaaaaataaaatgtacttgccttcatgctaataccatttggagtctaaaaatggtattcaggactttagtcctgctctttcgcctctggctgtggtttttagtctcctggatgtgactgacgcattgggaagggaccgcatcacacacatcttcgttctactcagaacagtgatgcttaaggggtctgcttattctctaactatagctccttcactaccctttcagccaaatgttatctggaatattgatagctttgaaaaaagttatgtttaaaaaggggtgacccagccattacagggattaaaggaaattgttgttaggtcgctcagtcatgtgggactcttttgcaaccctatatactgtagcccgccaggctcctctgtccatgggatttccaaagcaaaaatacaggagcgggttgccatttccttctccagaggatcttgctgacccagggatccaacctgcatctcctgcattggaaggcgaattctttaccactgagccaccagggaagcccaaaaggagataataaaggttgtaaaagggaaaggaagaatatgtctaagcattgggaagtggcatcaataaacactgacttagaggctgaaaggtccttggaagggtccttcacattaggtatctgacttgttgttctctttatgctgtggtcaactctgaaactcagaccttctccagaggtgcattgtgtgcatagacaggcacagtgcgtggccagtgtcctctgtgtgatatatcgaaggccacccacgttgacttgtagcaagatttctaaaaatgcactgggtagtctgacctcactttgcaactacctttttttccccagcctggagtgataggaatgaaggttttagaaaatgtgtgtaattgatgagtagtccatagcagatatttcttcttctttttttcttggagtataatcgctttacaatgttgtgttactttctgctgtacaacaatgtgaatcagctataaatacacacacatcccctccctcttggaccttcctcctaccccctcatcccaaccctctaggtcatcacagagcaccgagctaagtgccctgtgttggcagctatctattttctatagctagctatctatagctagctatcctgctagctatctattttcctatggtggtagtgtatacatgtcaatactaatgtctcagattgtcccaccctcctttccctccctgtgtccgcatgcccattctctatgtctgtgactcagtttctgccctatcttttctgacccctactccctccttaggtggcataagatggccacatcctttggatcatttggtacctgggcttactcccctaccctcctacacacaatgctttattgtatttattcatatacagggctgtctctttcccccactagtctccttagcagaagggactgagctttgtttgtactttcatccctaaatgcaagatgtagatgtctcagccaggtgaaaggatcaggaagcattctccacttcctgtatgaaagcctgtaaaatcctgctcccatgggaccttgtaaagtaggaattcacatagtagaaagagacaaacacattaattcttccctgttccaaatcatgactaggtgggaagttttaacggaacaacacgtaccacaaaatgtttatctatcccttgtcctaatgatgaagcaaaaaggagaaatatagggggtcctggctcctccaggctgaatttggggga

SEQ ID NO: 46557 - DNA, 1380 bp, Bovine  19866881044197
  misc_feature (1)..(1): n is a, c, g, or t
ntatttttttttttaaagcaaatttttaaaaatagctggtacacattctgctcagtgaaagccaaggacatagcattacacagtggctctggaaagtcaattattcaaaaggctgtagtgactctgtccaagtatgtaacctaatgaagcactcaaaggtagaaaaccggcaatgaaatactagccctgcacttattagcagagccaccatagcttagtccctctcattccctgagcttatgttttttaagtgtaaagaagtggtaataataccaatacttgctttgtgtgagaattaaattaatatataaaagtacttttaactctctaatgtatgtgcaaataggtaacatattttcatcaaacgatactctaggatcatctagataaaggataaagtcagatcagattatacatactttataattaattgcataaaaagttcaaccaatgagtcattaaatagtaaaaggttattttaagttttcattgcagctctaataaaaaacctttttttactcctccatatttattattattttattatttcccatgtttcaaataagtgagatgtcatccaccaaaaaaacagttgtttgaggacattattaccaatgtgatccctaccaccaccattacttctaccaattgctacaatttattgagcatttactatgggtgaggcaggaaatgaaatgcttcatatacatttcaaacacaatccctgaactaggagtgacaaggtgaattttataatgcccctcaagagcagtaaaacattagactagttacttatctctggtcctgcttttctctaggcttggatcaatattgattttacatcttagaagtttccttccagacttcagtattctattactttgttagggtcaatttcatggtacaaattctcacatttatgtcattctttttttttttttttgctataaagtgaggcatatgggatcttagtgccccagctagggatcaaacctgagccctgtgcaatgaaagtgcagtgtctcaaacattggactgcaagggaagtccctgtgttatatgataagtgcttttacctcaattaggaatgtatacttttcttagaatgttctctttggtagtatatcaaaagcagcaccatcatttttattcaacaaacctgatggggtattcttccctaagagtgaagggcatatttaccacaatttgtggaattttgtggaatgttttccctgaaaaaaaatagcaaggagtcaatgagtttgcattattgccttaaattagtgagtggacattctatttcaagaaaaaaaaaaaacttatttttttgcctttatttaaaaatttgagatataatggcataacatatttcttaaaccc

SEQ ID NO: 46558 - DNA, 1013 bp, Bovine  19866881183449
  misc_feature (1)..(1): n is a, c, g, or t
naaattccctccaaggttaagaggtggcttctgactaacagcagaatgaacaggaaggcaaggaaaagaggcctcaggccaaaggggaatgaagaggatggcggagcagcccagaggaggatcaggcaatggaaaattcaggaaaaattagtgggaggacagaacagaactgagggcctggaggatcatgggagaaagaatgaaaggaagcagagtcaagactctagagcccagagaaatggccgggccccctgaggggtgaagagggaaggggaaaaggaggcagcaagtcaaatcgaagaaaagggtagaaaaataaggagacagcattgacagattgtgcactcctggggtggagacacaaatctatttgttgtgttaatgttttttgttaatgtttttcatctagatcctttacaattttagtttagaacttctttaaatagttctaaaaacaggaccattagctgggagttattataaatcaaaaacaaaacaaaaccactgctaacaagtgggagttctcatacccctaatcagaaaggcctgtgtcggatttccaagtcctgtccctagagactatgagaagtttttttgtgtgtgtgtgtgtgtgtttttaatgatagcatttccataaaagcctgatttaatacaatcaccactcagaccaaatgtggaggaaataaaaaagtgctttcaaatccaagtctttctttgaaatttaaaattatattctaggatgctgcttcatataaattctaaggcaagggaacaaactaaaagcagcagcccaaagaagatttttttttttttaagtagggtaggaaaaaggacaagtcagagtctggttacatctactcatgcaacaggcttccctggtggttcagaaggtaaggaatctgcctgcactgcaggagaccaggtttcaatccttgggttgggaagatcccctggagaagggcacggcaacccactccagtattcttgcctagagaatctcaggatagaggagg

SEQ ID NO: 46559 - DNA, 1420 bp, Bovine  19866881196932
  misc_feature (1)..(1): n is a, c, g, or t
nttttgtgggcaagttaacaaaatggttttccaagcataaggatgctgaagtagccattcacccattagtcgtcaatagatctcggcccctttttcccctgaagctttggcttcacccttgtttacattgctcagttctgtcagtttagaacacattaaaaagcagaactgggctggctggtttacgttggtggtgaactttgtgcctcaactgtatcgtaaccccagagtttactcaagcccacctggcagctcggctccgtgagataaagcaggttttgtctggcggaaaccagtagaggtttatctttttcctctcctgctggcagacagctggttgggcatctaagagacgatcatctaccagtgaaggctaataaaacacacatgcacacgtacacacaaaaccaaacagacaacaacaacaaaagaagataaaagaaatcctttatatcagaggaattaaaaccaataccttgtttgggtagccttgtttcagaccaaagcaaggtcctcttttgagaaaccatactttgtgtgtgtgtgtctgtctgtctgcatgcagatgcatgtgtgtgctttagaattatatgaatgcctgcatgggatggagatggggaattgtgagtgaaagaacagctagcaagaatctaaaagcaatccttacttgctgaagtactgtgtggtttggatcaatttctcatacttgaaatggaaaatttcatttcattcatcttttccaaaaccatacacagtcattcccttggagaaagttacactgatagtaacaaagcaataagcaattttatataggagaatataaacacaagacaggtggaaaagagcagcctttgctgtggtgagttgtgatgctgagcaacaggcaacgttcatgcacagccccgaaacttctgcatccaagttcagcgcaggagaataaaatggatttttccatctccagtcaatccaagtgttatgagctgaatggtttcctcccaaagatgttgaggtcctaacatccaatacctgtgaatgtaaccttatttggaaacatgagtctgcagatgatcatgttaaggtgaggtcatgaggtggggccctactccaacataactgtgccctcgttaaagaggagaaatgtggatacagagacaaataggcacacagggagacagctaagtgactatgaaggcagaattcaggataaagcacgcctaagcccaggaagactatatatgcccagcaaatcctcagaaaccaggaagcaggaagggagcagattctctcacacagcctttgttgttgttgttgagttgctaaatcatgtccaactctgcaactccatggactgtggcccgcctggctcctctgtccatgggttttatcaggcaagaatactggagtgagttgtcatttcctt

SEQ ID NO: 46560 - DNA, 1329 bp, Bovine  19866881202551
  misc_feature (1)..(1): n is a, c, g, or t
nttgtatttttaccatttaattttatttttgaaataatattttgtatgcattttattacatgagcaatatacaaccatttataattacaaattataatttcgtgtaagcaagaagaaaaagttattttaaatcttaccatctagagaagacatttataatgaccgcaacaacaccaccacacacacttttttccctgtgcatatatgtgcctctattatgcataaataattccatttaaactaaagtgagattaaaaactctattcgtgtttgtcaaaagctgcctagcggatgtccctcaaagtgtcatgaggattaagtgagaatttatgtaaagcatagcactctttattatagaaattcctgtgtgaggatatatcttttaaggcctttttaagggtaacacatctggatctagtgtgaatctattcatttcttctctctctgctaccttgatgctctagccctttaattcttcacatgaccagtgttgttacgcctctggtttataggtgatttctgaatggaaaagtctagctcagttgagatagagtaagtacccatagtaagattatttttcccaataagatttaatcaggttgggagtagtaactgtattttacacttcttcatattacccatgtatatacgtgctatgctttgaatgtgaaaaatatgattttttgaaagagtacttgagaagtccataaagtaacattcatcaactgagaaaatgtttactcactgttctaaatgagttacttgtatttttttttttttttcgactttgggaagaggcaattgaatgtgctgataaagatttttttctataatattgcttgaactgtattaaagatttttttggcctttgcttgcaggtccttaagcattatttttttcttcaaattggcatttgctgttcgctatttgtctgtacaaagtgtaaggcaaaagatgaaagtaaatactctaaaaaaacctgaaatctctccaaagatgattgcaacaaaaattatccattgcaactttataattaaagtgcttgatgaaatgcacatgttgaataagtttttgaaaaagttcccctttctgccttctcccgtttaaaagattaattcatttaactgaaaccaaccagaggaaggaaacagtatgcagacttaaaattttgtttggaaacaattaagttctgtctttcccaaaatatagattgtgcaattaatacggaacttggctagagcaagactgttgacaaaatgtagctagaagatttgagctatttttagttattatgccagtttgtacttaataatttctaacatgaacatt

SEQ ID NO: 46561 - DNA, 2225 bp, Bovine  19866881214023
  misc_feature (1)..(1): n is a, c, g, or t
natcctgttcagaaggcctaggagctaccagacctggtttttaaagtttgtgttggaaaataatgcaaaattctttcctttaaggactggtttcctttcatcatggcttcaaggagcaaagaaagagttaaagaaagcttcttgtttcactgctaccaattcctaagctctttgcccaagagctgggctcatgctgacttctcttatggtcccctcaaggcacccagcacaaggccttgcatggagtaggtggacgatagaggtttgtgaatcaatgtataaatggatgagtcaagtcacactattttcatggagaatcttaaatgtcactcttcttgaaaattgaccatgctgctcaacctactaaaaatttcataatgaaccgcctacaagcacaatcttgtatgaatatcccctgtgttccccaaatcctttgtgacctatggacacaattgccgaatatgagtcatgcttctaccacgctcccacacaagtggtatttttaacgctccagcacttcctgaagtcgcgctctcaggaaacggcttttgcaataatgacctcaccctccccatgttcccctcaccccaccactgaatcccaaaatagctgaacaggtgtcaagatacgtagaattacccaaaacactccacaacctgtcttatgcctcctattaaagtcacgaggatgacctcttgtcctttggagtttgaaaggaatatttgtgctttatttatatctagatatagtttattcttaaaactggcaatagccaccacgcaccagaactaaatcagtataacacagtggttaaggttatggcctctggggtctgacagccctggagaccaaattttgaccccatcgctaactatggattaaccaacactaaccacaatggatgtgctttcagtcaactcatttaagcatttagagcttcagtgttatcatctataaaatgggaataatagaagaaataattttcttggaatgttgtgaacatcaaataatattaatacaactcctatatacttctgacctctgggctgataaagagcagctgctcagtacttgctaatggtcattattgtgtcaagttttcctggacctcaggcctgagttgtctctcttggaaacagttgaccacgatgtggtcactgtgacttccaggagtctttagatgtccagataccttcagaaacttatctggctcaacccattctggagggtactgccctagcaccctctgggaatcagaaaggtcaagggagagcagagggtgagaagtaaaggagaggggatgggaaagattatatcaataaagccacctggtctcacccaggttcaaagcaaacagagaggctgccacatgactgtgggaggagaggtatttacacagtgaagctcctggcaacgatcatgatcaaagtccatacttctttggaaaagagtctgtttatcttttatgtctttcttagaagagaaacccaattgcaaagatgatactgaaaatgacaatttgactctgagaaactattctcatcagaccatctgataagcttcccaagggacttttctaggctccccaaacagcacaggacaaatagccaactctgaagaggatgccctggggtgtagccaaactgcaactgccctggaagtcagatcccaaagactcacacacaagggcaagggcaggatgcatacatgcccaggccattcaccattcatccccaggcaggagcacacacaaagccaccccagaagaactgctttggaggcacagagaggaagaaaaagatcctgctggcactgctgggaaacatagcggtaaccagcacaccctggccctagcaaccagccagggacagactcagactgagaaaccctttctggacacatggcctgaaagcaaactcctcagaggctcaggctccatgaaggctaaggatcaacaacaaaaagacattaaagaccatctcctaaatggtatttcatggccatcaaacagccacaacaagctcatcaagggagcagcccatgtctgtaggctggtggagatgctctggcaattgagacacactggcagttccagggagggaacactgtctgtgggatctctctacttaggaaggcagcattttgcataacaaatgttccaggtataatctttccttggcataagtctttctggaccccatagtgagacttactctcaatcctaa

SEQ ID NO: 46562 - DNA, 1437 bp, Bovine  19866881306742
  misc_feature (1)..(1): n is a, c, g, or t
nctttataaagctgatatttgtttccttttaagagaagctgaatttagtataaaagtaagtaagaaaaagtctggaaccagaagggaaacggagacatatccaggaattttaagcagaatgaggtcataggaagctgttgttttcctgcaccttccttttttttttttgagcaggaaaattccacacaagaagcagaccagttgatctcgcaactgtgctcccatgtctggcacttatctgggtcaagtcaaggagagctgcccccaggccctggaaatagacaacccacccagtggctgggacacatagcacgtacaactcttcttatcgccagacgttctcccccagcgtccgtctggaagcagattctctgctgagtaggcagcacaccggactgacagaatcacccagggccacctgagcaaacagcccttcccttcatacatccatcaccccgtcccagatcctggaggcacctcgcttggtgttcgtgtaaaggtaccaaaaggtgttttcctttcagaaggatttaagagagcagcctgtcactgggcctgggctcaactcttactgctgatttcctaggcgcgtaccttagcaccagcttcataacctctctgtgcctcaatttactcatcagtaagttgaagataccaggcatacctacctcatgggggttctttagcagattaagtgaggaaagagatgtaaagcacaatgcctgcatgcaatagtgaaagtgaaagtgtcagtcgctcagtcgtgtccgactcttcgcaaccccatggactgtagcccgccaggctcctccgttaatggggtttttcaggcaagaatactggagtgggttgccatttccttttccaggagatctttccaacccagagattgaactctcctctcttgtgtctcctgcattagcaggcagattctttaccatctgagccatcagggaagccagtgcatgcagtaaatgctaaagatgtgaactgtggctaggggtcagtccacaggactgtctaggacaatcctggcttcagagctgcatgtgccatgctaccgctggtttgggggcttctgtgccactgctgcccactgtgggtagctgcccactgtgcttcccatcaggcttcctgcacttgagcactctgggctatcagtggcccccagcctgcctcattgtggctctgtgttgtagacctccatgttaatcgtggccatttttcacacagtaaatagcgaatgttagtttccttgatgacagacacacagagaagcacaatttttcagattcaattcatagatcagttctcaatccttaagtcatatctcttgatctttgagtcgcacactgtaaattttgattatctctgttttatagcatcctttgtcagtctgatcccatgcaatatggagaaattgaggtatggatgaca

SEQ ID NO: 46563 - DNA, 889 bp, Bovine  19866881374562
  misc_feature (1)..(1): n is a, c, g, or t
ngcaggcgtgggaccaagtgggcggaacgtcccaaagcggcacgtacatctgtgtctcgtaagtgtggcagcatcagcctgtgctttcccagtacagctgtcaacatcacagggccaagagcaggaaggaagggcaagtccccacaggcccagtgatggggcagaggagtgagtgataataacagctcctggcagccaggcagcagctaatcaggaccagaaaatctggtgtcagtagcagggtccctgaaagctttcccaccatcactccatcactcccagatccacagccacactcacacacatgcatgcgcacacacacacacagacaaacacacacacacacacactgccccctctcccttttattaaaagtgacagctatttatcaagcatagccacaagagtcagaaggcctgttttgagtcctggttctgccatctatgggctgtgtgacctcgggcacatttctcaaagcctctataacatgggtctgcagactgcagggttccccaggacaggggtgctgagaggagtcagtgagatcatgtacaggcagtgctgcagagcttggcacatcataaatactcagtaattaggatgcatgaaaatggaaccagtgctggagccaaaactgggcccacacttgagaatcaagatagttcccacaataaagatgtccttgaacttagaacagcagcaggactttgttcatgctgcgtctcaggggatggggtgagttacctgtatgtctggcctgcctgcctcagggtgggtctgtagatgggcacagggtttgtactccaggtgaagggcaggaagagggatataggctctggaaacctggaggtactagtacactgcgaggcagaggtgtagtcttctagaa

SEQ ID NO: 46564 - DNA, 1713 bp, Bovine  19866881383097
  misc_feature (1)..(1): n is a, c, g, or t
nccatctgtaaaacgggtaacatagggaaatagtactcatcttgccaaactgttacagtacttaaggcaagaggtaaaataatttctccaatcaccttgtattagggtgatcctgagtctgccgagatttctagtttgggccataatgtcacttttctcttccaactgggaaattcttaatagttccttgttatgttgaccaatttttatattctgtatatattgtatttatattgcacatgagaatgtattgaaaatgaacaaaatatatcttatgaaaatatatcttggaagttagcatattgtgtaagttctgatttatccagctctgttagcagtggaaaatcaacaaaagaactcatgaaactttattgagactgatctaggagataaatacgtctgacaactcatagaataccaggatcactatacttttattaattgaaacataatgtctatataacatgacattcaattccctcaccttccatctaaattcgcacacatcatatcctgcagaactaatgggattttaatactattttttaagttgtcacctttacagttgcaaaaaaaatgcttcttcatttgcgtttaattacagtacatgaaaagggcacatgggaagtggattcaacaaacatttgttacaccaaacaagttttgtctcaatcctagctaggagacaaaatcattggaacagtataggcatttgcaaaacctctttagtttctgttggttaggcacttgcagaggtgctaagaggctgcagcaggtgccaacagagcacctgtattcgtgggtcttgaataatgccatttgcttaggatttccattatctcagatggtaaagaatacgcctgcgatacaggagacctgggttcaatacctggattgggaagatcccctagagaagagaaagcgtacccactccagtattctggcctggagaattccatggactgtatagtccatggggtcacaaagagtcagacatgactgagcgactttcccttttcactttcacaaatacaagaagttggtttccaacttacgttaggattaacgtaagttaatgggtcttaaattatgaaatatatcaaaagagcctaaaagaaatcagaccaaaagagagtgaacatgtcagtacttttctattattattttcattattattaatgaccccccccttgtgtatattctagatgtattctaggatattgatgatccttgaccttgggtgccacaccatcttgtaattattgtgtcagaagaattgatagcttctagaaagtaacagcaaggctgaaattaacttccagctagtatgctgttgacagcagctgatggatgagagttcaggaaagatgtggttgcaaagaaaatcacaagttcctgcccgctgaatctccaaaatcaacttaacgtgactccgatgaacatctttgcttttgccccatcatcatgaattctggtggtagaatgaaatggaggcctttctttttcttctattgaccaccaaacccgagcatactgatccatggattcccctgttaagtggaaagcaatcctttgactggagttttcttttatagccagttggagcttcaaaaggctctgatttctggtttggtcaacatgatctgaatgtaggtgagaaacacagaagttcagctaattataaaataataatttagaaaaagaaaatagagg

SEQ ID NO: 46565 - DNA, 1251 bp, Bovine  19866881385187
  misc_feature (1)..(1): n is a, c, g, or t
naattttcattttcatgtttccaggtgatgccgggaccaactttattccactaggcacagtaggcagagggcctgtggctcactttacttttcaaaggcccatgaaaagcacttttttaattcatttttttaaaacttttcattttgtattggagtatagctgattaacaacgttctgatagtttcaggtggacaggaaagggactcggccaaacatgtatatccattctcccccaaactccactcttgaaaataagaatatacaatgatggatccacagctggactatattcatctttgtatcaatgaagtctgaaaattttccctcttatttatgtatcttttttttaaaaaaaattgtttttatttattcatttgagtcagttcagtcacccagttgtgttcaactctttgcaaccccatggactgcagcacaccaggcctccttgtccatcaccaagtcccggagcttgctcaaactcatgtccattgagtcaccgatgccatccaatcatatcttctgttgcccccttattctcctgccttcgatctttctcagcatcaggatcttttccagtgagtcagttctttgcgtcaggtggccaaagtattggagcttcagctttagcatcagtccttccaatgaatattcagaactgatttcctttaggaatgactggtttgacctccttgctgtccaaggaactctcaagagtttattaaaaattattatttatttttggctgtgctgcatcttccttgagacaggtgggctctctttaggtgcagcgagggcgggggctactcttcagctgtgctgtgcagccctcttgctgcggtggcttccgctgcggagcacaggctctaggtgtgggctcagtagttgtggcacaggagcttggtggctgagaggcacgtgcaaccttcctggaaggggaatcgaacctgtgtcccctgaattggcaggaggatccccaaccactggatcaccatggaagtcctatttatcgatgtattaatttaatgaagggatgggcacacgaaggcaaaagggtcccttgccctcaaaagtcaccatgtggccctgagtgctgctgctgtagctggtaggaaacacactgaaacaactgcactgaactaaccgatcttctgggatttgttagcgttctactttttatcctgaaccgttttgaccctgtgctgtttttactcagaagaaagacacagtcaattgaacatgctaatttaagt

SEQ ID NO: 46566 - DNA, 870 bp, Bovine  19866881419399
  misc_feature (1)..(1): n is a, c, g, or t
ncacttccccaattgcggatcatttgaagttttagtacaatttttttttctattaagcataacaatttaagttcaacaatacacttttaattcttttgttctttttaccatgctttcttatatcccacatctttccttatctcagcttcttagtttcattggtatataagattgaataacttgttcacattttagtagaaattggctcagattatggagctcatcccagcgactgtggagacagaagaagacatcctgcaaggaggacatgtgaatatcactggctgcttgtgacaatgaactgccccagctctctggtctcagagcccagtcttgtattttagcctgtgggcaatcactgctctgtctagctccatgtattcaagaggtggggggctggctgacaagcctagttcctttgaatgcactgccccaattaatcactgtgacaattgctccctgacctccttctgcctgaagttccctgtaatcactctcattccacactgcttctctcctgtgtgctattctctggtcttgtttccctgagaattcaaacctctctgctccgtatctcttacgatgatcttcctctttggtgttgacattactctttcttgttctccagtgctgttatgaatatatttctttgatcatatcacagacagagtgggagagagtgtgtgttcattccactattttgttcctatttctggattacatacataacatgtaataatgctgctaacatatatatcgtatgcaacaatgtccctgctaaccagctcctctactcttgctgtgttgtttcaaaaagaaattttaattttttaatttgttcttcctttcccttcgtcttgtctttttttt

SEQ ID NO: 46567 - DNA, 1042 bp, Bovine  19866881433619
  misc_feature (1)..(1): n is a, c, g, or t
natagctgaaggctgggaagttctgtttgagctttggtgtcaagcctgagccaggatcccaggtgtacgaggatcatgaagcaagacttaatcaagtatttccactccacgcttagattaaaatatgggccttttttttttctcctttctggatatactgttttgaactcttccaacacttaattgccacaatgagaaatcatgagaaaatgaataataaaacgatgcttttaagattttcctgacaagtttgaaaagcagatctagctgtagacgcttagcagtgatgaactattgaaccctggggagtgactggttgatccttgggaacaagttacagtcaccgacagctgatgacttccaaggaagtcatatggtgacagttaagtattagccttcagttcaaataatttattttacattttggccagttcacttgggaaatttctgtaccttacatgtaaatcaataaagcatagctctcaaaaatttagagaaacatataacagttttatttgaaaattgagaagatgggaatttgactaacataactccagggggtaggaaaaacagaagaaaaaaaattgaatcacttataatgttaaaaatccactctttcagttttgttccaagtatcacaatctgaggaaggatagttcatttgtgttgggttatttattcattcgatctttaaaataattttaaagtactttctttctcagcactatccccaggcataagcacaaatcaaaagaaaatattaattaaattgcataatagtcaatactgttacaattttacagcttaaaattgtacatgaaaatagctttttaaaaaatgctaccatattaaaagttcccatcttatggagaattctgatttttaaaaggtgctttgcattgggccctgatgaccagaaactgggtttatgtcaaactgacccagggctataatcttacttcttttgacagagaaaaataagagcatgataatcatggggagcatttcatccacagcagccgagctgtatttatttccatcc

SEQ ID NO: 46568 - DNA, 1339 bp, Bovine  19866881481013
  misc_feature (1)..(1): n is a, c, g, or t
ntctctgcccttcctcatcctgcccccatcctcacaggtcttctaattattcctttcatgcttcttccctatagcataacctcattctactgtgaactccattatgtaggtaccatggggaatgtcaaagtccccactgctgcctactgcagctgtctaaattcttttcactcttttcaatccctgatctcataattccagtcttggcacatgactacatctctctttctgctgtgcaatataggattatctctgtgtaattttccacacacacaattcagctttgttccaatagagagaaaaacttattttttcttacccatagaactcccttgacaccataataaaatgcttctaactatgaatgtttctgttaaaaagctggcagtaagaaatagttggtttatcattaaatctatgagaagttggtgtgcaggtgaaagatgatgcacaaacagtttcttgccattcctagggctccttggctaggatttagaataagaatggactttttcctaagatgaaagcccattcatctttttttcttttagctcaggaaataatggcttcctttagctggataaataactttaaagagaaatgagaagggatgtgtataccttagtgtcattaaatggcatgagggagtcattacttaggacagaatttaatgttgaataatgatttaatccacctcttaaacagtgttagatgattctgaagttccccaaaactgaaattacaatctctgagggcctgagatggtcccttcatggagttactaacaataaggcttggtttggcatgcagctcttcaggcgtgtcttattctttcatttcaacttttcttatggagtcatctgtctgattctcttttctcacatgtgaagacacctatattgcttgttaacacatactgaaagtggtgttttgcgtcatgaggaaatgaatctaatacataatgttgaccccactgtaaatactagcttgcgaaggatcaccttagttgctgttgtccagccgttcagtcgtgtccaactctttgcaaccacaaatttcaacacgccaagcttccctgtccttcactgtctcctggagtttgctcaaactcatgtccattgagtcagtgatgccatctagccatctcatcctctgtcgccccttctcctcttgctttcaatctttcccagcatcaaagtccttttcaatgagttggctcttcgcattaggtggccaaagtattggagcttcagcatcagcatcagtcctatgaaaaggatcatctgtagcaccataaatgcagaaaattatgccaagcctagactggcatccaacataa

SEQ ID NO: 46569 - DNA, 1292 bp, Bovine  19866881491333
  misc_feature (1)..(1): n is a, c, g, or t
nctcatgcatatgagacttgagcctagtagttacaagcctgagaaactcattgtaagcaaactacctggagatacaccatactcaattaagggttcaggacaatcgtacatccctagtttagccatgtactcaaagtaggcaaattcaagcctccatagtcactaaaatggtacaagtcccagaaaacccattgccaatcacaatagccaatgattagtggagccttcctttttttggtatctgtttataattctgcagttgggagatgtttatgttcatatgaaaataaatgtaagcaaaccatcttatggtaaacatctctccggaaaaaacaacttccatcttttcacataaaaaagggcaatggcaagatgaagttaatcctgttggctcatgacattgtacaactgtctggaagctctttaacactgccctaagaaatcattaatttggattatttcagggtatatagctctcataaagctgctctgggcagctgcagcttttaatgaggctgattagataactggaacaaatactctctggattgaaagctgtctcaacaaatgtggaacaactaactgtatttatttaattcaaccattgggtttatttctacccttcctccctccagaaaggatttaaggcagtttagctagtctgaaggtgtagggactcctgaaagcctcagattagtatctagaacatataacgtgtccagatagttttcaattatcaatgtgttaatcaaagcttggaatgagcttttaaacagcaatgaaacatcaactagcttcaaacttgcatttttagtaagctattttgtcatttggaggcctgcacaataaaccttttgttcctttttttaaaaaaagaaataaagaaagaaaagcaagctctggtcttgcttttgttcatcttatcatcttatccttcagcagcctattcaggatcacatgtgggaaagtatgtatgtaagactgagccctatactcagtgcatgaattccttgggaaaaaaaagtccttcttaaatgggtagctatgtaagaaacaagagaatttctacttttatgctgaagttggctttttagtccatgtgttgaaaatctaatgtttaaaattaagaaaatggaaagcaaactatctatgtggatgttttcacaccccacttttatgacaacagcctgctaaactgagattattagtggattcttgcaataagagcaagagaatatcatctttaagacactccattctgtttcaatatccctttgtttgggggattaaag

SEQ ID NO: 46570 - DNA, 2091 bp, Bovine  19866881519564
  misc_feature (1)..(1): n is a, c, g, or t
nttagtatcatcttgatcatctttttcccttttttcatctccctacccacaatccacctcaaacagtaacaaggtcttggaattccctggtggtacagtgaatcagaatacagctgccaatgcaggggacatgggttcaatccctggtcttggaagatttcacatgctgtggaacgactaagcccatgtgccaaagccaagtactaaagcccatgcacctagagcctgtgcttggcaacaagagaagccaccacaatgagaagcccaaggaacacaaggaaaagcatcctgatagctacagctagaaaaagcccacgcatagcaacaaagacccagcacagacaaatgtaaacaaataagtaaataaaaataaaggtccatctagtcaaagctatggtttttccaatggccatgtacagatgtgagggttggaccataaagaaggctgagcaccaaagaattaatgctttccaactatgatgctggagaacactcttgagagtctcttggactgctaggagagcaaaccagtcaaccctaaaggaaatcaaccctgaatattcactgaaggactgatgctgaagctccaatactcaggccacctgatgcaaagagccgacttactggaaaagaccctgatgctgggagagattgagggcaggaggagaacggggcgatagaggatgagacggttggatgacatcattgactcaaaggacatgagtttgagcaaacaccaggagatgaggatggatagggaagcctggcgtgctgcagtccatggcgtcacaaaggattggacatgatttagcaactgaacaacaacaacaaccaatgtcttagtgttcaatcagcctgtagagtccctacagcatcagggccaggcctggacagtctccacgctcatcgaaacacttaagtactcaccaaatatatgttgagagtttcctctgtgccagacaccattctcaacaatggggccataacagtgaatgaaatatacaagtccctaccctttacattctagtaaggggttatttttgttgttcagtcactcaggcaataaacatgtaaagaaatatatatcatgtagggatatcatgtaaggaagtcaggcttggaagaaaaaaaaagcaaaataagagggcagagagtaacaagaagatgtttctcttttatctaactcttgtatcttttctttaccaaattagatacgtaaactccaaagagatctataatttcaagtacacctactagatgtaaacacattatacttacaggatttttataacttatttttatcagctattttccccatagttgtatgggaaaggacaccaaggaagaaaggagtatattcattcatactgtcaatatttattaagtgcctactttgtgtaatgtttttagaacaaagaatccaaaatgagcaaaatacacagattcttgctatcatgggtttccgttatggccagaggagtcagagaataaacaaaaataaaataaacatatgttagaaggctggaataagtacagtggagagaagaaaccgcagagaaggagacaaggaagacctgggggcagaggccaggctgtcattttaagtagcaagcaactgtcccttgatcaggtaggatgccacaaaaacaatacctatgccaatagcaagcctcaggttttagttcgcccgttattatagtcagagtgtcatcaattaaaagaaaacacaggcaggatgttttgtgttgagcattctatttaagtccatagaaagaaatgttattctttcaaactcatttttgcccttccctttcccttgcctcggagaaaaatgaggggttggcagcccaaacaatgtagggatgggagaggggaagggaaggaaaaactaagggccagcattcacgccggcggactgttttaacaaggatgtagctgtgacccagccctcctgggtccccagacagccttgttaaggaacccacaaaaacagagctggcagacaccaggcattttccattaagcatggcatgcacttttttcaagatgtaacgagatgttaatatagatttgaattttaatcagatccaa

SEQ ID NO: 46571 - DNA, 1135 bp, Bovine  19866881698738
  misc_feature (1)..(1): n is a, c, g, or t
nctgactaatcattcttaggggtgtcacagagcagcaaataaaatccaaaaactctctgtcagctctgagcttagatttagcggaaggaggctggtttatcagacaaaaagtcatttttatgaagtgctgtatcagcttcatgtgcttgggtactcgtgaaggtgatctgtgttctgtttcttagttggctgtcattgctgttgcatgaattgcttattcatgtcttttttttttccatgtattaaatgagttcttgatgtgaaagctcatgagatgcctcagagcttctatttccctccaagttcccacgtggcctcctgagtcctgggattgtccttagaaatcactgtcctgtcatcgccacataaagaattcacttacagctaagaaaaatccacctcccatggcgtcctgtttctcctgcttacagacctcccattttccagtggagaaacaatgggaaataccaatccaccgtctcctctgcccatgaaagcagttaccctccttgccagtgaggtggattttctaggctggctctcctgattcattccacatccagactctatcctctcagtttttccttcttttcttcctctagaccttcctagatacaacgtttctgggtggccacatcctgtcctacctgaggaccactccagtccgccagcacccccagagccttgccagagctcaccaggccacaggccagctttctcctccctgtgcacaggccacatccaatgtggacacccaggtgcatccccagaacacaagccctgctcccgcttgagagcgggtcttctgtgctcccaaagctcagcatggagaaaagaacctgtccactgcttccgcttctcctttgagggtttcccaccacagatggtggcctctgtcatgtctgatgtgatcctttcccatctggtgacctgagttattttgttcttgttgttgtgcggtgtttaaaagtctttatgcagccaaatgtgttagtctttccctttgtgatttctcctgtcacttcatagtaaaaaaaataacaataacagtaataatgatttctccagacatctgacaggcaataacttatctgttccgctatgttctcttacctatcatgttagccattcaaaa

SEQ ID NO: 46572 - DNA, 648 bp, Bovine  19866881886169
  misc_feature (1)..(1): n is a, c, g, or t
naacactggagctgttctacttctgaacatggggatgttttgccaagacatgtttcatcatcactataatgagtgcattagaaactggggaaagtgctggaaggtcccccagtgaggtggctgacaaggtgggttcttctctgtgacacttaccccaggtaaccggggtactatcaaatttagctcataagtgattcaaagaagtatgaacagaggaaatactcccaaaccagagaaaacagtataagttttagtacagtcttggtttgtttccaataagtcttgacttcttttttcatcctcctctcccctccagagctaaaaaagttcaattcaaaataaagagctcactatgagcacctacattgatccaattattctgctaactgcttgagcctggttaattcagtggctaagattcaaaaacatggagttgagttaaacataatggcaactttatattcacaacattttgtaagctcagagaaacaactgggtcaaaatgttttaattcatttaaagtttaagtggattttaatattacagatgttctttgtaattctcggcaagtttatttgaatggtacaaaagtaactagaggagagtttttggaagaagaatgtgcttaagtgataccaaatgattaag

SEQ ID NO: 46573 - DNA, 744 bp, Bovine  19866882200985
  misc_feature (1)..(1): n is a, c, g, or t
nttgtgttactgatggcgagaaaactttcgggcaagagtacactaaataaatacagaaaatactgatatttaagcaagaatattgttttttttaaaaagttacccaaagtactcgaatccccactgcaacacatttcccccccataggcaaacaaatcaaacatttgcttggtgagcataacatcagagcaaagagagctggttgatcttaagaataccttaggctaagacaactagggcatctttttgtcttctctaggagtatgggccttagtatttttgtctggtgaccagagctcccccacccctagttggagttgtatgtgcactgctagtctttgtctccaggagcctcattttcctgtgttccatggttgaccaactcctcttttaagaccaccacattaataactctaatgagtttacaggaaaggctgactctagccagatggcgattctgactccttggagagattttgtacatttctgtgtttatttcatagcttaacattcagagggcagctctataccattttcttagaggggcagcagagtgtttagaactcaggctttgaaattgggttgcccgggctatgcctcagtttgccttttgttaatagtgtgacctgggaccagttgctctcattggatgtgcctcagtttccctatctgctcagcagagattataataatacagatttcacagggttgtttgaggatttaataagaaatctatataaagga

SEQ ID NO: 46574 - DNA, 1036 bp, Bovine  19866880454992
  misc_feature (1)..(1): n is a, c, g, or t
nctgtgtatgtctgaactcacactaattaaaggtgtgattgcctgcttttgacatccacttagctaacttgcttgctgactgaaaaagtgatgggtataggaatctgggaactggaatcagggtttggggtatgtgagggttgagggtacctgggcaggctgatgtttaaaacggtcaattaacagtgtgggtcctgccttgccaggtcacccagctgttgactggctgagcaaggcatctgaacgtagagctgatgctctgtgtgctgtgccttgtgacccagccttccactggctctggtctctgctcatggccacagctacacccacatacggcacggaagatcaagtgaaaggtaagtacagcctgatttttgcagcctgctgagctgtggttgatacctaacctggagaaatcattgattctttgacacagaaattagcatgtaagtgcaggcacctaacagctaaaaacagtgtctaataaacctagtaagttttcattgtttctattcataatccaaagtgacttggctggctggctggggttggggctgagaccagggccccatctttatgtaatacatgtttgctaccagctgccgagggagccttcctgtctgtattgttaatatgatagaggcctttggtttccagtatcatctctttggaatttctgtctcagaccctgtgcaaatgaacataatccctggcaggaaaggcatttcaaagtcctggcataggcttggggcctctgactttcacgtgaggaatgccagatgctgctggtctttcctagggcctgggttttactctggaggcttcaggtgttcttgctggggaggaagaggctgctgggctgtcataagggctgtcatccaggactttcccaagaaagaggatgcagaacaattttctaaatgtctcaggacaactagagacatttaggataacccatcttccaatttttaatgagcacgacacacatttaatctttattttttttaagatatttatttattggcttcattaagtc

SEQ ID NO: 46575 - DNA, 1683 bp, Bovine  19866880547817
  misc_feature (1)..(1): n is a, c, g, or t
ntgtatgtctcagctcttagagcaaggttaatcagcccctatgcctatgcctcagcttccttgcctgtaaaactggcaagctacattcaccagaggatctgaggagagagaagctgtggaccaaacgagaaaatggtgatgaaagtgcttcaacgagtgaaaacacgagttaagtgggagatgttattatcttccgccatctgctttactttaatctttttttcccctcggtaagcggacctattgattgcagcttgctggaggaagctctcactgtctaattactgccccagctcagcctgtcaccgtgtcctctgcagtcagcgcatcctgacactgacccctgataccacagctcttggcatatcagcctgttctggcactctgcgcccgacccggaggaggcaagtccccgcagctgggcctggagggctgcccctgtgaggcaggcagctggggagaagcagggacatgagtgctgctgcagccaaaggcagagggaatgtaatttttccctggagccagcagggatgtgtcccaccatgacacgcagttgtgagcattcccaaattctggcttccacaagaatgtgccctgaaaaaaaattttttttctggcctgggatattattagtgggggttggcagtatgagaagaaatcatttctaatgctaggaaataataattcctttcccttaaattgtggaaatcttcaaaatatccagggtatcttcatatgcgttaccctcaggtgaccctcacaatgtgataagcattccttttttttatacggagggggtgtggtctttagaaccgagggctgtgattttcccaagctaaacagccaagtaagggagaagggaattagaatccaggttttctccgtctagaccaacagcctaggccttcacagggctggcccaggctgcagacataactcaggttatttaacctgagttgaaaacagtccttgagagaaatgcccagaagaaatcagaacgttaaaagtactcttagagaaacaaatatctttttgacctgcagaggaaataaggatgtgctggaattggtaaagaatccacctgtgtgccagagacccagttcaattcctgtgttgggaagttcccctggagaagggataggctacccagtctagtattcttgggcttccctggtggctcatagggtaaagaatctgcctgcaatgtgggagacctgggttcaacccctgggttgggaagatcccctggaggaggtcatggcaacctgctcaagtattcttgcctagagaattcccatggatagaagagcctggcaggctacagtccatggggtcacaaagagttggacacgactgagtgactaagcacagcctagaaaagaaatataggtattgtgtctgttgtttagaagaaagaaaaggttcatataagcaaacagcagaggatttttttttaaatttctaaataaactacatttttgtcctggcttcaacacctcaggtaaataatctaatcaggtaacctctaggctaggaaagtgccatatagaagctacttggcaaatgcttgttgaatgactaggtgaatattgacctggattataaacagcctgtgcaaagctttcttctctcattttcgtgaaaaagaaatcattttttaaatcagatacagagtcacaaaat

SEQ ID NO: 46576 - DNA, 1099 bp, Bovine  19866880578665
  misc_feature (1)..(1): n is a, c, g, or t
naatcacaggctcgcagttaaaataatgctcacctactgcgcttccaactgggccatctacctttttcgctggcggggtcatgcccagtcaagcctgatgaggctgccgcgggccccgagagctcgctgcaggccggctacacctgtttatcaccaagtctcttcatttccccttcccctcctccccgcttgaaaagaagcattaattaaaccggtaaacaagccggctcccattctaaatcagggctgcaggcaacggagagataacttgggctccggagaagagggattttctgttaatttatggaatccaccgtctctctccgagcagcctgttccccgcttaacggggaaattgaagcagacagcctttgtctaaacacttcttttgcccagaatatcttaatttttctatttgaatgtttaataaggtttgggggtgccgctgctgctttttaaatttttaatggtgcaggcatttgggtgttatcatttggctcgtggttgcagggtgtccgtcctcctggggcgtggagggaaggaccaggttttgtttttttttttcccccaagctaggctccgacggccagcgaaagaaggaggctggggtttgggggaagtttaggggggtcccggaagtcagggcagcccagcaacactatgcctacctacccttttttcttgtatggtcctcaatgccctgggttcctgcagacgacccgggaacgcggcccgggccccggtgagcgctgtctttctctcccagcgcctggagcacccacctccggcagggcacccagccctcgctcgtacgcctcggtcccgcctgggaggggtggggggggatccctctccgtcaaagggctagaccgaggctcatttccggccgcggctgcgaaaacccgggctgcctaaattaattatttctccaagaaggagggtgtgcgtgtgtcttatttcccactgataatctggaattactcagtttaagtgagaatcagtgaaattgtagttttcactatagacagtccaggaaaaaaaaaaaaaaaaaccctccgtagatctttgtcatttccgatgttaaacttcgtaaaacaca

SEQ ID NO: 46577 - DNA, 1598 bp, Bovine  19866880640136
  misc_feature (1)..(1): n is a, c, g, or t
ncctgttggctgtgagcttcattcgtaactgcgaaaactggtaacacttctcccctagtcccctagaaagtcttgattcccctttccttgttgtctttcttccttcccctctcttattaaatatttgttgcatgaataaatgaatgaattctgctctatacctgtgctcttgaaaccaagtcgccagacaacttatcctcgtagatggagcctgaggagtttaagaggttaccttgtactggagtgatgctcaattgaaaaaaaaaaattgagttattaatgtaatccataaggtccttagctggagaagataactcaccaggagtcactttagtttatgagcaaatgcattcagatgacattgatgctggctcccttctgcattactggactagatggttgcgcgtctggcataaccggagagggaccagaacagcgcttcttcccaactgtcactcacaccgacctgtctcagtgtctgggattctactgttagagatgtactacttttgcagttataagagcctcttaaaactccttgcagttgacaaactttgtcaacaactcagtatgtggttggtatgactctaaatattctgataatgcatctctatggttggggttgcataaagatagcatcattatcctaatcaaattaaagaaaatctacacatgatgaaattcacatgcttcttattttctgaaactgaaggcacttggctgactctgattctgccttcccttttcttccctctccctcttttgtcttctatattaggagatggactcagcagcaccttctgctctttggagtttccagcagggcaaagtcatgtctatggatcccagacccaaagcttagaaagggagggtgtatgaggaggaaatagtgctggggagaagaaggatgggaagacaaggaggcaagcaaagaataggacaggagagaggtaaagaaaggtgcttccgatggggagagaaaagagaactatgcgcccatctcatacaggaagcaaagattcgtcctggtgaggctcagggtctaatccgtcccctggacgcctcctattccagttcattctggggccaggaatcctcccttcagggatgagctgtttggtaacttgactgctcttcagcaaaccttaccggtaatcctggggctagtttcctgtactctgcttggaactgcctgttcgcggtcatcttctgctcctctaattgaaggtcagacaggaatacagaaaggctgtgtagacccagcctctcatattgatgctttgttcacactttcgttggcatcttcacaaccagaacaaaaaagttctaagaagaacgaaatgtgtcgcttggctggatctgatcaagttgctcagtcggactgtctaccccaagtgcaggatgctggggatggagacaggaagttcaccattgacctgctggtatatctcctcctttgcagcatccagctcacaagtctccatctcccagtcatcattcagagatctgggtgtgaattggggagcaggtcctgggggcatggtgttcactgcttctggaggaccaggctaataagcagatgttgctttgcctgtttt

SEQ ID NO: 46578 - DNA, 1368 bp, Bovine  19866880680187
  misc_feature (1)..(1): n is a, c, g, or t
ntttatgagaggacgaagattacatagagaatgtctttctaggctgttttttcccattacaaccactggctgttctttaatttgtttccagatcttttagaaaagtacctcccgtgctgaaatgccttttgccatcttaatcccagagccccataggcacagtgagttgttcattgtacctatggtttattcatttaaaaaaacaaagatgttctgctagtgttagtatctgttttcaaaagaatctgcttatgaagaaatatttttaaagtctttttcaagacttttcaagagtatttgtctgttacatgtaaatatgtatgatccagtagagaacatacaaggttttaaaaagatactatgaggaaaatatggaactttgttcagtattccctcccctaaatgtatctgatttttacttttagtaaaacagtgttacatacagtatttctatggtgctgaacattgtcttagtctttaaaggaagtatagaaagacctcttgtatactagattcgaaggattgtaggaggaactactgttaaataacacattttctgttttctcaaatgttttccattcttctgtcagttctgtcttttatgggtcactcaacccacacatttctggatgacttttaaactgtcacatgtcaaccaaagaaaagtagatgtaagatgaggaaatgaacttgccttattagaaattggctagacttttcccgtaaaggtttttacgtttttagtttctaagtgcattttgcattttgacaataataagaaacaagaagggacatgagtgaatgataattgctaaagaaaatactcaagaatggtgcatcagaaaaccacttgggaataaacctaaagtgtatatggaatatgcaaagtgaaattttgttgctgtagtctacagacagtgttccatctgagaggattttttgaaataattgtgagataattttagtgcttaggaccaaattaaaaaaaaaaaaaaaaagagcagtttagatcagcaattctttagaagtttgtggtagagcaataataacaatgtggattctgacctcaaaaaaagctgacgagtataaatgactgcttatattcctttttaaaaatcctgtaaattttaggtaaaattctaatgacccaaacaatatttctttgaatttgaaacagtctgtttataaaattgaaataacttgccctggaattcagaataaggtaactttaaaaaaaaatagaacaattcatctttcctggcatcaagtcctttttttttttttttttttgaaattttgtaaaaaacattttattgctacaaagggaaacatggtcacaaaaagcctttaagcgtatcttaacgcaaa

SEQ ID NO: 46579 - DNA, 1266 bp, Bovine  19866880700061
  misc_feature (1)..(1): n is a, c, g, or t
ntgataatgaggtgagatgaagggcagaggggtatgcacgttgtagagttgagcacccttgaatatgagaatttggtaaagttgttccctttgtgtttctagaagcaactgataattttacttttctgtttttgagaaaactaaaatttttattttctttttctgtgctctgttttaactaggattcatccattccttacctcttttttcaaccttgttcattttcaagagttcacattgagaaattcatagagaaaacctaactctgtcctttctcttcaggaaaaatgaaattgaaataagttcttttagtggtacacaaacaaaaaaaacacacgctttgacagtttgtaaattggcgcattaatgtaaacaaataatcagtgagatatttgtgtttaaaatgatttatttgcttgaatacaactatgttcttcgtatagaaaaatttggggtcattactctgtaatctgtccatttccaaactgttcctttatagagtgtcaaaaatgtaaagaagatgtttccttagttgattcttaagaaagccctgggcaggttgtaaaaaggtaaagtggaagattactacctaccctatccttagctgtggttttccaaacaaggtactgtggattcaggtaatgagaggcatggcctggggctttgaatcttctgcctgtccctccattctttcttcgctctttcactctgatcacaaatacctgggttgacaagtgctgccagccttgcttggaaattactacacagtactgttgtcctattcattctgctgaaaataatctcatgtagcaggactaaagtaacttgggaggtgttgtggattatcacttaaatattcagtagattctttgaagggtcagtattgcacagaagagtcaggttaactttaatattttattttatatacttgggtgatttatttgcatttcagttttcctatctgtaaagatatgcacaataataatacttattaactcgtagggttattgtgggggctaaatatattattgtattttaatgaatttaagatgttatcacttttaagacacaccgtttttttatgtacctttaaggaaaaaagtgacaattatgacattgtgctttatcatcacatacacagtagctttttgaatttccttgacttacattttttcccatattttacttttgtatatacataaaaagttaaaatatcaaattgatcaagttattttttaaaactgcattcaaagacttagttcaagg

SEQ ID NO: 46580 - DNA, 1516 bp, Bovine  19866880736430
  misc_feature (1)..(1): n is a, c, g, or t
nctactgggtaagtttttgagggcaagccaaccttaagggtttcacaactttgcatcctttctccttggcccgactacccaacacacacacacacataaaacgcggaccaacagagagtaccctgctctgttatgaaatgtaactttcattaggggttttacttccccctagaccctaaggtacccctgttgaaggccctgcccacaagcaaatagaaaatgataatcaacttggcaaccacttctctactttcatctcctaagctgaactaatttctggggtttccacctcctctgagccagtgcttcctgttgaggaaataaatgtcaaatgatttcaccattcagagtgatgatcacagtggatttctgggtagcaagcaggcaggggaggccccctttaaaaagtagacatccttgattactttgaagggaaaagggtgaagggctttgaggggagtgggacgaagggtcagatttctccagaatgactcagagtaatacctcctctcagcagccaccctatgaattctgacacatctcaaaaaacaggagtctggaaaaagcagtcagaatctcttaccttctgcaaaaagctactgtgcacagtctgtccctttgtagtttgaagatttttttttttttttttaaatcaaaccatcttggaaaaatcaaaaagcagatgcacccataattgaagttggcaagagcaacagaaaccttgttataggtgttacaggccctcataccccaattaacctgggggtgcgggagtggaggggctgtgggtttctctgcacagacgtctcgggggagaggccctggtgggcaggagatttaggtaccctgagatccttctggaaactaaggcccaggaccctcggccagtcctgatgtagaatcactctccagcattgggaaagccacatccaggggagtcctggccccgggctagtcctggagaagtggggctgctatgcggctgccagcccacccgagagagagcagggagcacccacagccccgacccggggccgaattttactacctgccgtttaccattctgacgggaaaacaaatttaaaacacctgggcatttatgtctctgatgggtcgagttgcactgttccattatattaaataatccaggcggtgtgcttcaaaggctgccatctccaggagggcgggctcgggaagagccttgtgcgggttcagaggtggaggcttgagagggcccagggttttcacctgggacgcagggcccctccaggccacaccctggccctgccgacacacccctgccccagacttgatggcaaaatgggattcactacacgtgatccggtcacacagctccataggtcaagcagagaggaggttggggtcgatagaacactcaaaaggctaagactggatggcgagagcgggtcagaagaagctacgggaatgtttaggacacatttgagacttggggcccaacagacctctgaggctggggcagccaagagcagcacgg

SEQ ID NO: 46581 - DNA, 1764 bp, Bovine  19866880772785
  misc_feature (1)..(1): n is a, c, g, or t
ntattatgtgttgttattgaaaggtgtaccctccttgaaaagtacaatgttccgtataaatgcagggtggtggtgtcgttattgttatcatgattatttctgcaggggaaggagaggaggggccagggtgggtggaggttccttccccagctttgtccctcctgccgtgtctgctaactgatcggcaggatgcctttgctaggtgtcgatagaagattcagaccagaagtattgtgcgaggacatcacgaataacgcaggcagaatgattcaaaaagaaatcaatggtcctaaaaatagcaaagagacgttcccagaataacatcctaatgggaaaaaagggactgaatgatgagttgtattgtaaaaagtcaagtgtttttaaaatatctgtgtagaaagatgagtgatcagtttatacaagggaaatgaaagggctggtgacattcagtctggaaggcccctggactcctgcccttggcagggcccacggagggtggactcatctctctcctgttagctgccacgtcttccttgtatattggaggaaagcgcttctgatgagacaatcttctggtagtaaaagtcacccaggaagtaaagagcatgcaaccacgataaaccattcacatatgttgttgtttagtccctcagtcatatctgactcttttgcaaccccgtggactgtagcctgccaagcttttctgcccatgggatttcctaggcaagcatactggagtggcttggcatttccttcttcaggggatcttcccaacccaggaatcaaacctgcatctcctgcattgacaggcggatttgttaccactgagccacgagggaagcccatccatgcatgatacacgtgtgtgcacacacgctggctcttgttttgtttgttgggttccttgtgttatatcacattgtcctgtattgatttgcatggatttggtcaaatttgagtgaatagtgctgaattcatagttgtcctcagtgcggatataaaaagcatgtagatattcccaatttcaaccagagggggcgagtgagtctgcagataagaatcctgaaattcaaagaagtacaaggactcttcagaactctctagccttgctgtcttggataatgaaccgtagggaaaattctgatggtagtccccaacaggagtgctctggtgaggctcttagatttgcgctgcccctccccaccatcaccacctccacagtgatgctctgttggttcattgcaggatctggggtcaagctggttaaggaagctatatttttattactgatcatagtgataaaagataaaagtttatctagtgattggtccaagagttggtttatcacttcagtacaatcatcgggggaccaggctctttgcattctttattctgctatcttaagcttcttggcttttattctcaagtttattccctcatggtcacaagatggttgccactgctccctaacataagaacatgtaaggaaaggtggaaaggagcaaaagcgtttctccttgtgctgctattttgtcatggaggaaaaatttccccagaaaccacagcagagttttccatcatatctcatagagagactggagaggatagaaggtcttgagctctggactcacacacaggctcgtccacttactacttttgtgaacctgaggaagtactgggtctctaattcaataactataaaatcatcatgataatagggcctgtctcctgataagggtgttatcagagttaaaggagttaata

SEQ ID NO: 46582 - DNA, 779 bp, Bovine  19866880835889
  misc_feature (1)..(1): n is a, c, g, or t
ncgttgaaataggcactggaatcccaggtagtagttaccgtgagtggggcatgagatgggaggggattgagaactgggagaggcgcaccaggagtttctactctgtttatattgtgtttcttaagttgtttggtgggctcatggtgtcccttataatatactctacaaccttttgttaaataagtcaaattttataaaaagatgcaggaaagctgggtcaaatgataaaggtgttttatctcagcaactttggctttcagttggttttaatttctgccttatacatttgtgtgtgtgtgtattttacagtgaggatttatataatcagaaaaatacagctgttttaatttcccagtgaaaatgagaaaatactttcctattaggctacatttctcttcatactattctttcaaatttttatcttcaagactcttgattttgcaccaaatcaaatactcttttaatgcagagttttaacactgtctttgatttttttttcactctgcaaatactggattcttctctgaattttaagaattaaatattgttttgttccattatttgaaatgatcatttgagacatggcctaggacaaacctgtagactgttataatttctagtgtttatttacagggcagagttgggtagaacagatgtttaaggagttatagtataatgtgttgtaataatgttacataatatgactagcattcatcctgtactattttcttttcaccactacccctctcaccaacacgctcctaaattacctaaattag

SEQ ID NO: 46583 - DNA, 2614 bp, Bovine  19866880869123
  misc_feature (1)..(1): n is a, c, g, or t
ntggtctctgctgtgtgactttaggctggtccttaatctgtatgagtttaaatttctttatctgcaaatctgtatccacagtaaatttatgagagaattaaatgaagtcatctttactgagcactttcaacatatttgtctgtatgtaaaatcctacctctaaaacagcagatataagtagaagataattaattctgatatactgtcattacttaaattagactaagctcattcagggcaaaggctctgttatcatgtttcatagagtctttttccacagtaaataaatatttattgaggaaaactgaatgattttctaaattatttttaattcacttcagcattttgtctcatgcctttgaagagccttgatttaaacaaatctttatcatttgaagatgttgtgtgtgtgtgtgtatgagtgtgtttaaaacaacacaggctcaatggaaagaggatgatcaaactgagcaattgggttgttgggggttttttcctgtttcttttttttttttgatgggggattattgttttaacaagtgtaagaaaactgattttcctttgtcacttataaatttatttctaagacaggattttagaaatctttagagcagtaatcacaacattttcagtacatgatgcctttccatgtttgtattttcatgtgcacttggatgtatgtatatatacattaggttttttaaattatagctttaattatacttacacagtatatcacactgtggttctgaaataggaaaacctacataaaaatcaatgctgcttattctttgtggtattggttactatttctctgatcttaggtattttgtaactgcatgtcttcttcagctatttctaaagagatcattctaatctcagatttttagaggatgtctatataagcacactttaactgttttctttttttaacaaaattcattccctttactaaactgctaaaataaaataaaaccgctttctaaggatattttctcccacaattactgcagcatacatcaagtatccagcctctatgcacgtgtaatagacctttgaaaaaggaggaaacatttgctaagtttttcagaagttagaatcaggttaacagtctgatgcttataccaagtctcttggaagacagaccgcatccgttaatctgtggtagtttctttttggctcttgtttttttctgctgcttacagatccaagagtatgtttagatgcaggaagtactccagagacactctaaatggtgccaagcaatgacgctagaagtgccccctgctgcccaaagagttttcagaagtaaccttggttaccctttctgaaagggttgcatttttccaaaagtttatctgcagtgtataaattttcaaaagctgttacattcttatgaaaaattactcgctgtaactttctgtggttgatgatacgctaacaaaaaccatttcagtattaccttcactagatacctgctagcttctgagccccgtaggttgttctgtgtgtgggcttctctgtaaatgccctctacttgaatttaccattatttgtggattttacatcagtgaagattttgaaggattctggcccagttcagtttcttggtttaatagaggttagagatttgaaaagattctttgatgatgattaaagtgcagttcacactgccacccctttgatttgactactgaaacagcagatgtggtaaagccacactggtctaagcaaaactaaagtgtgctgctccatgctcatctaggtgagttcagctcccataaatagcgtaaaggagtagtgggtttccctcctttaccatgttggaatttacattgtctttaatacaaagcaataggttttaaatacatagaatctgtgggtttcagtataacaaactgaacttttcttttgtgtcctaccacttgctctataatcataatcacagataagaaagacaggttacctcttttgttttaaattgttaaatgtctgtctgtattacagatgatgctgtctgctttatctgtaactactttttctaaaatgactgtgctcttgcatttattggcttattgatatgattactttaagactgagtaaaaccaatggataaaaataaacaagtatgaaagtctcttttaaaagtatcttgcatggatggacaactaggagtactttgcccttgcagcatgattctttgtggagccttaactcttacgtgtttagcccacaaagcacatgttaatattaagttgtttttaaagtgatggagttgcatcaccatgatttttctgtgctctgtgggatatcatgttgctttaatgtaatgagtcctgggctcctaaatttctctctccatgctggaaatgattacataaaactgaatggctatatctgaagtctaatgaatcttgagaatttcttattcttcaagaaaaatatcacaaagacttttcttattctttgaggaggagaacttgcatttgtaacaagtttctgttgaagatatcagcgattttaggttttatatagcattctgtttgaaaaacaagcagcctctctctgctgcaaggtctgtgtcttaactttgtgcagatgtgagctaaaagaa

SEQ ID NO: 46584 - DNA, 1229 bp, Bovine  19866880883213
  misc_feature (1)..(1): n is a, c, g, or t
nactagtgcttggcaaggaggaggaggtctggggaggcatgggactgaaaaggctctccagttctccccagtcctctttaataagtggtgggggctccctagatgccagtaccatggcaagaaccagtgatcaggccaacacagtcatctgccccacaggaaatctccagataactccagaaaactatcatgctgctgtatattagatgacagtcaattctgatggcatgtcatcacctgcaccaactgaacacccatatgccacatctctaaaacatttgatttctcagtggacaatcaaggccaaatctctactctggcttgagctgtggagcgacacagcagtgctgcccagcagtgaagggtactctggagcagaactgctgggtttgaatcccagctctgtcccactttccatgcctcagtttccccatctgtaaaatggagctaactcctattttgtaggggttatgaatactcagtgaaatgatttagacaaaatctctcagaacagtgcccagctataagtactataaggttggctggtaccaccatgcattcaggagcccacaaagctttcaaacctgccatctgagctaataaagtctagaatgcagctccccaggactttggggggaaagctgagcatctctcacaccagggccaaaaagagatggccttggatgttctcctcctcactctggtctgcagatcagaggcccttccacgcctccaggtccagggagccactgctgctgctgctgctgctgctaagtcgcttcagtcatgtccgactctgtgcgaccccatagatggcagcccaccaggctcccctgtccctgggattctccaggcaagaacactggagtgggtcgccatttccttatccagtgcatgaaagtgaaaagtgaaagtgaagtcgcccagtcgtgtctgactcttcgcgaccccatggactgcagcccatcaggctcctccgtccatgggattttccaggcaagagtactggagtggggtgccgtcgccttctccgagggagccactaggactgtactattgatttggaaggctgcaccccatgtctgcacaatgtgtccggatgtggcctccttttccatcaggtttgtgccagacggctctattaccatggggtgcatttcaagcctcctcactattatcagcttctcactttcagctgctgcaccaggggcaggatccttcccttcctc

SEQ ID NO: 46585 - DNA, 965 bp, Bovine  19866880912328
  misc_feature (1)..(1): n is a, c, g, or t
ncttacaaataacttcttaggtctgtttacctaatcttcatttattttacagcatttgtagctgggtttcttttcaggcaagtctcccacaaggaaatatgtttttatcattgtaaaagttagttggcacgcaaatgctgaataaagctgtggtgaattttagatgtgggaggtgtgtcagacatactcattaaactaagtgacttaccctcagaaaattacaaatcaccacaagtcaggggccttctgagtttgctcacagttgaaactatgaataccaatgttctactgctgccattttgttttgttttttaaataaaaacaacctcaacttcctgtgttacagctgcttattagctagaaggcttcttgctgggcagaaagctgaagttggaaagaatgtgataaaacctctgaaagcaaggctaaaaagaaaaaaagaaaaaggagttcggaggtgctcaatccttgaacaggaatgggaaagaaacagagattgagatgtgctcagttgttaaaggtcttccgtatgggctgtcaagctctctggtttgacttatgttagctccatggcagtgcacaaggcagggtctccacagggactctctactcctaggccccccaagtgcttttagctcaggagcaatagttgggatccattccttgttgagttaattctacttttgtaggcctttctctcatcagcttcactgagatataattgatatataacactgtataagtttaaggtatacaacttaaacttataagctaaggtgtacacctgacacacttataatagcaaaatgattaccaccacagccttagtataataccctcatcgtgtcacataattatcactcctttttggggatggaacacttaagatctactatcttagcaactttcaagtttataatagaatattaactataaatcatcatgctgtacattatatctccaga

SEQ ID NO: 46586 - DNA, 916 bp, Bovine  19866881026100
  misc_feature (1)..(1): n is a, c, g, or t
nttcccccataaggttatgtaagtgagatcttccttgcagagcttccatttggggaagaagtcactttttgataatcctctcatcctttttctgttgacttctgaatccttaatatacttgatatgatttagtccatgcgaggcataaccgttgatggagaattcttagattgagcatatgcttgcacaggttacactgtcatcatgggtacacagaagtaaagaacagagatatggcatatggataaagtgatttgtttgtcaaaagttggcaatccttgttgggtattttgctggattttgatagcagcaattcattgtttgcctaataggtaatttaactgcaaaacattttcctaactgaaatttgcagaaacatgaagcaaatataggtatccttatttagaaaatatatctggcactaaactctaatgaacattgcactgtaaaacatttctgatgctgattctgagcaggagcttctttggaaagtaactcaaaaacctcaaatcatcctcttccttttttctcccaagacagatcaactttatggcatggggcacatggtagattttcagtagagaccagttgattgattgatgtatggatctgagatgaataggggtgatttatgtaagtagactggaaaataagtaatattattaatatgtggtggggggggggggttcttcttttttttttcctctgcaggtttttgtcattcattggagggacactgtatgagattggaaagccagaaatgcagcaaaaaataaattcattccttgaaaaagaaggaatggagaaaactgcagaaagattgcaaacaacagtacacaccttacaggtcatcgtagatggtctcagccagcccgagagctttgactttcgaacaggtaaacgatgaatgtgaata

SEQ ID NO: 46587 - DNA, 1926 bp, Bovine  19866881029069
  misc_feature (1)..(1): n is a, c, g, or t
natggacattcactcaactgattgtgctgatcacttcatgatgtatataagtcagatcattatgatgtaccttatacagtactgtataccaaatatgtctcaataaaactagaataaaaatttaaacaaggcttggaaattttctttaaatcaatataaaattattccagacattttgatgactttggagcagtctctcactttctagtttgctcatcacttgcaaatggatagttagcccctcccactcactgaagtctgaggtgacttccagataaaattatacacttgtgttccaaacacaatttaaatgcctttcccccctagcttttcttttatttatttttttttttttctgtgattcctgtggaatctggtagtggaaggttggttccttgcaagtggcctcccagatccctgcggtttctctgcagttttctgagccaggtaacttcttgggaggtatattaaaacatttaaattttagataatacactaaatcactcatatcctgagaatagcacggctcagtgtatcatttggtgtcaaaatttcagctgatgctacctgctggcttgagttaactgtccgctggctggtccccggactagtcaggaggcctggaattcatggcatgcgattccaagtgtgagtcaaaacgcgcttgataaatatggagtcagagcagctgagactgtttcctcttgcctctgggatgcacaacctggtagactttactcgtgtctactcatgaccagtttcatcccctttctggcaacaggaaggctacactcttcaagcccctggagggtggcagagccctgtgctgtaagggggtctcccagcatgaagcacggaaaagcccaggcatggttttccctctcttcttcagcctcgttgatcaaggaggctgtgtttcacacagggccctcgtggacccctgagttgtcatctggaggacatttgctttgtagaatcactgggactggtgtgagtgaaaagttaattgtgtgtgttaaaacactgatatgaatgaatgagtagtgaaggcttctgcagaaggcataggcacccactgcgtcatcctggatagtgaggtccaaggttagaggtatcaggctgctggttacccacaggcttctgttcaggtctgcaaggatatgatcagacctttagtgtgaatatgaacaagtgcaccatattcctgggtggccggagccatggagaaacaaacaaatccaagccacagctcctttgcacagcagtgcctgtctgagacctcatcatccctaagatgaaaatggataccagcctatgtggcatggtcacctccctggtggagacacgtccttcttaaaagaccaaggcagctggggtgggtgaggagcagagagagatgagcaagctgcctgcatgcagacatgacatgaatgctgctaagtcacttcagtcgtgtccgactctgcgaccccagagacggcagccccagaatgctctctgcttttcaactctctcttgctccttcagactctgcagtctcctgttaaggttttctcttttaaatacctgtatctgagccaggcagctgcttttgcttctggcctccctccctcctcatcacttcgcccattctccatgtccctacttcagctcctcctcctggctaaatttccagataatggttctccctactcacctcactccttgagaccctttccgtttaccttccttgagggaagttaatccactcatcaccaaacactcagaaagaatcccaagaggaagggggcagtgccctagaaaactctgggttggggggtaaaggatgatgcctcatggtgctcacggctccaagggctgccatgggactcagccacattccccatcatttaccttcttcctccaggtcctgaggcaaagtctatt

SEQ ID NO: 46588 - DNA, 899 bp, Bovine  19866881033278
  misc_feature (1)..(1): n is a, c, g, or t
ntggaagggaaaactgaagtcgaaggattcgtggcttttcacatacaaaggcatcctcccatccctcctggccagccagcgaaggatggacaagtgcacctggaggctactgcccaggtgcaaggggtgggtgtggggcaagctgcagaatgccccagaacaaagacacctccaggggcctcctcggaggtcacccgctgcctccagggcagattaaggaggactggagatggcgcttggaggaaatggtgctgttctttgggaaatcaattcgtcccacccttaatagggtgttttgccctccctctttgggagttccaggcaatgggcttccaggtctctacggttctgaaagaggcggcccctttgccagcccatgttccttcaaacagcccaggccccacaagaatctcttctgctctctgccacgtttcctttcccttttctccctctttcaggctctcccgcccctctctatacccaagctcctttcataatgaggctggaagtggaactttcccccactcccttactttgagatttcttttttcccagtgacctgggctgcactttacccccactccctgcctgccaatctcctcagggttagggcctttctctatccattctttcaggttccccctccttgagagctccaggaggccaggccttccagaatctgatctccttccaacactgcagcccccctgaggaggaaggaagaagcctcctccgaatgaatggccggtaaggaggtttttaatttgtctggagctccaagaaaaaagcctctgagctgcggccctccctcacctcgtttggaagcccccaggccttcctggtggccactgtcacctctccatcccaggccaggtccacgggcagaatgggtggaggag

SEQ ID NO: 46589 - DNA, 1576 bp, Bovine  19866881033364
  misc_feature (1)..(1): n is a, c, g, or t
naattggaaattataaatcctttgtgaacaaagtataatcatgctgaatttcagttttctagaacatcctaaaatgtcttaaaatgtggacagagttggatacttcacagatgttagagatgaagttagtaatttatttaatgattgaaaagaagcatgtttataattatgtgtttgatattattaaatcacatcaaaatatgagaaggaggaattacctctaattaaataaagttggttttataaagttcaggatattatgttctagtttatgttttgggaacattttatcctacacctgtacaatggtagatgttctattttttttaatcaactttattacttaagaagttcacaacaaaactgagcagaaggtccagagacttcccatatatccttctccgtaaacttgcataaggtcccccaatattaacatcgcccaccacagtggtacatttgttaaaattgttaaacctacattgatacttcatgatcacccaaagtctgcagcttacattaggattcactcttggtattgtacattctgtgggtttagacaaatgtgtaatgacatgtatctaccagtgtagaactatccagcctctttctaagctatgtcagttcatctcaccctcacctctaatcctcggcaaccactgacagttttattgtctccttggttttaccttttctagattgcagcagtgttggaaacacaatatatagcctttttagattgacttctttcccttggtaatatgcatttaagtttactccatgtcttttcatagcttgatagctgatttctttttctgtgctgaataatatgccattgcctggatatgtcagtttatttatccattcaccactgaaggaccatcttggttgtctccgaattttggcaattgtgattacgtttaccataaatacccatgttcaggtttttgtgtggacataagttttcaagttttttaggtaaagactagggagtgagattgctgaatttcgtgggaagcgtatgtttagttttgaaaccaccaaagtaaactgtctttgaaacagctgtgatattttgtatttccatcagccgtaaatgagagctcctattgccaacatttggtattgttaatgtcctggccaccgctttgtgttgttagtgttttcgattgtatgtggtgtgtagtggtgtttcattgttctttaaatttgcatttatgtgaagcatctcttcatatgtttatttgctatctgtgtattttctttggtgaggtgtcagtggcccctttttttaatggattgttgtttccttactgaaatttaagtgttctttgtctattttggtggctgtcctttatcagatatgtcttgcaaatgtttctctcagtatgacttgtgttttcattctcatagatattctattttgaaggatgcaatttaaattactttgtgaaaagtaatattaataacaaaaggaaagtattagaccatcagtaagtgaaggacttataaaaagtttattaatcattgttgctatacatattatttacagtagaatataacattcctgttataatgt

SEQ ID NO: 46590 - DNA, 856 bp, Bovine  19866881043128
  misc_feature (1)..(1): n is a, c, g, or t
ntcccagggcacagtaagttgccagggattggtcccatgatccttgagggaccgtcactggcttttcaccgtcgcatgtacaccctggagactctggatctgcctggcacacagtgggcatccaggagatgttcgaacgaaatgaccaatgggattagactgtcagcaacaactgggaagtaccaggccaataagaaaatggccctcttcttcctctttcctcccgtgctttgcttccagcctgcttctttccctcctttctttgcaggggaagactcatggcgttctccagccagaagtcctgggtgctgtagcctccaaagggctacctagaagcgacagacctaacgctctgctcttagcaattcgagatctaactgcctttagcagtaccaggctcccttgggctgcaggagagttttccaagttgagctattctcatttttgtggggctgcttctttagttgcatttccttagttactttacaaaaatcctctgtaggcaacgtgtagatcaggtttcctgtaagaagtgacttttttttttcctttctttcttctttccattacctgtgagaaattctatccgagagtagggattcctggcttggcacttctctctcctgcagtatctatttttattaccattaattacaatgcatcagccccactcatcagtgatacccctttcccctggctggtgactgcgcttggctctcctgacttgggtggctatgcctgggccagagggcactcccaccccgccattgaaggcagccacacagggctttccagtaagtatgccttgaaaagggaaccggaaaaagccaagatgttcttaactggaaatccaata

SEQ ID NO: 46591 - DNA, 1558 bp, Bovine  19866881044267
  misc_feature (1)..(1): n is a, c, g, or t
natacaacagggatgcgctaaggactgagtagaatgatttctatgctgcaattctgacagctggaactttgctctgatcttacagtaaacatggggggtttttttgcaagctgccccactcccctgcacttcagattcctcacctcaaagatgattccttgtactcttctcaggactgttttaaacataagcattaatatctgaggatagctggagaaaatgaaaatgttattctaatgttaaattaatttgcattccaaagtggagggattctgctcgagccagccctcccttccttttccttctatccatttagcaagtgctgagtgccaaatgcccttgttgggcctgggctacgctgggcttacccgcacttcacagacaatctccgtacctggtttgactccaccacctttcctgcctagtggctcacgtcgtctcacctcttgtaaccacctgctgttcacagccttggggcaaacagtagtctacccatttcatcttcatcatccctgcgtgaaaccctgaggaagaaatcagctcgcacactgcgtttcaggcccactgttacccccatatgatgaaatgtacacagagaccctcaaaattggtgttaaaagcacataaacctcttggattgttgagattctagcccaagcagggtgtgtgtgtaatatcactaaaagcaggtatgatggataaaaatgaatgatggccccttctcaacgtaaaccaagctgctcatccctcagggttgtttataaatagaggggagtccatttgttcggtattccatggacaggccggcactcaatttagataacgaccacactttgtgcccagccatcactctctggcttgctgggtggtgattaatcaaacagtgttttggtttctcctgatatacatctagttcttccggtttagagtgagctgaagatggcttcaacagtttacagaacagccctgggccagtacattagaagggcgtgaggatgagcgccttggagggcctatcggggtggacattccagttggaattatgagttgagagcagctgagtgaatatggatcccagaagtctggtccccccgaggcctggccttctgggggtatcactgacttattatggtcagtctgagagagtaaataacacttgtcattggatagagatgcatgaagttgaaggaacaccaaaactggattagtcagaaggtagcttttcctgataacatactcagatactgcccccagcctcctcagctccatcagcaggagcaaggaggggtcccagattccatgtgctcttacaagacactcccaccccagcactcacagcctcagagccatagtctgccttgcagaactttctgctcttcactcctatttatgtcaaacaccccaaggcatccaggactcccagactatcctttactctctaactctcccctccagatagatccacgaagcccatgatcttagcctgtctcccactcccccaattcctcaagctctctggggtctcatagtccatcatgagtaaaatcccctccatcct

SEQ ID NO: 46592 - DNA, 1192 bp, Bovine  19866881064151
  misc_feature (1)..(1): n is a, c, g, or t
nctcccggccttgatgccttattgattttcaatgtggcttgactccccaggtgggcagacttcaaaaacggtctgtatttttctgctgtcatgtttccatccctgttcgtttccatctccagcaagattctgggtatgttggagggcagcttttcctttttcagctttctctcaataattttcttctggacaggattttagacagccagggtcacttctggggggtgtgtctcccattgtaagtaccgagttagaccagctgctggtaagtgtgagggagaagaggcagtccttgcccttaagggcttcactcccatcagtcctaagtgtggccatcaggcaaggtgtagccttggaggggacaggtctagtgacttgatatggcctcccagtttaacacatgtgcagtttaactgaccacaggccaacgagtgtttgtggagctatagtatgtccagccttgagactagaagattcactaaaatgctgactacaggctagatgctgggcttcatgaatactcactgttagcgttcctgaaacttcatgtaaattgtctactgctctgtgaagcaggttgttcttggctcctcattataaatgagtcagctggttttgcaggggtgtcataatttacccaagctcatttagcaggcagatgacagagcaggatctgaccccgggcctgctcttgctaccataccaggctgggctgcctgtgtgcctgtgtgtgtcacagggaggaggaaggaacactggaaagttttcgtctcacaggcagacacacccatttgtgtggaattaacaagcaagacgaggtatgtgtgtgatgatagtaacaatcactattctagcacctaccagggactggtcaagtgtttcccaatgttaactaatcccagtgaggaaacagaagctcagagatgttgggtaactttcccaaggtaacacagctgggaaatgtcagagttgagattcaagcccagagtgcatcttaaacacttgattgagttttgggcctgccagagagggattgccagcaagtgcggagtgagcattacctttcactgaaagattttatcctgctctcccacacttgacctctcctaagcctccaagcgcaggggaagctggcagctggggcctggggtgtcacttccctttacagatgaggtgaagcacagagatgtca

SEQ ID NO: 46593 - DNA, 1547 bp, Bovine  19866881084141
  misc_feature (1)..(1): n is a, c, g, or t
ngaacatcggcataggaggactctttaatttgaggagacagaggttgctgtgaggcagcacacagtggtgtaagggactcggcagaaagaggaaatatggagaacaagcttaggttttttaataccgatatgattccaaccccgctcctcagctgtaaaacgggcatgatgctgcctaagtaactggtatgcgtgcgtgctaagtttcttccatcgtgtctgactctttacgaccctatggactgtagctcatcagactcctctgtccatgggattttccaggcaagaatactgcagggggttgccatgccctcctccaggggatctttacaatccagggatcaaaccagcatctcatgtctcctgcattggcaggcaggttctttaccaccagtgctgcctgggaagccccaagtaaccagtaggctgtgaaacaatttagccaaaatggacacttggcaaagggtttaatacatcatacattccaaccatgatcatttacttattctttggtcatcaaattcaagatggtaaggtggatcctttggaagagaaagatgtgcacactttagacagtggaagtcagcttctgaaattccttctttctaggtgtggctccgatggaaaatacagagagtgcactggagaactgggacatatcatgaacactggatgctctgcctttcgaggctatgaagcagcctcctgatggtccccacagcaaaccatgcctgggtgtttcagcagtcatgagattttaggtcagacagaacctgggtcctgttaccgggaggtctttcttgggctctgactttgtcttcctctggcctgctaatgtgacagtgcccaagcttaaagtcaacaggtggccaagagtggcttcaaaagtctccttacagctttgggaggggacttggagatgcctaaaagatagaaagcagagcagaccccatagagtcactgcactttgtcagttagtcatgacagatggcaccaaagtgccttgtgtcccctcctctggacttgtcccctgcttgtggccttctgaccctggacagcaagcctcagctcttccaatgctttctccactttggtcaaggccagatgcttccctgacagaggcagaatcctccttccacatgggggtgatgacctggccacagctccaacagggtttgtgttcccagactgaactggatagaatttgttcagtatctgtttagcttagacaacccccactgaacatcaggaacaagtcagaagaccagtgatgtttctgcaaaacaggttttgcctgtttgtttttgttttactgtttcaacaagaggaaaaaactacagaattttgtagatcaaaccttgttttttgtgaagtttcctttatttagatcataccttttttcccaggaagctagtaaataaacagagtgtgtcccagaggtaggtgtggaggatcaaccacataaaaagctgcagtggtctgcttggatcacaccgcacaggtgagccaaggggaaggacaggctgcactgaatttagttttccata

SEQ ID NO: 46594 - DNA, 1291 bp, Bovine  19866881114047
  misc_feature (1)..(1): n is a, c, g, or t
ncatctttcccgttctctccatccccaggaaatctggttttcctctgagttagggtcaattttagcaaaattataaattcagtcaagatacctttccttcttcccaggttgtacccctcaagcccctccaccctcattttcaagaaaagactctgtatcaggcattttatacctttttgttaactcaaatttttgcattcctttcccccaaagtatttgcatttcagccaggtctattgttaaaatattttgaacatcaaggagctggctggggaggattttagagacaggtggcctttctggctctccagcatcactccttcttcaactccaagagacagtcttctgatagagtcacctctccttcccctagcagattgtcacctctttcttacatttgcatcagtcactggctaaacagcaggattttcatttaataataacacatcttaacagaaaatagaaaatctctataaatagagatcaagtaagatgacagtggattaacattttaattaaacatggcaattctaatcatttttatcattatagaaatacccaacattttgacacatttcaggtataaattgatggttccagtccaatggcaaattgaaatgatttttcaggtgatatttgtaagctttcagtggcagcaagggatggtattcaacaatcaaagctatagattctagacattcccattcaaagtaaccaacccagggactcccctggcagtccaggagttaaccctccatgcttccactgcagggggctaatgtttgatctctggtctgggaactaagatcccacatgccaagtggtgtggccaaaaaacaaagcaaaacaactcatcctgaagcctccctcccttcttatacggctttaaaaatgatctcccctgatatcacacacactatcataaattaacacgatgctttatgatttgcaaaactcaaaccaaatggtactttgttttccttggtagaacagcagactacattctctgactagatggcatggcaaacagcactgacaaagtttattcgtcttagcagttcccgattgactgaacgtggaggacatgatttagcatcatgcttctgcagatcctcacagggcactctgcaagcagctattcattgttcctccagggtacagaatccaggcccagagcagtcaaggaacttgcccaaagacacactgctagaaaggaccagatctaggtctggcccccacaacaatcaagaatcagaaactctttgattactgtctttcttccccacagaca

SEQ ID NO: 46595 - DNA, 1569 bp, Bovine  19866881114881
  misc_feature (1)..(1): n is a, c, g, or t
nttggagcaagcggctcccaggtgacatgagtcatattggcatccatcacactctgaaacttttttggacatcattttccacagacactatagctgggctcacacccagggtgaatgaacgtggtgggtgtgggcaaagagggagcatggagttactgcagaaaaggtactgttaagtggttctttggggtgaggctgagaacagttagaccggcacagatggggtgtccggagaagggaaaccagcttagctagacaggcccctgttttacaatgttataaaagacgaatcatgccagcttgaaaagttagccattggccaggaatctgaaaaattaaatgtccagaaatcacttgcaaaatgacctcacaggccccgatcatccccaaaattgatcagacaaatggatggaaacagatcatttcacgttccttgttgttggttttgtttttcttcccccgcccccaggcctctgctccacatcctccctcaccatccgcaaagaaccaaatttggaaagttttcgattggcttttggcgctctgatttttttagagggaaggaaaacacctattaaaaatgttcgttccaggtggatggttgcttccaacagcctccagtgccagggaaatgaatctaaaatccccagtcccttgcccaaatctcaatggctagtaattaaatttccactaacagtttgttttatcacctcgggttagcttgttgacatataataggtgctgctgagaggtagagctagttaatgattttcttttacatattgatattagtacctggagagggaacatctcctcttcagaatatgattactattttgaaatcttaagcacaggagggaaatccgcagctataaattaaacaagaagttctgagaacttatatcttcagttcccatccagacactaatgcatctcatttactttgtgctgttcccctgagttatctgtgtcacacaggcgactcttgcatgtcgcgttaactatctattgaaaaaagctcgaagtgtgcttgtaacggtgccctgagccaggagacaaggtagaaagctgaagaggaaaaactcatcactgtttcaagttgcttggatattttaattcgaagaggaaagaacccatgtcagctaaggatggagctgtaattaaactgatttcacattcacaattgtctccaaatcggctctcattgattcttctcatctttaaactatatgaaatcaattatctctgcaaaccagtggtaaggatcatacgccagcctcttactcctaaagtgaagaaatgatttggaattcattattgatacgaacaactcttccaatggaaagctccttctgattctctggggggtgggttcaggaaagcatggcctgcccctggcctccagtttggatgcccagggcgagggtacggtctttgtgtgacaaatgctggggggcaggagaggagggcatgacaaagcggactttgcctccagagtggccagccttttaacgtgtgagactttacacacagtgacaaacgtgtccctggcataccccagagtgacaa

SEQ ID NO: 46596 - DNA, 1615 bp, Bovine  19866881125797
  misc_feature (1)..(1): n is a, c, g, or t
naaaatgcctgaaggtgtaatgtgaaagtgattttatttcatatgatggaatcatccaaacagattccagggaattccttggtggttcagtggttagaactccatacttgcactgctgagggcataggttcagttcctggttggggaactacaagctacacagccaaaaataaaaagtaagcagattccgtttatgctggtgggtttgtttttaaatcttttatgttaaggttctgtttattcctgttatttattcaaatcttctcaagtattcccagaatcattaaatttcaagccacaggagaccttagaggtcatttacttcacactggcaggtataagcatgttcatggcctctgctagaagggaggacagaagaatctgtggggaaggcttccagaacaaagaatcagagtggcggtgttgctgtggtcatgatccaggaatgaggaaacaggcccattgcctgagctgcctcatgtaaatagtaatggcaggacgtgttgcacagggacagataggcatttgaagttgaactggaaagtacactttaaacttctgttagttattacctagagaatgttttgtaagtctatagtgctttacttgttatccttgcgtatctgattcttctgttgtggttcacatctaatgtttaaattgactcagtgttttggaggtgggaggagaagaagggagaatggtcaaaaacaaacacaacagcaacaacagaaacaaacttctccgttggttgggatgcacaatttggttatgggttgtcaataagaaacagctgtttgtttgttgacagcctgccttgccttacccataatcaagctgtttctcatcatataattaccagatctttagtatatgaggcttgtagatttatagctggttgtgtagcatttgccaaaacgtcatagtttagataaaaaattagtgattcccctgtagtgattctactgaaatatggatgtggggttgtaataaaagaaggatgctcgaggaaagttctgacattcatttcagacttaagagaatgtcgagtgttttgtgtgtgccttctaacgagggagtttcagtgtaacttccctgtcttgtggactctactgccagtcagaaaaggattctgtattctctcatttttttctttctgtctttctctttcattcttttcttccttcctcctcctttccctctctctctctcccccttccttccctttctttctttccctgcttttccttcccttttcttcttccttgtctttcttgcctttgctctcttttcctgagtggtgtgaggcaggactgatgtgggcaccacaataggtttctttttcgtgcagaaggacacacttttgttcctttgttctttctttttctgtcttcttacaaccctgttccaatgtggaagccaagaatggaaggaaagttaaattttctgagagtccaaggtgatgttacagcctccttggatagttttactagctggggaaaaaaaaaggctgaatgtgccccttacctcaagagaacatatcgaggacattttacaaacgaacccctttcaatctggattatgctgagtgaggtccattttgaaataagagtaa

SEQ ID NO: 46597 - DNA, 1391 bp, Bovine  19866881147176
  misc_feature (1)..(1): n is a, c, g, or t
nttctgtgtgttagttaaggattccaggcaaagcagcaacatttactgatcacctatcacatgccaaactctatttcagttgttttcgtgtgatctctgttgactggtaatgatgctctgtgattatctttgttttcatagacaaggaggctaaagctaagagatattgtgtggcttgctcaggttcacacagttgaaaaagagtggggctaggatttggatataaatattgatataattgactccaagtccgacgtacttgcttctacgctacaccaattatctattgcttcagtaatgctgcatgatgcatgacaggcaaccacaaaaccgcagtggcatgcaacagtaagtgcatattgttcacccctctggggtcagctgggagtcagccaggcccttctgctgttcttggctgggctcagccgcatgtcttgtggttgactggctattggctgatctaggctggccttgtctggggcaaatggggtgactcggctctgctccacatgtctttcatccttcagcaggctagcccaggcatgtccttgtggcagtgacacaggtggaacagagcaagaggaatcatacagccccttgaatcagataggctgggaatagcacacagtcatttctattggccaaaccaagtcacgtgatccagttcagcatcaagaatgaagaagacactcctcctcttttatggaagaatcacaaagttatgttgtaaagggtgtgaatacagggaagggtgaaaattgaggccaatcgtatacgacaagctgccttattcaagcaggtgttctgagggcttcatctggtgggtggagaggaggacgacaaatatctgttgaaccaaaataacattattccataatatgttattagaggtgtgtcccattcctagataaatttgagagaggctgcataaatcaaactgaagatttatctactgctatacttctcagtgccttcaatatgtcagggtgcattgtgatactagatggagagagtattcaatattccccaaaatcattttttcatacagcctacctgttaacatcttttagggaaaatgttctgggaaaccccaattttgaaaaaaacagactaatgactcatgaaagtgaaaatcgcttagtcatgtccaactctttgcaaccccatggactatacagtccatggagttctccaggccagaatactggagtggggagccattcccttctccagaggatcttcccaacccacagatcaaacccaggtctcccacattgcaggcggattctttaccagctgagccacaagggaagcccaatgactcttagggtgacttttaacaccaagtcctactatttgacactatcctgtaacacgggcacgcactctgg

SEQ ID NO: 46598 - DNA, 2021 bp, Bovine  19866881168513
  misc_feature (1)..(1): n is a, c, g, or t
nattatagcttattgtcattaattcttcagttaaaagctgtgacctcaagaaagtagatttctttccatggtgttctagtgaacatgtattctgtagacagatcacctcaacagattgggccctcctaagttccttggtacgtttttgctttgtccttggactgtaattccccataaaagcagtgcaagtgattaagtcattggctgttagtacatctatttaactcttagtgtaatgttgtaatacactatgaaccaggcctgctgctgttgctgctgctgctgctaagtcgcttcagttgtgtccaactctgtgcgacccaatagacggcagcccaccaggctcccccatccctgggattctccaggcaagagtactggagtgggttgccatttccttctccaatgcatgaaagtgaaaagtgaaagtgaagtcgctcagttgtgcccaactcttagcgaccccatggactatagcccaccaggctcctccatccatgggattctccaggcaagagtaccggagtggggtgctattgccttctctgcctagtaacttcttaaaggaaatttctatctgaattccaacttgggctcccataattatatttcttactacaggaaaaatcatatttcttccagtttctttgactaagctttgaggatgatagagaagacctgaggagtgactcattaagcagtgattcccaatgttttgtccacccccacacactctgtaaacatttcagacttaatcatagcagtacccctcagggtggatggggatcacctccctccttattgtctgacgcatggtgattctgacgagtgctccttcctctgctgggaaatactgctctagagcccagtgcctctgctgggaaataccacttctctgtctggaattgtctgtgtgttacctttctcttcaaaggaagttctttttacccatgctgccttttctattacctactagttgaacattgcccgtaacttttaattatgatttttcttctctctgactcattaaggaatagaatgttgcctcatagccttcttctcattcctgaacagtccaaaattgagaaactgcataattaggctcctttctatgccttttttttctttttttcacttaagcctacaaggaaatgttttaaaagacatttaaaacagcctgcatcaggttcaccctgaaggctttcttaacatgcacatcccttggttccaaaccagacctaccggggcaggtgggtgtgtcccacttcccgtctcttctccttaacttttcagcctatctctgctgttgacatagatctacctctagtagttgaccctgagtaggaaggagggggggaaggtttcaaagcacaggaagtctcttgaactatgggaataagttttgcaaaatgaagtcaggggttagttattctatgaaactctgcttcacacccatatctcataatctgtgtaaaagaaagaaatgaaaataaccctacctatgacagttgtttacaggtaatagaatcctgcttctaatgagcttaagcagaaaagaggatgcaggggcctttcgaagaatgcaaaggacaaagcgtgatcaagtctcctaaggccttgaaccagaaattggaaaactgaggacttgaggaagccattttctcaattttctctatttcagagatttcatgatcacccattttcaccccttctctgtttgagttgttgttttctcttggcagatcagaaagcagatcagatttccctacttctttatgaaaggtgggagatgatagccccacacttcatttaccattagttttagctagtgaggagggaaaagcgtacagtgagaacaggttcccagctgccatagggtgagtggcagaagaagagcagccaggagtaaaagtttcatctgtaaatcggtagcaggaatgtccatgagatgtttgaatatgaaatggaagcaagctttcaggtctagaactgttttatggcctttgaccgtattatctggg

SEQ ID NO: 46599 - DNA, 1095 bp, Bovine  19866881210022
  misc_feature (1)..(1): n is a, c, g, or t
naaaatggtttatgttgagagagtagattgttccaattggcagtggaggaagaagcaacggatgatgtgggtgggaagtgggcttacatacctggaaatcattaagaacaaaagtgatatgatcaagacatatgcttatcttatcaggctaaagccctgacttttgggtccttttccagctctgggtttttatgttactaaatggtgaagtcaccaggtgagaacacagactcaatgcctgtctctgtgaccagtttacactgcagtggcctgatttgggttcctattctcaatgaagctgtttcctcatctgtaaaatggggttgatcatatttctggtgtattagttaaggtcctccagaaaaacagaaccaacagaaatatctgtatttctgagagaagggagaggagagagagactgactttacagaattggtccatgtgattgcagaggcttgccaagtccaaaatctgcagggtaggctgtcaggctgaaaactcagggaagagttgctgcccaagtccacatgtggtcagctggcagaattccttcttgctcagggatggtcagactttgttccatattcaggcctttaactgattgaaggagagtaatctgctcactccaagttgactgattcaaatattaatctcatccaataaactaccttcacagaaacatccagaataatgtttgatcaaatagctggtcactatggcccagccaagttaatttgaaaattaccccttgtcacatctggtcacatgggacaggacagaagctttaactgtgagaagtgttttatgagtgtaaattgctctatactgccaagagagagggaagctctgtgggttctgccctgcaccccaagtgagagtgtcctggcacacagagggttaaggggcccctgcctctcctgctcctccacctgttgtctgaactgtcactatcccctccctgaccctcaggtgaggagggactcaaatgggggccgaagtcatctgacatctgatacttccttcctgcctggattagagtcatattgtcaatatcatgccagtgtttaccaaattaacaaaggacttcaagttaaa

SEQ ID NO: 46600 - DNA, 978 bp, Bovine  19866881240493
  misc_feature (1)..(1): n is a, c, g, or t
naaaagaatatgaaagtatatatatttgtatgtgtaactgaatcactttgttgtatagcagaaattaacaacatagcaaatcaactatacttcaataaaagtttttaaataaataaaatgccatttgtttgataggcagtatcttttaaaatatagtggccagggggtaaactaataaaaagatggagacagaaagttagaaaagcagtgatctttaggtatggcttgttgtctaagccatttaattaacccaaagttagaagtgtcatgttaatagagcaaattattcctcagcacttttgtgggctttccaggtggtactagtgacaaagaatccagctgccaatgcaggagatatgagatgtgaattcgatcccttggtcgagaagatcccctggagaaggcaatggcaaccactccagtattcttacctgaagaattccatggacagaagatcctggcaggctacagtccatggggttgcaaagagttggacatgactgggtgactaacacacacacacacacacacacacacccctatttaaaataactattttatttggaacaaattgcctctggctctgaaacacacaaacagaatctcttatattataattttaatttttagagaagtggggtaaatcacaagaaaaattcatagcagagatttgttatgggaaaatatacacacacactgaaaatcaatatggccaccactataaccagatggggcttcccaggtggtaaatgctaaagaaatcacctgccaatgtaggagacacaggagacatggattcagtccctgagtcaggaagatcccctggagtatgaaatggcaacccactccagtaatcttgcatggaaaatcccgtggacagaggagcctggcaggctgaagtccatggagttgcaaagagttggacgtggctgagcacatacactctacactcataatgagaataacattcctgctgtg

SEQ ID NO: 46601 - DNA, 1468 bp, Bovine  19866881247257
  misc_feature (1)..(1): n is a, c, g, or t
ngaaaagatggaggaaggagaaggccactcactgtctagcctggctgaggagaaggattccaggctacagagtggaccaaagttgcccatccaggcacagccagaggtggggggttgggggattcataggcgttttgaagtagatacaaaataaaccccagtcttcctcggactttctgtcgatagcatcactggatctgacaacttctgcaaaggcggagggtcctagtggggctggggagagaggcctctgcacaggcagcctaggaggggacacagagcctccctgagacccccagccggcctgctccctagtggccgctgaagccctgcagtgccgggcaggatttccttctgctgatgggagcgtgcccctaacaggctgcatatgcctgccagctgttgctctcctcctgcccccgcagctgagacaagaaaagcattatttcctctggccttctcatctccaggcctctataacttcacaggccttcttcaggcatcgttaacttggcgctgcttctcagggtgagtccctctttgctcagaaaagcccccttttattctccccatctcatttgcctttcaggttgacgtggggttcctccatgaaggggctggagtatgccaaactttaacaaggatatttggttttcagaggctttatctgtatccttagtgattctgaaggggctgttctgtctacatgccagatcccaagcctgggagaattcctggtagcccaagaacaaacattttttgagtatgttagcctctagtctttacatgcaccatctcattttaatacagaaacccagccaaagagctattttgaaacttatttcacagataagggatctggatggtgggggaggaaaaagatgaatgggagatatcgccaccaagaagaggctgaactagccctgcctgaatccatgggctaaaataatccaggtctttccacaaaggacactgggattgtgccaagactttcccattcttgtctttgctgtgccattattaaggatggcccggatcaagtccacagccctctcaaggctttgcttccctctgcgtcatggatggggtgggtagcacatcccaggccctgccttccagagcctctgcctcaattccacctccgaataactgcaagaactgggccatgcccaggctcaacctgaagaggaacaggaggccaaaacccagctccagccatatccagttactaacaaaacacttgtctttcttcccgactgaaacctggatgtgcctgtcgcttgaggctctcaaatttttaaccctttcacagcagctgattttttcccccaaagtgcataaaacacaaggctcagattggtcacacgttactcagcttcagatctcacccaggggagaaagatctttgggagcccaggcaggacacatcgtttttgacttaaccagtgctaacagttcacttctgtcc

SEQ ID NO: 46602 - DNA, 1033 bp, Bovine  19866881275995
  misc_feature (1)..(1): n is a, c, g, or t
ngtttctgtgtggaaaggactgatgtctaaacatgatggctggaaaccaatgaatctttcatccagttattcactgatacctgtgatatactcaacaagtaaagaggcagagcccatctgtagaaacccagctacctgctttggaggaggaaaaagaggtcccacctcatcttccttacagccaggccccaggggcacaaactgtcatttcaagatgcagaacaaacttcatgaaataattcttaggacctggtgagctccaaggggcaccatcctgtatcagccttctttggaccttcttccaaggtgccgaatgtgccagtgggagggggcactgttcaatccaattgactgtaccttgatctgcttccatgatgcctctgcttgaacctggaggaaactggctggcattggaggagaaaaatgggagtgttctgatgataaaaagcaagttaggtcggcgtgctggggcagctcatgctttatgtagcagaactgattgagcttcatgattcaccctccccttggccttcagcccttgttaacacttccaggaaggaagctgtccagagaaaggaggggagagagggagggaatccaggacgattcccaccatgagaaggtgccggcctgggacgggggagggcggaacccgcaggctggctgtgagaggggcagggaaggctgggtgctttgaggccaaagtgctcattatgagaactttcttaatgaccgtaagtcctgagggaggcatgtgagcaaagcctggcgccagccatgattgcacggggcctcccgtccagatggcaaatgtgtagggagcgagggaggagagtgagaagagaccgcgtggctgctgaaggtgactgatggccttgggacggctgatctggctcctgtggggtcaggttttactggaacgagacacaaagattagtgactttcatttaagaaagaaccccggtccccagtttcgggaacaaagtttctttgggttctttgagagtttcattgattctccagacctgctcat

SEQ ID NO: 46603 - DNA, 956 bp, Bovine  19866881422521
  misc_feature (1)..(1): n is a, c, g, or t
nttttaggcaagaggattgttaactaaactggggtgaactgtcaaacgtgcatatttagtacattgggggtaatccagcttcaggcctcaaaagttgtgaattctggctttgactccgctgctgtctaatttctgtcaccctggacaagtcatttcatctctctgagcctcagttccctcaactgtagaaatgagataataaatatctcttgttttatagagttacaaagatagaatggcaaataatttgaaagtgctttgtaaatcacaaagcacaaatatgagcattaagtactatcattaatatagtgactgggcagtttctttgctgtcctggggatgccccatacccactgagtctctgagtctttggccatggtctctatccacttggaaatccaactttgttaggtaggattagatttggatagaagaacagaaacccaaggcaacagtggtatgtttctctcctctaatagtctggaggcacttcagggctggtgacttagccacttagtatgggtgacttagactctttgttttgttgctttgctgcgcctgggttgccatttccagggtcaccttatggcccaaggtggctgctagcgttccagccgttacattcacatttcagcaaggaagaagaaaagacagagagcatcctttctgtctttaaggatattccctgtctggtagttgcatatgccacctttttatatatttcattggccagaaattaatcatatggtcatatctaccttctggagaaactgggaaatgtggtttttattctgtgtggccatgtgcccagctaaaaatcagggttctatttttgctgaataaagagggaagaatatttaggggagagctagtatctctgtgaggcttcccagatgactcagtggtaaagaatctacctgccaatgcaggagactcaggttccatccctgggttgg

SEQ ID NO: 46604 - DNA, 1318 bp, Bovine  19866881559710
  misc_feature (1)..(1): n is a, c, g, or t
nctgataatttactcattaatcatattcatgtgcatcttgttatataacttcctagatcctacagcgcccagcacagagctttgcaaaaaatgggccttcgaaacgatatctgctagatgcccaaagtaagggaggaaaagaagaagggggtaggggtaaaagatgaattgcaactaatcttggatattacattcttcaaggtatactatacatacattaaattacattggatcgctttctagtaattacagtgctgggcttaaaatggtttttagaaaggcattagaatttcctactttaacttaatcactgtgtttagttttcccttggaaggcactttatttatttaatgtcacaatactaaaatcatttcattctgcaaggttcaataaacagaaaaaaaaaaaaaaaaaccctcaacatctacactaaattgttactaacaaagtaaacatttcttccccagttttttctgagttgattaagcaccagtatatttaaaaatgtttcccaagcctgagaaaaactcccctctgaacatacaactattcagtgtagaatgtttttcctaccacttgattacaatttggcagtagtttctgaataatttacaaattttaaatttctgtgccccaaacacacatgtgttgcaactaaacagacttgaaagaatatgcaaattgcacttttatgtcaaaaatgagtgaatgcagcttcatgcagaaaaaaagctaactgtcaccctcatgtttttgtttagactaatctgtgggctgtcgcccccacatcagactgcatcaacattttctttgggatattagacgtaaatgtttatggctgcagatagcctataagggattggcacttattaaaaacgaccctggagtattttctttggtttccacataaatatcccagggaaatgttcaatcaaacaaggctgccaggtagagggaaatgaacattgcagcagagctctggggtccctcgggtcctgtcaagtgaagggccccatccaagaatggagtaagaaggctgagcccagagaactgggcttcttttcgacatagaaggtaatgtggttgctaactggaaatgtcccttgccaaggctaggaatcctctccacaccaaaaaacttcacattttaaaaagttgtcaaaatactatcgatactatatgtggattttatcgcatctctagctgtgagggccaagcctgcttgtgttttggaggtgggacaacttcatggcacaattggctttattcatgggttgaagcaggtgcgagcccattgtatcctcacaagcggtgggaa

SEQ ID NO: 46605 - DNA, 899 bp, Bovine  19866881592102
  misc_feature (1)..(1): n is a, c, g, or t
nataacagattaagtacctggtttttatttttatttttttaatgcataatgagtagatggttactaaagagggtggccaatcctgcttgtttacctgggacagtcattgccctggcataattttaaatagtgcttctttttgtttccaaagtgccccattttatataatgaatcatatgatcatctttgtagattctttaccatctgagctaccagggaagcccttaatactaacagtcccttacaaagtggtaaatcacagcatgtttattgatagttgcgaatggttcatgtttctcaaaatttgcagccttccagctggtttacgtagatcttcttaatgccgtgggttctttaaaagtatataatgcaattcctgtttgcctgacgatttcatttctgaaatgctttttctctcttactggtcttcaactaacagtggatcttaatgttgtaactttaagttggccttcctgctcactcctccctgtgttcttcctgattcatagtttgtagatcatcgatgagtgatatgcacccgaagagtcttattctgaagcctgcaatgtaatttcaagcaaatgctttttttaaaaatttgaggtatagttgtcatatgacattatattaatttcaagcatacaacataatgatctgatatttgtatatattgcaaaatgatcacaagtagtttggttaacacccatcaccatacttggttaaacaaatgctttcagggaaagggccttctccctgggcactttgaatacaggaaccagagtagtcaacagtgtgactcatctctgttgacctggtagctaagcccttggagacacaaggaggacttgatactgaactaggtttcatgatttatcctattcagcccaaacatggtagtg

SEQ ID NO: 46606 - DNA, 696 bp, Bovine  19866881923544
  misc_feature (1)..(1): n is a, c, g, or t
ntccacaaaaattccaaacaaggtggcattctcgactttgcctgtaagaactgtccccaacctgcaggtcttccaagcagactatgcttctcttgaaatcaggtttatcgaaatctacaacaaaaggggaaaatggacagtgtgtataaataatgtagacacaacataatttaatgagtaagtattgtatacatatcaattgtgtgcccagaccagtattaagcattgaggggagacataaaaggagctgaagatatatgcctgccttcagagaaaaggcatcctagttggagaaacagcatgtgcaaagtaggaacaattcaagaaagtttactcaaacactatcttctcctcaaactctatcttgctaacctgtgaacattagcacatacataagggactcaaaagactatagtggcttattttcttctttatgaagaggagatgagaaaatacatttgctcaatgaatatgcaaggctaaattacaaatacggagaaaataagatccttgttgacagaagaatgggagttttccttcaagtgactgaattctcaaaatgtttaaagtgggtagaacatccataaatatttagtcaaatgtgaaatttaaatgttctttctcacttctgcccccaaattttgaactcaaggatcaactcctatccatttgaataaatttatccaatcaaaaaga

SEQ ID NO: 46607 - DNA, 516 bp, Bovine  19866881926753
  misc_feature (1)..(1): n is a, c, g, or t
ntgattttttattgttgctgtagaaagatgggacctcgtgcagggtccgcaacaggtgggtttggagcatggaagagatgaggctcattgcaacaactgcccgccggtagaaactgtagttcttacaccagactgagttgatgatctggggtggagctggggggtgggtaggcagcgctactgtttagctgtgaatcacaaagtcgtaactaccaaacgtgctcctcccctcttgggtctcggcctcatctccaggggtgatgacaataagatgggctggattcccattagaccgagaaataggagggagtgtccactgacctaaggaaaatatctcatgaaaacatggtttcttttatattgggaggcatataaaaatgcatgtaaacaaggattttttatttgaacattatgttttattggtacagagcatgtgttttcttaccctagtgactaatgcctttttaaaatgagactttgaaatgccattctgcttatgtcatgagataaagagtt

SEQ ID NO: 46608 - DNA, 1856 bp, Bovine  19866881006942
  misc_feature (1)..(1): n is a, c, g, or t
nggagaggagaaatctgaagaggcttataagtttatttattcctctttatttaggtaaacatgctctatttatttttagcgactttgttccctattccctctccctctagagatttatggtgcttcagagggatcttactataaaactattgctataacatatcatttccccttatctataaacaaatattggagaatgcaatggcatcccaatccagtactcttgcctggaaaatcccatggacagaggagcctggtaggctgcagtctacggggttgctaagagtcagacacgactgaacgacttcagtttgacttcactttcatgctttggagaaggaaatggcaacccactccagtattcttgcctagagaatcccagggatgggggaggctggtgggctgccttctatggggtcacacagaggcggacacgactgacgcgacttagcagcagcagtagcagtataaacaaatattctgtgaaataattagaaatcagagaggcattcactctctgctgatccttggcttgtaattcttggcttccacaataatatgtaatttatttacattccatggaaggagtgataggtttacctactcccttgtcatcatttgggctctctggaaaggtgagagagatatggatttaggcatacagaatagtattggtagtaacacctgtgaaaagaaaagtggaccaagaggacaagacagagttaaccacatgcttggaatgcaaatatgatggagccgagttgggaggtctaaagtataaattgtccattcgaggtgtgccagttagtgtagaaatcagaaggtcataatacctcttttcaacttagtcattggctggggccatactgagaagagagtgttctcaataactaccatcatgatcattcattggcagaagggcaccttgagaatagcatgtccttggcttgcctgggtcatgattttggaaggtgtgctagagtggcaattttgaagaatggccatatctgaactttctgctgatgtgacagaagattgaacaaatacaggggaaactgagaaaataagtaaatacttattgctgattggagccagatttaacttaaataaaatatgtcatggtataaatgataaagcactctatgagtaatattacttaatatattttcgttagtacaaattcctgtcttccagcctttttcttcctggatttatgttcatattaaagaatttggtctttggtatttccatatcaatttagtgctgaatttaattttcattatactcctttttgtatttctgttctttgagtttctataatgattttgatacagtaacttagtcaaagtttacttggtggctgggaaaagttaattcagtttctataaagtatttcatttcctatcagtagctcttttaggccctgggagaatctgccttatctctattattttcactctcttcaaagtaaacagaggcaggtattgttatcacatcttaggaacaggaaagttgagccctggaaatttaatagcttgccaaggtcattttcacttgaaaacacagctgaatccatatttcatgtatagaataaagatttctttaaaaataatttaatataattatatatttgggtatttgcaaaaggttatgatttttaaaataagcagaaaaataagctgtgtcttggcacctagccaatcaatgcattgactattatgtagatttatgtaccacaatgaggtagctaggcaaggctttaaaacataaaaaatatacagtaatttctcatttccatttgtgccatgaactcattagaaaaatgaagacctcctctgtttttacaactctcaatc

SEQ ID NO: 46609 - DNA, 1423 bp, Bovine  19866881021382
  misc_feature (1)..(1): n is a, c, g, or t
ncagagcagaagaatgagagtgtggtgtctaaattaacagcaagttgatattcagggctgtgcttctgttaaagaaccagggttgtctcttttgaaagcctgagcccaggctgcctcctccatgcccctgaacaggagcaactcttttcccatgcagccccagccccaggcctccttcaccccaagaagtaaatgcagggagatgtcctggccagtcccaggccacctggtggttacaattctgtgttatttactccaagatcacatgaaacacacacctgtggtgggaaatatttaatgcagatgttgggaagcagctttgccaaaattgtcagaaaagcgcatgtgaggaaattacctcctggtccctcggtggggattacgtcttttatagtctccgtattttgaagtattttcttttttaaagatgcaattgtcaaagaccgctcctttgagagcaaggggaagggaggagcagagagagaagaaaacagaggaagtaacacaagacagggccccccacccacaagaacctgagttgggggatctggacccttccactctgctccatggggagctgtgaaccagaggcccagctggggaggacaggagcttggtgtgaggagaaactccagggaacctttggaaggagggagggggcataaagctgtggtccccaaactttttggcaccagggaccagtttcatggaagacaagttttccagggaccttggggttgggggtagtttgggggaggattcgagcacatgacatttttgtttctattattattatatcagctccacctcagatcatcaggcactagatcccagaggctggggacccctgacataaatgatgtagatgcctgcaaagcaagccaggctctcccactggggccaggctgtatccgagggggaggatctatgggcttaaagtggcagaaaaggattctaacattcaaccaacgtcaaatcagccttaaggactgggctgctgctgctactgctgctaagtcgcttcagtcgtgtccgactctgtgcgaccccatggacggcagcccaccaggctcttctgtccatgggattctccaggcaagaacactggagtgagttgccattttcttctccaatgcatgaaagtgaaaagtgaaagtgaagtcgctcagtcatgtccaactcttagtgaccccatggactgcagcctaccaggctcttccatccatgggattttccaggcaacagtactggagtggggtgccattgccttctcccaaggactgggcagtgatgagcaactagcaagcacagcagggcagagaaagcaggccacagaagagaggaggccttccaggggccagggtcttcccagagggctaaatgaggaaatgctaaaggagatgtaagtgccagtgtaggacgg

SEQ ID NO: 46610 - DNA, 1695 bp, Bovine  19866881116362
  misc_feature (1)..(1): n is a, c, g, or t
nttttgaggtggtgggtgtgggtagagttgtaatatatctcagtatgattactcggagaaggcaatagcacctcactccagtgttgttgcctagagaatccctgggacgggggagcctggtgggctgccgtctgtggggtcgcacagagtcagacatgactgaagcaacttagcaacagcattattgctaaactaatatggatgtttgaagtagttactttggccatgatagttatgataagagagcctatgcattgacattaaaacattttttaaatatgagaaatatccatgggtttcatctcttatagaatatatcttttcataaatgagactactgaaagcaggaaaaatcatagaaaatgtaagcaaagaaatagtaattataatgctatataccttctctccatactattacttttcaatatatttccatttttttcaatttgcatttttttcttattaactcttgaacaaagtgaaagggtagtatatgtgtgcatgcatgtatgtgtgcgtgtgtgtgtattcatggttgtaatttaagattcttctgggtaaagaaatcactgatctgtataatataagtgacccagattactgcagggagtcttgcctgctgccattaacccttacctccataaagcaaacctatgggtaaggaaagcttctcacagcaggctgtgactaacatctatgagagagggaaaggattataaatagatccagtaaatgaaagcaggacaaaaatctggatcaggaagcctgaaacttaaatgccaaatacttgagtttatttaaataataattgaaatcaagctgtactttttagcttaatttttcaaatttagttgatgtctcagtatgcaaaataattcacctacaaaataatgtcatacaaaagcaattttagatattctgaacataagctcctgaaactaaatatgatgatttaatggaaattgattgctaatgagattgtattaataagaaaatatttgagcctgatctatacaccttcatatgctaataaacggtcatgtaaacttcatattttcttaactagtacaggaaaataactttctacgattatgagtctgaaagtcaagttcaaggtatacttaattccttgcttattctctgaaataagtgctgtttatatattttccatttgttaggattaatatgaatcccttaaacacatataatttaatcatttaaaaatatattaaataataaatatattttatttgattattcttataaagaagaataaaacttactttaataattatagaatttttctgagtgtccaagactcagaaaggaagtcaacctttctgtgaaggccactgaaccaatttataagtgatcagcaatccagtcatccaagaaatcagaaagttctggtttcatttattcacagaaaggaaatcgagcttcccacatttatttcacatgacaagaaattctttatttacagaacgactaaaacagcacacttccaagttgatataccaataatgctagttttcctttgtattaactgttaaagtctccatatttttactcaagtctaataatccatgaaactggtggaatcaatataatcacagaagtggttttaaagtaactgttttatcttgatgacagttcgtgtttttaatgacctttatatcaacttgttaagatgca

SEQ ID NO: 46611 - DNA, 1143 bp, Bovine  19866881155767
  misc_feature (1)..(1): n is a, c, g, or t
ncttattaaatcctttaaaggtacataactgaactatatttatggcaggtaagtaatagaaaatttctagttcttaaatcatacctatacatgtacatttttttcctctgaagatttagcttatttgtgttgttaggattaataacttgaattctatgtataggtacccaatccttttgatcttgtattggcattcatttttacgttccaaatatacacctaatagtttcattatactgacatatttgacaataaaaacaacctcttgtttctctacctttaaacaatttcacattcatattctaaaaagaatagaattaattaattaacattttgtattaaatttaatttacaaatatcttgactatttccccagaaaacagtgaaagaatacatcagtttgtcgtctttgagtgtgttttcagttttataagattcaagttattccttggagctttccaatgattaggcaatacatattttttaaaatatcattataatccctagaagttgcactttagagaatagagctattctttgaagatttactggaataccaatagtttattatcttgaatctgaaattcagtttccagcccagtgcatatacttaatcaatatctcattgccattgtatttttcaagaatctgtgaaatttcatacctattcacttgatcctgaaatcattagtttgactctaaaaccatggaaactactgagtttctataatcccttctttttgatctgtttatatagaactctgttaagcatagattgtgaaagcacactggttactatacatatgatttgtcatctttcgctttcttatttaaatgtaagaattaagtggcacaatttgtttaaaaagtatatatgtatactttatatgttattatacttttcttcacttatgacaagtatgccattgtttgcactttctgccagggattttcttttcctttgttaataggaggttcatactgacctaaacttatcctaatcacaagagtatcaatcctaactcctcccattctcaccagagaggaaggtgaagcatatacttttccagagaatgttatttcagttatttcaggctatttctagtacagagatttttacagtaataaatataatatttgcag

SEQ ID NO: 46612 - DNA, 1415 bp, Bovine  19866881210273
  misc_feature (1)..(1): n is a, c, g, or t
ntcttttgttatgataaaatgctcttgattctgtgtaaaaaaggatggtacaattttatggcaatgcaatttatgttaacaacatagatgagcctataactgctctcccattaacacttgttgtttttctctgctcaccattttctaaagagtccacctttaaggttggaatatttcatacttgtctccaaacaaaatgtgtctctttttataaaatttcacttatgtcagttgagctgttattttgggtaagaaaatgggaagaagaaagtcgtttctattttcccctaaaggcattttattcatgagcaaagtctaaatggcaaaattttatttcttccacaagtttgttcatgaggataaatgttactccacttataagaaatagcatgtgattgtaaaagtactggctaatttagtccaagataaaaaggtccaattgaagtaaagtaggtttttctgtttccatatgtaaataattcaaaagttacttatgtaaaataaattaactataaaaagtaaaatatttttactttgcctatgatatttatacagtaaaactaaccataaaatagatgcagaaaaatattcttaatagatttgaaaaaataaggatgtgtatatatacatatataaccatatatataaccaatgaagctagaaagaaaaaaatttaattgcttttaaagtgatagaattaatttaacatataattagaggaggtagtccctggtggctcagctggtaaagaatccgaccacaatgtaggatacctgggtttgatccctgggttgggagcatccgctggagaagggaaaggctacccactacagtattctggcctgcggaattccatggactgatagcccatggggtggcaaagtgtcagacacaactgaatgactttcactttcactttcagaggaggcagttgagagagaaggtgatggggtgaatgaaatacatttaattaccaagagagccttaatattctcctcagattgactaaactttagatcattttcttccttactatgggccccataaccccctattcttagagcactggcactagatgacttgccattgcaattttttcctctttgaaatgtatataaatcacctcttgcaaggtttaggacccaagaaatgtctttcttaaggacctgggagccatccctttgaaaggtaatccttaagaaagacagagccctgggtttccctggcggctcaatggtaaagaatccacctgccagtacaggagacattggtttgatctctgatccaggaagattccacatgctggtagagcaactaagcccatgagccacagctcacaggcttacaacccatgctctagggcccaggagctgcagctattgagcccatgtgctgcaactaccgaagctctctca

SEQ ID NO: 46613 - DNA, 931 bp, Bovine  19866881313180
  misc_feature (1)..(1): n is a, c, g, or t
nttctgatttttataaaatctaagtatttgtaatattaccacaggaattttgaagataaactagcatcttaaacatttaaatatgtgtgcatgcatgctaaatcacctcagtcgtgtccaagtctttgcaaccccatggactgtagcctgccaggctcacctgtccatgggattctccaagcaagaacactagagtgggttgccatttccttctccaatttaaatatgaatgtggaccttatttgatattctctttaaatgtagagtaacagaagggccactgtaacagacagttagacctagaacttactgatgaatctcacactgcgctgtctgtgtgttaagactaggcctactgagtagctcatctacttcacacactgcacagctgaacttgtaatgataacgtcaccgtgtgcgtggcaagctctgaggatgctgtccacatctgagcactgttactctacgcttgaagaagtaattttaagttgatatttttgctaacttcccaacccatgaaatattaaataagtgtttgaaacaggctgcatttacttcatatacatatataatcaaatgtttaaatctgcttggttgtatgatatgaggttgctaaaattatgaaacagaaatatatacctttggaacatgcttatcatttgctatgtaattaaatatatagaccattttgcttgagaatatgcatgtgtgagtacacatgtgcacagaggcttatccctaggcatttacaagctgttttataaaattagttagtctgtacatttttaatccttatctttagctaaccttatcttagtcatcattagttttctgttgttgcccataacaggccaaatgactcaaagattataagcagtaaaaagtcatgtcataagcatcaattcccctaacgagcagctgaataaaatat

SEQ ID NO: 46614 - DNA, 1831 bp, Bovine  19866881400389
  misc_feature (1)..(1): n is a, c, g, or t
nttaatttttcaattcagactgaggcatgtatttctgctgaaatgtattagccttttttaatagctcagtttccatcatttacctacggaacaaagttatgcctatagttactcactttgttgatgaccctggcttcaatcaatggccaatcttaagaacccagactaatgactacaactgcaaaacattcttgtgaagctctgtctcttaaggcaatctctaatatttcaggtaaagtcagatttttgtacaaacaccactgtgagttcaaataagatagtcttctgttaggtcacaggggtggggctagagctttgaggaaaagtatgaaaaggatttgcggcagaaacatatggttacattttttaatttctgagatgtcaggactggcatgaataaataactacatctatgcttcacataatacaaatactattttataaaatagagatgaacaactgtgcatatgccaaaaatcatttatcatcatagaaagcattttatgttcatttggaattatcaaagattttatatttacctttcagagatgttttattttattcagaattgagatacagcttaaagacaaaataagtcaaaatatgaagattatggaattgaatttcccctgcagcagacaccttttagattaacatttgcctacttactatgtaccctacaccatcgtgatttcattcagacatgaataaaagataatgtttgtttattgaaaatttaattatctctcaaacaatttaaagattcacaaatatacagtctaaaatatatgaaagcataacaggcaatactctgtttactatccaggtcttcattacatcaggtaagatatgatcaactgcaagcaccagaaaatccaactcactgacaaatgatagaggagatttaggcacttgcctcatattcacacaaagaacagggttgatgggagagtattttccaattctcaaatcactaaagtctcaggttatttagaccaagtgaccactcaatgccactgaaatgatctcatctctgaactcttctaggagccactttcatccacaggctggcttatatggcagtagtaaagttgatgctgcaacttaagatctaacattccttttctacactgcccagaagacaaaactttattttttccaactattacccaatgttctgggtttgattccatctagaataatttagaatcagattttgaattaacagctttgcaagaagatatacccatcatgacccttcttggagatgggagatggaatcaaatttactcatactacaaggctgaaaaacagtaattagtggtagatgaatgaagcaaacaacagtgtccactgtcttcctaagatatagagacattatatttaaagataagtcattgtaaaagtctgaagtaatggtcacttaatgtgtgtgtgtgctaaggtacttcagttgtgtctgattctttgcattctaaggactatagcccaccagccttctctgtccatggggattctccaggcaagaatactggagtgggttgccatgccctcctccaggggatttttctgacctagggatcaaatctgcatctcccgcattgaaggtggtttctttaccactgagccacgggggaaatctggtcaattaataccactgtctaaatattttatcatcaattatttcttaactttaaaagcaataaatgacccttgcaacaaaacaaaccacatgaatgcagacaactaatctccatatttcctccaatgtaaacctttatcctatcaaggcaaacaaatttcaaaagcagatttccacaccaatcagaga

SEQ ID NO: 46615 - DNA, 1366 bp, Bovine  19866881426352
  misc_feature (1)..(1): n is a, c, g, or t
ntaacatacacttttcctattcaaccacaaggcaactccctactctgtctccaatgtggttgtgttcatttacacttccaacacaaaaaatgtgagttcccagaactcactgttgacatcaacactgacatcttttttctttctagtaattgtgaaattatatctcattatcattttaatgtgcattcctgaggttactaatgagtgtgaacatctttatatatgtataaaaccgtttcatgtattcaagatgggactcgaaattaagtgaagctacattcaggggaatcagatcttttctcacattaccctacccccaagttcagcacagtagtagaagtatcataaagggtgagtgatcttcctagactttcacacagggcagcaaatgtagcttcaaggctactggaaaaagagatgataggttaaaagtaaaacagttggagaatgaagactagacatgaatggagtaagaatgaaaaaaagcaactcctcccattttcctcaaatgtaagagttcaaagtgacttttgaaaggcagggaataaattgcctaataagatttttaaagtactcctcattttaaacccataggcagtatctgcagagccaaggtcttggaaaactgaagcaattgtcttatccttaactgttttagctaaacatctgcccctctattcaacgtttttagagaaaacatgcatgccttagtgtgtgtatggccagtattttaaaatttagaaatgggttagcagtgaaattaagttccttcaatacagagattatatagccaaaaccttggtattaatacctgtccatttaatttactctacataattagattttgtcctatacaaaggtaaaacattttatgtctattcaaaccaataaagtgtagaaattcaattatgtaaagtcatcttcagtgctagagaaatatagacaccagcacaaataaaatctccaaatgtatatcctctgtccatgcaatactcttttaaatcaagtacaaatcttgaaaatatgattcacgtgtgcctaagacaggggtttagctatgcagatatatcagttgttacctctaacataagtttttaaagtttactagaaacaaaatgtacagagcctttgaagatttatcacatactcagattccaacattttgttacagtattcacaaatcttctttgagatgaaagccatgttttaggaactaagaaatatttattttgatgcagatgattaagccacccagaagaaatttttaacttttttcctagtgaaaagacatgctataagaaaaggaatattgctaactctggaaaaaattacagtcaaatcagacactttatttgaaaaggaggtt

SEQ ID NO: 46616 - DNA, 1145 bp, Bovine  19866881619404
  misc_feature (1)..(1): n is a, c, g, or t
ntctgaattgaaaaattattctaggatttgttagatatgttaattggttcaaatcgcaattaacatatgaaaaggaaaggaaaagacactgaaaatagactgtgaattaaagcagcaaaagaagtaatagaaataaaccttacatgtgacagcttgtcacctccatagaatagggctgtgtagcaaaaaggcagccgttgcaaagcaccgtgacactgatattcaagagctgcactgaaattggtaacataggcattttctttgcaaatattcatgtcattaatcttctttcaaaaatcactgaagtctaaacatgagccagacttgcatttgttcacaaagaatgcacagaaaaataagtgtgttacactcactgttactctttctgtttacacacattataacaagtgtatgtgatatgagatgaggccacatgctctgaatacttggtttacttgccacatatgtagaactcacagtgtatattaagaaattcagaaactcctgtttggatatgtgttatgtctttttttttacaaaggcttttctagaatgggatctaaatgagatttgcattatagtaatcctgttttatgtctatgttgtggtataataaactattcattacttatgtaaatatatagccacacctatagatggagagaaagagaaattatttattatttttaaaatcatagcagacaatggaaaacacaatacacattgattaacgtgcacagttagaaaatatgtacataatatgctcaaagcactgtgcaaggggctaaagaagaaagaatccctgcaaagagacattatctagaattccaaacaaaaacaacaaatcaaatggaatcctgttggttctcttttggggtatgtaagcaaaacatcactgaggtagagaggagagaatctcttcacataagcaatggcaacggttttggagaagttcatggaagaaaaggcaagtgcaattcaggtagaggcaacagtacctggagttattagacagtcgtgtgtacaggctattacaagcagcttattcagactctgacatagtttaaatatacagtaagatgtatatacagtaagatggctctggacagctttgctggatttaactatgaagagtttttatatct

SEQ ID NO: 46617 - DNA, 898 bp, Bovine  19866880384706
  misc_feature (1)..(1): n is a, c, g, or t
ntccttttatctctccttctttcctcctttcttctctctttcttccttcctccactagacaagattctggaaatttgaaaaataaatttgacacatattatataattttattatgagtattttttaaaagaagaggaaaagaaaatcaatttgcccttaaaaatttagatctggtaatattttacatgtattgaaaggaaaaaataatctttttattcttatcggaaaatttttaaaaacctatatcacttaacttattatttgaaaagcctaatttgggttgctttctagaagaaaaaaattatgtaattttttttagtaagaaaaataggtagtctcaaaagtcaaacagtaaaattgagaactcataaaggatctcacaattgggcattaataatgaatatttattgcttgaatataggccttatttaagaaaagagatatcatgcacaccaggtgtaataaagttgttggtggcctaacgtgttgcaagtgttttgtcatctacagcactgcattctttaaggatgtctaacacaaaaaaaactctcaagtgaatttattgactaagaccagttccacagaaccaattagtatcttacacaggctgccctgcaaggcttatgaggccatccatcacctgtccatttaactatttagcatttgttcaagcaatttgtcactgtgtcagaatgctagcatttcagaatgggagtttttggttgaaagaaatctaactcagatactgcagatatttctcctttaataaggcttaggaagatttatgtttctattatatttaaccttaaacatcttgtctagagggtgaggttctttgtactgcaaatatttcaaatttaaatcaagtttttgtgtgaatttaaaaatatcatgcaaa

SEQ ID NO: 46618 - DNA, 1834 bp, Bovine  19866880449303
  misc_feature (1)..(1): n is a, c, g, or t
nccaatgggttactttttgtagagagaaaatacttgaaagcattgaaaatagttgatggcatgaagtttttttctgatattgtagataccacaattacatttacaggtaacatggattccattttttttttttttcaatttgaacaggttttaagtatgtaggccttacatatttttcacatccacagccgttaactaaagagaaaataaatttcataaactttggtttagctgttggcaggttttcaatctgatttttttcagagggataatagcatgctacatggatatttcttttggaaattagtttatatgggaaagcaaagttgattttgctcaaaatataataacagttggatttcaaagtcctgtcaataacagatttaagaggtatatgcaaacactttctgtcaacttctgtggcttttttttttctatttcaagttaaaatcataaatttaattctcttaggatataaaacaatgctaactacatttgtttagtttatgcctgcagtatatttttatttattttgaagtgctgtcatagtattaataataaaatatgacttttttgttaggctccattttatttgctgtacttcaaaaaactacttgtgtatattctgaaaatgagaaactgagtttttttttcttggtttttattaacattatgtaatataatcccaagtgatttattgttttatggtcatttaaaaattccgagtgtcagtgtattatgagagatagagggcaataaaatcctagcagtttacaccccaatttccaatgttcactttagcttcatttcattatcataatccatctaaagctttaaatgtaatattttgcatatgctgtgtgctaatcaggcactgtgttaatcatgctttatataaattaaaacagtcacctcttacaacatgactgaagtgaggggatctgaatttgaggaactcagcattcttacacaagatgacatggttcatgaccaaatttgaattaataaatctgggctgacttactcccaagggccagcttgcttatcaacatgtatgatcattacatgccaggtggagatattagtaaagataaatgtataactggtaattttatgagcactgcctataaacagggtctatatagaacaactttttcttagtatgatatttgaaagttattgtccatgtagatgacatgtcagtataatacagtgactatatatatcaatatactagctttaaagacagacttatatattcttggttatgtctctagcttcaggatgttgctactgttcatttgctaactcatgtctgtatctctgtgacctcatagactgtggcatgctaggctcctctgtcctctactatctcccagagattgctcagattcatgcccactgagtcagtgatgctatctaaccatctcatcctctgctatccccttctccttttgccttcaatctttcccatcatcagggtcttttcccatcatcaaggtgtacatactagctagtaaatgggttattatatttgtttcaaaagatgcatatgtgtccagatacacagtggaaatgtcagcatacacagttccttcaatattccgcttttctaaaaggtttccagccagcacaactctaagtttacttaattgacatttcattttaatccctactacctatgtcccacttggttgaactcttatattatataataaagttctcaccatacactactattagagttagtatggaaacaaacttcactcacttttcagaactacagtttttcaatatattcttactagactgtcctctaatttcaacctcgcaa

SEQ ID NO: 46619 - DNA, 841 bp, Bovine  19866880736592
  misc_feature (1)..(1): n is a, c, g, or t
natggagagaaagaaagaaatatgagtattttacacatagttaaggaggatgtgtgtgaagctttatatagtgagagagttagggcaatgatgaaaggggcagcctgaagcattcttccagggaaatttttttcagctacttagtactcacttaaagtttcccaagatattcattgttctacatacatacagtattgaaaatgttttatttttcgtttctcaactgctggggtccagccccagtgggtccagggaattcgaagtggggacggcgtctgcgaggatcagaaaacaattgcttaattaaacattaattaaggatataaagagtggtttaataaggatagctcagtgagaaagtttagtggagaaaagaggctgaataacttggtttacgtggaaagctaataaaattccaaaataaggaatttgcatcgcctacataggccgtaggcgtcctcccattctcccgaaggagaggagacactaaggcctccctggtcagatctcagaaacccaggcaaaattagtaggctcgacgaacctccctgccccagatgggaattcagccagaaggtgagagaaagaacggcatggggagaccaagttttggtgaacaaagcccacactttattttccaaagtagtttttataccttaagttgtgcataggggataatgggggggaggggtagagtcagcagtaagccaggctttcatccagcaaacttatcatatgcaaaagtttaggtgatttacatcatcttctggcccggaggcctgttaacattttaagacccttttttcagaaaacttatttttctttaaaggtgattagtcag

SEQ ID NO: 46620 - DNA, 1113 bp, Bovine  19866881022176
  misc_feature (1)..(1): n is a, c, g, or t
ncttattcactggtggcatgcagtcttgaaccatagttgaattgacaaaccatacaaaccttagataaggtaagttatctagaaagacaatgcagaattgatgttatattaatggcttaattgtaattaaagaaaactgacatcaatataaatgtcagtatataagcaaatggattttgctgcaggaatagtatggtaataaattataactgtgattgcttcttgaatcagcaaatctttcatgccataaagaaatattaacatttttaatttgtcatatatacactgaattttatggctaaatttgaattatctattatccattctattatcaagtaaaatacccaataaattacaaaatattaaacatcgataacactaaaaagaagtaaaatatctttcagagctagtttaaaataaaagctaacaatatttcttttaggttaatcaaggcatcaaatctctgtatattgttctttattcataatcctctctagagtacaaccatgtgatttttgcacttactgttttactgtagattgtcacattttaaaaagaatcaaagttacatagctactaggtaagccaaattattggtattaaatgaactgtgattattaaatgaacacaccacagtacttgagcttaattttcacattttcagaggaataattttctgcatattttagatatgatgtcaaatcttagaagtatgtgctctgtgaaccatttttgataagcacagcactgtgtcagttctgtatcttgcattgttttgctacaacatgaatatcatatgtcctaagatgcttggtctagtaacactgttattttgttatgcattagtaaatatagtttcatagcctgttttgtgtatctgttcttttttacttcttttataactgaagtttatgtgttagataaaattttatatgatacatactatgcactaagtataatactgtacattaaattttaatactgtacattaaaaaatatgtacaatcttgggttctctatttaggaaaaaagttgcagggaaaacataattttcaacagaatgctactactgtgggtggcatggggcctctcccaagaatatattctcacact

SEQ ID NO: 46621 - DNA, 1339 bp, Bovine  19866881083395
  misc_feature (1)..(1): n is a, c, g, or t
naaaagttcccctaaaagaacatatacttatatttaggtatttagtatccatttctctataaattccctaagttaaaaaatctatagataatgtccattatttctcatgaaactgaacaagggatagggtgtttaaaaacatctcacagaggaagctgatatgctactcagcttgtttatcaagagcctgataaacttagtattctaggtgagttagggattttgggcattatctaagaacattttaatgcatttttcaatttggcaaattgttaaaattatgaaaaaagagagagacaccatgtctcttcttaataatgaaaaatattagttctgactttaaccctatattgcttgtgggcatgtgtttaatttagtcaaattgaactgaaaccattgtagaatataaagtaaccaaaaatgttcctataaggcaaaaaatgctagatgttaaagggaaagtagctatatcatatattttaataaatattgtaatcaagaatcctgagaaataaatgtgttctagtcttaattttattttgtaatttatatgatacttatgatggttaattttgtatcagcttgactgggccatagtgcccagatatttgaccaagtattattctagatgtttctgtgaaggcttttgttttcccccagtgagattaacattgttttgagtaaagtatattaccctccataatgtgatgggcttcttccaatcagttgaaaatcttaggagaacaaagaaaactcccttcagcaagaagaaattatgctagttgattgcctccaacgataatttaggtcctcactcacatgagtctgttcctttaaagaaacctacctctcagtgaatcttcatcacctatcgtctctatcgctatgctcttatctgtatctatatatatttattcctttacatttacctatatacctgcatctatatcttgctgttctttttctctggagaatcctaatacccagtactcatgtttttttcattgattttgtttctttttacaaatatcaagtggtgctatataaatacattttatattaaaccattatctaaacatgtgtaatgaaagacaagtaagggttaactaaaaataaaagtaaatattttctatcctagtccatgtgtcttaatgtgcagtatgagaattacaattgagaaaattatccaagtgggttttccaatgttttcaaagtgttgcatcatccagtaaatgccattgttttcattatttcaggagattaaaaaattaaaacctaacttacataccaacagttattaagaaatattcttttttcctttcggcttctcacctattca

SEQ ID NO: 46622 - DNA, 944 bp, Bovine  19866881772754
  misc_feature (1)..(1): n is a, c, g, or t
ntaattaataaacctataagtgaaacttcacaggtatgtcactatgcatgtatctttctatcttgtgatctcaacctgttatacagtaatctgccattggtttatttccattattttcaatgctatatttattctaaatgcagctgtaaaattaattttctcttccctaagttcatattattttagttacttaaagaacaatttcctgttcacaagtgaattgagatgaaactgttattttttgcatcttttaatttctgttgaatggctcccttatatctagttaacaatctgtgtctaaacttttagaggagaactgcaacctttcagtaaaaactgcccttccatctgggccttgttccatttttaaatctaaggcatcttcttatttgactgcctattgatgaaatgttctacagcttaaagttcaaacatgtacgctatttaattactttaagatccaagatgaagcatcaatttccaacatgtatggtgtgtttatgttagtctgcaaactgaacagagtccatcttttcctcagatgttgattttctataataatgaaatatacggagggcctgggcatatataaaaaggtgcacaaaatagacaataaatgaagtgatgatagtgtcaagatagtttctacggttttaatataatttatagtatattctgaaaaactttgattgattttttcattgttatagtaagaattggccacaaatttggcttaaccaattcagcttaattatcttatagttttgtaggtaagaagtccaacattggtctgacttggcaaaaatcaaatcaggttgcatggctgcattcttttctgggttttaaggaataatctgtttccttttttaatcctagcttccagagatcatgcacattccctcagttcatgccccttttccttttcttcaaatcccgcagaaatg

SEQ ID NO: 46623 - DNA, 1539 bp, Bovine  19866880359118
  misc_feature (1)..(1): n is a, c, g, or t
ngtttacttacttaataaaaatgtattcttcccttgatagatcctcatctaagttgtacccatttcagggtcattctacaaaagagaaattcaaacttgttactgtaatataaaatgcattgccagcaaaatgtcattccttatattcacagatgacttcagcaaagacctggaaccatttgttagagtgactgaaaccagaaatgtgtggtttacaaatatagagtgattcacataaaatctgaatctgaaagcttgctttcatgtgtgttgtcaaatcaattttgtttttcaacctaaagaaatactttagaaatgttgttaatataagccatccttgaacttttgtaggatagatttacctgattctaggcaagaaatcatacatggaatatgaaaggacttttagagcaagtgggaagacagatacttttgaagataatctccaaatcaataaaactatttgtaagcatactttacatctaaattataggatataaaatcaaattatatgattctcatcattgtggatttaacctctaaggatttaaatagtcatgaactaagtatttgtgtccaaagtatctactcttggtgacctacagaatatcacaagttgtaggttgtattttgtcattgtgcatgcacatgaacacacacatacacacacagaacacatatctgttgtcagatgacattcatggcatattgtcagtgaatagtaagtttccaatattcaaggaaaagtttcactaatgtggatcggtttcttaaaaagtttgtcacttaaatatccatttaatttggctacatgctcaagttcataggcaagaaatactggatatctgaaaatgaaaatattaggttgaatttcattaaacaatattttaaaagatgtaatatgattccatatccctaacaatggagaaaggactctgcaatgtgtacaatcattggagaataaaagatacacatttccacctatgattcaggctggttaaaaaaattattctagaggaagcattgattcccttcattgatacatgccttgttgtggcaaaggggcttgcataactcaatgaagctatgagccatgccatgcagggccacccaagatggacgggtcttactatgctaaagcctttgactcgtggatcatgacacacatggaaagttcttagagagatgggaataccagatcatcttacctgtctcctgagaaacctgtatgcaggtcaagaagcaacagttagaaccatgtatggaacaactgacttccctatagttcagatggtaaagaatctgcctgcaatgcaggagacttgggttcaatccctgggtgaggaagattccctggagaagaaaatggcaatccactccagtattcttatctggaaaatttcatggatcaaggagtttggagggctacaatccgtggggtcacaaagagtaagacacaactcggcaaacaactgatattcaagactgagaaaggagtacaacagagctgtctgctgtcaccgtttgtttaacccatat

SEQ ID NO: 46624 - DNA, 1917 bp, Bovine  19866880556767
  misc_feature (1)..(1): n is a, c, g, or t
naaatctttgacttaccattggaaaagcctcaataaagttaaaagatggtgattataggaaaaaaagcatttaagtgagaaattaacatcaaacatacttttaaaaacccatctatttggaaattaagcatccacttttaaatgacaggtgtatctaagaagccataacaaggaaaattagaaaacatctgtaacaaaataaaaatgaaaaaaagaatttatcagaatttgctgcatgcagcggtagctgctcaatgcaattaaatatgatgtggactcttaaaaataacgcatgaaaacaaataatggacactagcttaaaatgttctgaaattagaacaaaatctgtactttagttaaaaaaaactgtatcgcatgttaatttcctgttttccagatgcacaactgaattatcttgtaatttttttgtcaaatataaatgcccaggcattttttttcccccttctccaaagttccaaatgtgattctaatgaagcagccatatttaaaaacaatagtatgatgatctttaatttttatttagcttgtttcactttttctatttcacatttggtgctccattttcagttttatgtttctaaactatgtatatatatattttagaaaacttatgaatttttgcttaactaaaagatttataacattttgattccacttgcttgattcattatgagtagaatgctagatttctaatttaaaaaaaatagatacacagcgagcaacaaaggtttactgtatagcaaaggcaactacagtcaacatcttgtaataattcataacagaaaatacagtaatatatgtgtatatgtataactgagccacaaaaaaaagaaatctaaaagaattcttctttttgaaattttataacgtttgtcttctatgccagtttttctaaatgtgctttggacatctaacaacaacttatgagatacaatattttaaatatgtttttcaagatataagattaatataaattaatataaatataaaactattatatttaaattattaatgacatcattcaagatgctcctatgttttctgcatttgactaaattttctcagataaatgttaatatgtctcactatgattatatatatatttttatcccttatgtttcttctgatttttgctttacatatccttgttcctttgttgttaggtgtctaaccatttatgtcatctaacttctttatgaattgtacctttaatcattaaaaatattcacctttgtttcaaaaaaaatagaaaagaagtcagtgcagatagagatatcattaagtgttttaggtatcaggaactacaacatatccaaattttccttttagccaatttagacttcaggtctccagttggtattagacaaatgtatattttcttactttccttaatgattgcctaatctgatttactaatggctatgatctttattctagagaattgataagatagaaaagtgtgtctatctgctttttaaggtgtcacagataaggattttcttagaaacctagtctcaaaattacttcaaaagttagttttttaatctaatatttcccatctttttaaaatcacaagtcaatattaacagaaaacaaaatgaaggaaagtagatttgaaatgttgaaaacaagagaaagaaaggaaaataaatgacataaatatttgtgcatgataagtaaattacctctgaagttgcctccaaaattaagtttcaaaactgtttgagacaatgcagcagcatttgaaaaaaaaaaaaaaagtcattgctttttaatgattatattttgcatagtatttattttgatatttaaattcaaatattagtaagctcaatctcagtgttcaattatcgtacattatttctgtcgttaaaaatcatgagtaaatgaaaaatg

SEQ ID NO: 46625 - DNA, 2378 bp, Bovine  19866880726882
  misc_feature (1)..(1): n is a, c, g, or t
nagcttccttgataaatatttcttaagtaccaattgtgtatgtgtatatgtgcacatgtatgtgtgtgtattcttaatatgctggatatacttctggggatgtgagaagaatattcatatttttaaatagttctgattaaggattttaaagagtatatgactcgtctatttccccactatttaccactattatctaatatggactaaagacaaatatttatctggtaatgggtcaaatattatggacaagttaaaatgatttgataattcactaacaattaatatgctcttatatatatctcattaaatagctgtttttttccacaaagaattggatacaacttggcaacttaacaacaacaactccttttttatgatccaatggataccaaattgattagatgtgttgtttcactttattctctcatcactgaattacacagatgttgtaagttgtaacagttgccagtaaaggtcagtttcattccaatcccaaagaaaggcgatgtcaaagaatgctcaaactaccacacaattgcactcatctcacatgctagcaatgtaaggctcacatgttcaagttggatttagaaaaggcagaggagaaccaatacaatattataaaataattagcttccaattaaaataaataaatttaaattaaaaaaaaaaaaagaaaaggcagaggaaccagagatcaaattgccaacatccattgatcattgaaaaagcaagagagttccagaaaaacatctacttctgctttattgactaggccaaatcctttgactgtgtggatcacaacaaactgtagaaaattcttcaagagatgggaagaccaccttacctgcctcctgagaaatctgtatgcaggtcaggaagcaacagttagaactagacatggaacaatagactggttccagatcaggaaaggagttcgtcaaggtgcatattgtcaccctgcttatgtaacttctatgcggactttcttatagctcaaacagtaaggaatctgtctgcaatgcaggagactagggttcgatccctgagttgggaagatcctctggagaatggaaaggcaatccactccagtattcttgcctggagaatactatggacagagaagtctgttgggctatagtccatggggttgcaaagagtcggacatgactgaggaactaacactttacttcttcatgtagagtacatcatgtgaaatgctgggctgggtgaagcacaagctggaatcaagactgttgggaaaaatatcaataacctcagatatgcagatgacaccacccttatggcagaaagaactaaagagcctcttgatgaaaatgaaagaggagagtgaagggttggcttaaaactcaacattcagaaaacaaagattatggcatccaatcccatcacttcattgtgaatagatggagaaacaatagaaacgtgaaagactattttggaggctccaaaatcacagcatatggtactgcagccatgaaattaaaagacacttgctccttggaaggaaagctatgatcaacctagacagcatattaaagaggagaggcattactttgccaacaaagctccatgtagtcaaagctattgtttttccagtagtcctgcatggatgtgaaagttggactgtaaagaaagctgagcaccaaagaattgatgcttttgaactgtgttgttggagaagactcttgagagttcctttgactgcaaggagatccaaccagtccatcctaaaggaaatttagtcctgaatattcattggaaggactgatgctgaagctgaaactccaatactttggcctcctgatgcaaagaactgagtctttggaaaagaccctgatgctgggaaagattgaaggtggtaggaaaaggggacaacagaggatgagatggttggatggcatcactgactcgatgaacatgagtttgagcaagctccgggagttggtgatggacagggaagcctggcgtgctgcagtccatggggtcacagagagtcagatacgactgagcgactgaactgaactgaactgattctctgatgttggtctgtgccaagggtggttacaaaagcacttgattctgatgaaccagaggggaaaacacacagatgctgaaatggctacaagcacaaacatacccaaagcggcctcctgccagtttggtcacaagcgatgcaggaaaggcagatgtagcacacacgtaactatcgtgccttctaattcccaccggggcagacatcactaatcgatgacaatactctgctgatcaacacagaagaaacctcatagtcatttcaggccagtgcattggcagctgctatcaatggtctgagtaggtacaagactaaaacctgt

SEQ ID NO: 46626 - DNA, 1716 bp, Bovine  19866881022658
  misc_feature (1)..(1): n is a, c, g, or t
naactgaactgaactgaagtttatgtcttagaaaaagtaaaagtaagttgctcagttgtgtctgactctttgcaaccccatggactgtagcctaccatgctcctctgtccatgggattttccaggcaagagtacttgagtaggttatcatttccttttccagaggatcttcctgacccagggcccaaacctgggtctcctgcattgtaggcagacactttatgtctgagccaccagggaagtccatgtcttcagccatgttcatggtaaatcaacttgttagcttgtaaatagggtaaaatttcagacttttcacagttcttaacaatcatatgaccttgaattgattcctctgttcaatacatatttttaaatgacccttacggttccatttgtgttctaggttgttgctttttttttttttttaatggaaaaaagcgaaaaatattccactttcatgtatcttacactctagtggcattagatggggcaaggtcagaaaggatacctcaacaagtaagatatatgatatgttaacatagttattattgctttgaagaaagagcagtagatagagagtttcatggtcatggttgagggatagtagctgcaatttgaagttgtagccttagcaaagacatcactgagaaggtgatgtttgaataaagatcttgaaaagtcaaggaaaactctagaaggccatttgatagtttcttagaaaactaaacacactcttaccatacaatctagaaatcatactcctcatgatatataaaattgagttgagaacttatgtctctacaaaagcctgcaagcaactgtttactgcagttttattaataattcccaaattttgtaagcaacaaagatgtctctcaagaagcaaaggaattgcctgtgatatgtgcatgcaactgaagattattgataaaaggatatgagctattaagccatcaaaagacacaaaggaatcttaagtgcatattggtatgtgaaagaagttaacatgcaaaatatacatacatattcatgattccaagtgtatgacatctggaaaagataaaatcatggaaacagtaaaaagtcgtggagacagtaaaaagataagtggtttccaagagttcagggagacggaggaatggatatgtggagtatgggagatatttagggcagtgacactattctgtaggatactctaatggcagattcatgtcattgtacatttttcaaaacacatagaatcaataatacaaagaacaaaccctaatgtaaacatgtcaagtgtggatttttgttaataatggctttaatcaatattattcatcaatgtatggcaagtgtaccacattaatgcaaaatgctaataataggggaatctgggtgggtaaggtaggtttgaagaggtatatgagaactctatgtacatttcactacatttttatgtaaacctcaaccagcccattctgaaggagatcagccctgggatttctttggaaggaatgatgctgaagctgaaactccagtactttggccacctcatacgaagagttgactcattggaaaagactctgatgttgggagggattgggggcaggaggagaaggggatggcagaggatgagatagctggatggcatcactgacttgatggacgtgagtctgagtgaactccaggagttggtgaggacagggaggccggcatgctcgattcaggggtc

SEQ ID NO: 46627 - DNA, 1452 bp, Bovine  19866881163542
  misc_feature (1)..(1): n is a, c, g, or t
nggaagaagaactgcagagacagaaaacagaagacagcaggtgtcaagactaaagtacggaatgcttggtgtgggcaaggaaccctagagcagatgactgacagagtggggagatgagatcacagagaagggaaaggaaggggaagggagagaagaaacctaaataatgaggagtactgtaggttgttttaagaatttttattttcaccctggatgagatgggaaggtttaaaatggttttgaaaagagatgtgatttttcttaaaggatctttctggcttctgtgtggagattagaaggagtgtagacgaagctacaaattaaaaataagaagttaattctctctgttgaaaatagagcccccatccattttcttagagaacttgtaaattctttcactgtctctttgaaatgtatgtaaatcttttcaaaatctaaataagtctcccgccagctttacaacctaggaatgtctttctcaagggcctgagagccatttctttgaaatgtaatcattaaaaatgatagcacccctatctcccaggttctgcagaagagcacaagcctaacttctgccggttccttgctccaagctgtaaaacagccttttgccataaagatatgagaaggttttacatctgctttggataaagccaattagctaacacaaaaggtcactccttatacaaaacgaatttagaatgaactgtgtgtgacaaattatgctggcaggtgctcttacttgagaattagttatttatcttgaaaacatgtatgtaattggttgtatctgcttcattgtataaaagggagagatttcttctgtctttgcaacctcctagtggattgcctgtgatgtacactcaagctctggtttaatgcttattcagtaataaaattgtttcttttctacctttgtgaagagatttctaggcaggaagaatattttgtttttaatatatcctcccaaaagggcaagggcagaaacaaagaaaatagttaagatatcgatgtgatactccagcagataagtattggaggctggcagcacctgttagcagtagggactgaaatgtgagtcccttctaaaccattctaaaccttcccatctcatccagggtgaaaataaaaattcttaaaaaaaaaaaaatctatagcactcattttttaagtttcttttctcccttcccatcctttcccttctctatgatctcatctccccactctgtcagtcatctgcactaagtttccttgcccataccaagcattctgtttttcagtttaacgtgctgtcttctgttttctgtctctgcagttctttcccatatctctcgaaagctgttcctccactttcttccctctttatcactttatcactaaggacttttgtgaccagctttgggtagcctgctacttttctcccccttatttcctatccttctatgcactaca

SEQ ID NO: 46628 - DNA, 694 bp, Bovine  19866881170176
  misc_feature (1)..(1): n is a, c, g, or t
nttttacgcgggtatagttcgaaagctctggagagtctaagagaaaacatacagtaagtcccccaccccacccccgccgtcattatatagaaaagagacagaaaggaaatcctcctcactcgggggccccttttgtgttgttctgccaacgcagcagccctcccgctatatagagcgcgcgccggccccaccgcactgaactccatccccgcgtccagcaaccatggggaaggtgagccccgcgccggcgggaggggcccgcagcccggctggaggccaggcctctgagcctctccttcccttccttgcagatcaccttctacgaggaccggggcttccagggccgccactatgagtgcagcagtgaccactccaacctgcagccttacttcagccgctgcaactccatccgcgtggacagcggctgctggatgctctacgagcagcccaacttccagggcccccagtacttcctgcggcgcggtgactaccccgactaccagcagtggatgggcctcaacgactccatccgctcctgccgcctcatcccccacgtgagtccggtgcccctgggcctgccgtggcctctcgtcagccgtggtcaggctgtaggacggtggcttcctttgctggtcctaaccggatgctcttttcctttttaatatctcttaattggagaatgcaatgctcttaa

SEQ ID NO: 46629 - DNA, 1912 bp, Bovine  19866881178085
  misc_feature (1)..(1): n is a, c, g, or t
ntgaaaaactgcacctctttctctcccagaatttcttgatactataacaggttacacaggactctggctaatgcttattatgcctctcctgcccattcagtcatctgtctctcctctgttaaagctatagagacagtcctcgttagtgcctttttgtcctatgaaccggaaccattgtggatcagaacaaaaaaagtaaaaggttgaaaacaatttattagactagctgagcaagtgatttctcagggattcacccttgatcttttcaggggcaatatttccataaacaaattggggctctgttatttcccatgaagatacctaaccccaagcttaaagacatttgaaagctagaatcactttattttttttttgctttaatgatttaagattgaatgtcattgtgctctcaagcttactagataattgagcaaatatgtgctttatttgatgatatagtcatggctctttaaatatcaatgactaccagtgttagagtataaaataatagttggcaaaatatgtagctattatgaatgagacacaacactataaaattcatcattttaaaattaatggggtttgaacattattaacttagaattaattgattgtatcttaaaaaaaatcatgattatataattataaatctcacagctcccttggagagaaaagcactttactggaagtataggcttttaaaattcctttcttgtttagtgggaagagtagctatttttaaaaataattgctttatttctttagtgacgtttctgtttggggttttgtggcagtcgaggcacattccatcattgtctttttatatttcattatttttcatatttgcattattaaggaatggattgctttcagtaagaaacatgagggtttattgtttgttatgttttgtctatggtgaaggaatggtgggtggaaatttgtttagctgattaattctcatcttgtcgttcagattttctagtgggtcctgcactcatgcagtgactggtcaggtaagtaatgtacctttgattatgagctgatgagaaaaacaaaagggaggtaaattgatgatgaacggtttcaactctgtgtaaggcactggggtgggaaatctgactactcaccaccaacactctcaagatggttgatcactgattatgtgcaccgctctcagtactttaatgcattacatcatttaatttttacaactactctttgaagtaggcattaaaaatctccaccttggaagtgaggaacttaaagaatggtcaggtcattaaatgacagagcagaacctgtatttccccaagtgtgttttacacaacagggtcaaatgagatgaatcctagaataataataagtaagcacacaaaagtatttgttgagtaaattaatagaatcatgagaactcacatttattcaaactcaactaattacttatcatggacttgttaggactgtaactgattgatttcacatatgatgattcatttaatctttttttaaaattccagataaggaattgtatacctttaggaaatggcaacccactccagtattcttgcctagagaatcccagggacgggagagcctggtgggctgccgtctatggggtcacacagagtcggacacgactgaagcgacttagcagcagcattttataatcagagaatacactatcaaagtatacttagataagattgtgcacgttcagggtggtatggcataggtattggcatatataaactaccatgtgtaaagtagattgctagtgggaagctgtacatagctcacagagctcaacttggtgttctgtgatgtcccagaggggaaagatgggggcgggtgggtggggaaggaaactcaagtgggagaggatatatgtgtacacatagctgattgactttgt

SEQ ID NO: 46630 - DNA, 1519 bp, Bovine  19866881261122
  misc_feature (1)..(1): n is a, c, g, or t
nttcctcattccacattataagtcatcctgaaggcttccctggtggctcagatggtaaagcatctgtctacaatgcaggagacctgggttccatccctgggtcgggaagatcccctggagaaggaaatggcaatccacttcagtactattgaatggaaaatcccatggacagaggagcctggtaggctacagtccatggggtcgcaaagaatcagacacatctgagcgactttgcttcactcacttcctcatttcactttataagtcatcctgaaactttatgcctgtgagcttcataccattttttgaatttggaagcttccagtttgcaagctgttttttagatgcaccacaataaattcttagtcaatgctatttatcgatttggtagttttaattttgctatttctggagttttttcacagctattacaaacaactcagtctagtctaccttgccagcacacctccagaattcagtatgtggacaaaagaatttacagaagttgcactgaaaaatgaaatgccaataagagttgactaaatttaaaacttttgcttcctaagagacacagatggcaagtttgttatagttagctcatcacagaggtttttaaatagccctgtgtaaaaatcaatttatgaacatgtagccattaaaatgcaatacatctagtcaacacaataaatatgcaataggcaagaactataatagatggcttcacacttacttttaatactaggctcaaatagatttgatggtttaaaaggtgttaggaaattttatgtttgcatgtgtccattctagtggtaagtgttagtcactcagttgtgtctgactctttgtgaccccatagactgtagcccaccaggctcctctgtctatgagattctccaggcaagaatattggagtgggttgccattctcttctccagtctagtgggaaatgaataagcaaaaataatgtaataagtatgaggtttttcttcatatgcttctgcttaatttattgttgcaatgtgaaaaatattttaatgtaacactagtattagattttcttacaaaaatcaatctaatggaaaaacaaagccaacgcatgcacaagatgaatgataccaacatatgtacaaggtgaatgatacccatagcaatttttttggtatatttccattgccagtaatggtcattacctagaaaccctgtttgtaacaaaacaaaacaaaacaaacaaaacccacattttttgaggtgattaacagtgatctaaagataggaattctgtattgatgtgttattattccactattctctgagtaaattgtggtttctgggaaggaattatctttgaaggtcttggtaagaaaatgctgaaatggcacatcacagcctgacgctcccctggatgagtcatctttacctgatgccggagaggctttctgaaagaccaactggtgtacttctctcctgttggcataactatatttagaatccataactagagagctcaaggcttctcagg

SEQ ID NO: 46631 - DNA, 848 bp, Bovine  19866881887623
  misc_feature (1)..(1): n is a, c, g, or t
ntctatacagagttaaacttctagatcaatctttgtgcatttagtactgttcagtatccatttaaatttgtctcacatccgacagaattaaacattaaaagaatatttacaaaaatagtttcatcatactagtaatataattatctgagaaaattgggagaaaaattctgcttagtttgggtattgagaagccaaagttccattaattatttgctgacactccagattaaacgtatcatatatagactgcaaaggggggactgacaggactattcttcttcagttacggttctttattacctttctctaaagatcaggatcactgtttctgtgttattaaagacattaatctaaaaatacctgaaatgaccctaacaattgacttgctagtgtgatggtttgttcagctgactgatcatgttaattagattggcgaactagagaaaatatccttagttttaatgtgatactctgaatatgagaatttggaacttccagacaatcaatctgctattagggaagatgaatcatcttcagagtcaaaatagttaatgtaaaactgaatagattacagaattaaatattatcacccacagagtttttcagggatctagatactatgcctaagaagaccttaaaattgagtgaatatcattggaacacttagtgcaaagattttggacatattttattagaatgctttctactctgtggtttgaaagtgaaagtgaagtcactcagtcgtgtccgaccctcagcgaccccatggactgcagcctaccaggctcctccatccatgggattctccaggcaagagtactggagtggggtgccattgccttctccaa

SEQ ID NO: 46632 - DNA, 1166 bp, Bovine  19866882053722
  misc_feature (1)..(1): n is a, c, g, or t
naataaataaagattcatttagtgaaatgtcaaaacttaaggagaataacaagagcaaatttttcaactttacttctaatacccttagctgaatcccagggaggcaaaaaggcaatttgcaagttaaatcactaataaaccaaaactcaattttgtaatcacctttcctgagctgataagcttcaagttcacgagggagcattgactgcttcctgggaggcagcagagaacacccaaactcctgtcactcttttctccagcttatctctttctgcctaaataagctagaatcgggaaaaaaagtttatacaaaaaagaaggaagaaagagaaggaaggcagggagagaaggaagaaagaaggaaaggataaaaaagaggaaagaaatatagggaactggagaaggagggagggaaggataagaaggggaaacaaaaggggaggaatatttaaaatataaagagcagcataagagaaaggagggaataattgacttttatttaaaaataatttgttacttagcatctttcttttttgttcatgttaaattctgataaatcacacagcatgttaataaagtgctgatggtgatcaaagtatgtaaaacctgatttatatacatatgtgaacaagtttagctgagtattttccaaaatgtgttttgtggaatactgatattcccaaatgattatcactgaaagaaagtatttccatgaagaattcctaaaatgggccattttatgttttacacatatgttttgatgaaggatactaaatattttaataatgccagcaataagggacttgttcagttctggttgaccatgaatttcttaagctaattttacccatttacccatcaccttaaatttgtttacctttgaaaagtacctggtgtaacatactcattagttaccaccacaggttgtcactacagggcccacgaagaacctattccagaatatttcagtggagttgcattaatctttgggggaaggtctctgtgagtgttaaaaatgttaaaggacacttcggataaaatttttctaaaatccacaccttgaatttgaccttcttgttaagggttgtactactggacaataaactaaatacaaaatctatttcaagatcagataaattatttgggtgtctattacctttaggcat

SEQ ID NO: 46633 - DNA, 1673 bp, Bovine  19866880554695
  misc_feature (1)..(1): n is a, c, g, or t
nacagctggaaacacagcacagatttgggcagtgacttttcaaagcgtggtcacatacacatatacatcacaacaaaagaaaatatcctgtgggctgagtgtgtctgtatctgcacgtgaggcacatacacactcaagtatactcagtcacacaccggcaagggcagagacgcaaaccaactggaaagcgcagagacaagcccctgatacccgcctgccacccagtgcaagtttccatttatctcccacacactctcacatcctcacacaggtcaagtcctgcaaggacgaaaacaggcagcagtaaccacacactcatctctcagaagtacaaagcgactcacgtagagcccccaccggcctagggtctccttgtaagaaggcctccccgaccagcagacactctctcccggttgctactgtcctgagctcgtaacccgagtggcctcccgggctgaaggaggaaatggtcgtcccagatctgagagacgctgccaggctgggctctgggcctgggctggggcccctccgccccccactggtagtctcctccggctcccccttttggccgcagagaaagaaacctcagaagtcaaggagacgggctagtggaatggagtgtccaggagacagaagagagacgtagggaaggtggggagaaaggtgggtgatagagagagagatgagaagagagaagtgggaaaagcggcagaggagaaagacggaaacttatagatgatgaatgagacaattgatggcaggagcaaggctggggagagggaggcagacagggagaagacagggatggggagggggagacagaagtggggagaggagaaaaattggagtggggagacaggagaggggaagcaaatggtggggagacaaatgaggcaggggagtaaagtggagaggggagacaggggaaggaaacagatggaacagggagagagatgttgggggaaatctcttcccccacccgaaggttctggggaagaagccagaggcctgaggccaagactggggctttgagcggaaactgggaggggggaaattattgaccaagcgcccgccttgccctgaatttccagaaggtgatgtggagtttccatcccccagccagtccacagacagggcctctgcgagggacagctgatcctcaggagctgggagcccaagcgagtaattgccaaggagctacccccttctcaggctcccaagtgccaggctccagggtgccaagtattgtgtacacatcatctctcttaattcgcaggtcagagaggaaatgatgatcatttaggatattttaggagcctcagagtggagaacttggctctcaaaatcgcacagctggtggaaatggcagaggcgggattcgaaccagcggctcagttcgaaccatggccccgccctggtttccgtagaaacaggccctctgtgtctccatagcaacccctccgcggacttttttttttttccccgccacctggtgcgcatgcactattggtgacgtcatcgcggcgcctcacatagtcgactcgccagagccggaagtgagcggagcggcgccggaagcagccggcagacgagacctcgtggaaaggacggcggcatgggacagtcggggagggtgagtcccggcggccaggacagcgggcagcgcgggcggg

SEQ ID NO: 46634 - DNA, 2454 bp, Bovine  19866880566439
  misc_feature (1)..(1): n is a, c, g, or t
ntctgggatttctttggaaggaatgatgctaaagctgaaactccagtactttggtcacctcatgcgaagagttgactcattggaaaagactctgatgctgggaggggttgggggcaggaggagaaggggaggacagaggatgagatggcatcactgactcaatggacgtgagtctgagtgaactccgggagttggtgatggacagggaggcctggcgtgctgcgattcatggggtcacaaagagtcggacacaactgagtgactgaagtaaactgaactgatgtggcatttgctttgagactggctcataggtgaagtctggaaaagatggtaaggagcttggtaatgaagcctagaggaatgataaaaaaacttttggtgcaggatgaaacggaaatgaggggaaaggtcacccatgttctgtaatgatgaaacagttacctgaggtaatttggaaagcagagactgtactgaactcctagatctacttaaagagatcttttagataaagtgttaaaagtatctattgaatgcttatgattgttttttaactataaaaaagaagtgaactaaaaaaggtgttccaaacttgttgagtttaaaaatagagctgtttttcattaccgatctctctggtgctggcaaaaaattttcaaagtaaaaaatgacttcagagtagagcccaaatcaagagtgcctggaagatcctttaaaacctcagaaataatttaagaactaggaaaaaaaggacttctaagaattttaaaaacgttgtcccacagcagcctgacatgcccaaggtatagagaggtctgtgcagaaaagttatggatatgtttttggggcaagaagtgaattttcagtatgattcataggaaactcataaacttttcaagatacttatattgatgaatgtaccaaagggactgcaagggacagagacagttcaaactttaaagaggcctcagaactttcaatttcctatgaataggaagcagactgggaaagttgttcagctgtaaacattagtcatttctcatagtaaggggagatttttccggaccccggagggcttctaagaacagaggggaaccatggattaggaagccactcccagggatcagaattggaccacagagaaaagcaaaacaaattccatgcctgtggagtaaggaaacctgacaccgtctacccatctggacttcagaattgggtgtggaccagtgactgttacggagaaggcatggcaccccactccagtactcttgcctggaaaatcccatggatggaggagcctggtgggctgcagtccatggggttgctaggagtcggagcaacttcactttatttttttactttcatgcattggagaaggaaatggcaacccactccagtgttcttgcctggagaatcccagggacaggggagcctggtgggctgccgtctatggggtcacacagagtcggacacagctgaatcgacttagcagcgtagcagcaatgcagtaactcagacttccctggtggctcagacggtaaagaatccacctggaatgcagaagacctgggttcaatccctaggttgggaagagtccctgaagaagggaatggcaacccactcaagtattcctgcgtggagaattccatagacagaggagtctgacgagctacagtccatggcattgcaaagagtcagacacaactgagcaactaacacacaaacacacacacactcacacacaaataacaatttttgtagactgttaggtggcctctgctggtctggtcagtgtctatgagttagggagatggacctctagccccaggagatgaatccctgcccccagtcccttcagcctcatagctgagcttgtggcctggttattgagagagagacgagccaggagtctgttgatttaagctgctgctgctaagtcacttcagtcgtgtccgactctgtgcgaccccatagacggcagcccaccaggctctcccaatcccttttttttttttttcctcccaatcacttttaaattgtttgagcatggcttctttgtgacaggcatgtatggtcttaagataacccgtgtctcccccagggtctggtctgtacagcctgattatgacatttgcctatttttagaatgagtagtccaggtacttaaaatagcaggaatttctgtcagctacataaaacatttttattaatagacttttccccttttctctattagaatcaaagccctcttggcttctggccatacttagggagagatgaagtgtgtggttatcagattaacttaaagcctatttgttagagaggggagctggtgtctctcttgcagaccactgtggttctttccccctcaggcctataacgccaagagcaaaagctttgaagatcctccgaaccacgcccggagcaccggaaataaagggaaagggaaggggaaag

SEQ ID NO: 46635 - DNA, 2116 bp, Bovine  19866880597057
  misc_feature (1)..(1): n is a, c, g, or t
ntaaaagccccaataccccttttcttacctaaattagactctaagtcactcttctctcagtagagcaaatgtggagcctgggattcttaaatgctccttctagggtttcaccagaagagaggtcctgaacatggctctctgaacttcctccaattctcaccaaagtagcattcttaaatctgctgccctctcaccaaaataagagtacctctcctagtttcacaccatagtaagaattttgttccttatcagagtaagagcagtatctccctgttccatcaacagaagacaaatgcatcatttccccccagtcccctcaccataagaggaatctcacattaaggtcctgactcctatttccctctattcatgctgcactgggaatcccctggctcctcacacccccaacagccacgcccttgacttacctgctggtttaggaggaacagcagggtgccccaagggcagaggagaggccaggggtcctggctgtctcagggtctgatctctctggggttctgcagctgagtttaacctcctgccagtgtcatcagtgccacccaccaaacttacaggaaccacaggtaccaggggtgggggcaggacctggggtaaccaagaaagtcagatacgttagccctggaggctctgggctcctacatctcccagcacccagatgggaaggcgatcaagaaggagcatggcttgatcctcccgtgcctaactccagcagtcaagaagagacagagttggacttcccggtggtccagcagttgtgactttgcttctactgcaaggggaagggttcggtccctggtcggagaactaagatcccccatgcctcaaggtgtggccaaaaattttaacaagagacagagctgggcttaaactcttgctctggtgcccatagcttaaccaatctgtgcctccaaacttttctgtaaagcagggataatatgaggcaatccaacacttgagtattaacttactgaagcctcccaaagctgtaaggtagctaatgtcagagcaataatctcttattcaaaacccaaggccagacatagtccagaattctgaataatacagcaggagttagaaacaataactggagaaggaaatggcaacccactcccaatattcttgcctgggaaaccccatggacacaggagcctggcaggctacagtccatggggttgcagagagtcagacacgacttagactaaaggacaacaagaaacagtaacacagggtctacatatattccctagcaaccccaatgaggtctttggtcttcatgcacatattaataatatacctgattacaggaatctgcctgcaatgcaggagagctgggttcaattcctgggtcaggaagaacccctgaagaaggaaatgacaacccactccagtattcttgcctggagaatcccatggacagaggagcctggcaggctacagtccgtgggggtcgcaagaatcggacacgacttagcgactaaaccaccaccactatgagtattcatatcaggtagataaacactttaagtagctaccagtagcgttttgacccaaatgaattgttggaggagaggcagggatccggtttatggagcttttttacttcagaactgcagataagagatcgtggggtttcaagaggccccaccttacaatgcccacaagaagtggctgcgatttggggagggtgatagtttcggagttacctgctgctgcccgcccgcactccccgggcacaagcgctccaggcgggcgatgaggccactctgctggctgactagctgtgccagctcgcggaacttgacgtccagctggtggaagcgggcggcggcgcgctgagcctcggcggaggcgttcagcacgcgatccccgagcagcgccagcgcggaggcgggctccgcccccgggctaggcgccgcccctgggcccgcctcgtgctgcagctgcgcgcgcagctggcccaggcgcgcgctcaaaccacggctctccttgcgcagcgcacgcacttcgccggctacggcgccgtcggcagttgccagccgctgaagttcgcgcagcaattcctcgtggcggctcacgcgcacgcgcagcgccgcca

SEQ ID NO: 46636 - DNA, 1375 bp, Bovine  19866880671465
  misc_feature (1)..(1): n is a, c, g, or t
nttgtctttcggggacatgaaacgcattgtaatttttttttaagtctttttttttttttttaatttgttaaaacattctggtgttttaaaaatttttttgttggagtatagttgattttcaatgtgttagtttcaggtgtacagcaaagacaatattctgttttatgttttggttttttggctgtgaggcaggtggggatcttagctggttgaacagggatcacacttgcacctcctgtgttggaaggcaaggtcttaacccctggatcaccagggaagtcccgaaacacgttgtattttgtcattaaataactttccttttattttagtctttatatcatatgtatggcattatattacgttaaaacatgtaggtcagaattgttgatatatggcagaaaccaacacaatattgtaattatccttcaattataaataaataaaggaaaaaaactgcaaaaaaaaaaaatgtactgatctcttttgagtctgggggagatggtccaaacatttgtcaggaaagggggcttctgagtgtgctggggctggcacatagccagccgaagggaaagagttccctttgtcaccagcctttaatccagtccctcccctatctctccatggccttaggaccctccaaggccagagcattccctggtgccctgctagggttgatgtctttgctgaagtcacgccgattgcaagaggggattgctccaccatgtgtggtcatacttcctgccccctgctagccggcctcgtgagtaatttctgtccatttcccctcccacagggacttccttccccgaggttcaggaatcgtcactcggcggcctctcatcctgcagctcatcttctcaaaaacaggtatggtggggcggctggcagcccagacaggaaatgagcgtggtggctgtgcctcgtgggagccaggggcttccgaggtgtcctaggaggccgtttgggtctgcattccccttttcccagtgggcagggaagttgaagcacggttcatggaacacctccacccaccccaagcatcagctgtgactaggctgccaggtgccacattttttgctctatcgtagatgacacgttcttgctggacactttcaaaatcaatagcagacactgtgacacgtcagcctgaaaggctttggtgtactccctttgcaataaggacatcctcttgcactcacagaaccacacccaagagaagtcatcatttctgcatgttcccttaccccagtccatacccatgttgtcagttgtactccagatatcttccctggctggttctacaactgctgggatcaatgccatgctgcctttcattgtcctgtctactcttttcatgcgagcagcattctcgcca

SEQ ID NO: 46637 - DNA, 2369 bp, Bovine  19866880682077
  misc_feature (1)..(1): n is a, c, g, or t
nccctactctgagacccaggaccaggtgagagaagggggcctttgatagtggaacttgaggccggggaaggacacagagagtgttctgtcatcacaacctgtgggcctctgctggctacagccttctctctgcagcaggaaagttctgactgttggtgacgcagggagtctaccccgaggctcctccctctctccctcccctccctcctcctccttgatccaaagaccaggcccagcccccactcctggaaagaccagaggaagacatcttcactcccagggcttcagtcgcactcagacaaaaagtccgagtctgtgctgcagccaaaggccctgcatgatcctccttgcctccccctgctctcatctcccagccactttccccttgcttgctatgcttcagtcatatggggcacctccacgcccctcaaacacaccaggcacgctccagcctcagggcctttgcacagccagcttcctctgcctgcaaccgtcctgccccagacagccatgtggctggctcctcatccttcaggctcaaacatcacctcctcagaaagaccttccctgatcactctcctctctgtttaaaatgacacgcgtgggaattccctggtggtccagtgggttaggaccctagcactttcactgcaagggtctgggttccctatctggttggggaattaagattctgcaagccacatggcacaacccaaaaaaaaaaaaaaagatgcccttcaccaggctgttatttcattcctatcacttcccttgtcccctactagctgactgaatatttacaaaactccttatttatcatctgatgtccattgccaccccctcgtaacgtgcaagagggcagggacttttgtttcattcgctgctgagcctgcaatgccaagggcggtgcctggtgcatagcaggtgctcataaatactgtggccagtaaggaaagggctgctaacgtctggacttcagaggccggtggaaatccagctctgctgcctgctggctgagtgacctgtgccagcctcttcagctcttgtgcctcagtttccttatctggaaaatgggaagaatgactgtacccattgcatatggtgaaagtgaagtcgctcagtcgtgtccaactgtttgcgaccctgtggactgtggcctaccaggctcctccatccacggaggaaaagaaactcctggcaaattgggagagtgatgactcccaggaggagagaagagtgtctacaaaggtttggccatgaaaagatggagcctaggcagtgagggccgatgggagggacttacctgggaaggagacgtgcacaggctcactgaggttcgacagctggggttgcctattctcgccaagtacgctatactggcagcagaacggtccccctcgaacctccctgctgccaccactcaggttgaagatgaccctgagctggtccttgggggctttcaggagctccaccacctccccatcttgatacagcgtgaaattcgcccctgggaaacccctgggggccatgcacgagatgtggatggggtcctctttactgctggggtgtgggggcaccagcatgatggatggcgccgggatcgccaaggagcctgcaaagcaagataggggaggttaggtgcgggggtggttagagcagaggccagcctggctgtgtggccttgggcaaatggctcaccctctctgggccttggtttttatgtacaactggaggctagttgtccttgtgagtgcatgctgtcgcttcagtcatgtctgactctttgtgaccctagggaccgtagcctgccagacttctctctccatggggttctctaggcaagaatactggggtgggttgccatgccctgctcaaggggatcttcctgacccagggattgaacctgtgtctcctgcattggcaggcaggttctttaccactagcgccacctgggaagcccctagttgtccctatcctactgctatgttgagaggatcaagcgcccagcacatggtgagaggtcatgttgttggagtcattttattataatagccgtggatgttgcacagcatcacagttacactcgtattacttctatcaacagcactgaccatgtttaggccctgtttaggctctgaggacagagcagtggatgagacagacggacagacagatgaacagacaagacatgcctgctggggagctgacattctcaaggagacgagggtgatggggtagcctgagaggacttccctgaagacacagcatggaagagctgggagcgagcattctaggcagagggaccatctcaggcaaaggctggaggctggaaggggtgtggagtgctcaaggagtctgggggcaggagg

SEQ ID NO: 46638 - DNA, 1441 bp, Bovine  19866880721623
  misc_feature (1)..(1): n is a, c, g, or t
ncacagcctttccagatcatccttcagtgcaggcacccagcccagaacattccaccccagtggccaagaagatgctcttcccagaagcctttgcaatcaaggttgccactttctcagcagccccatggccaggggcctctgcttcccagggaccccgcatcccaagcaagaaatccccctcagtgcatcttctctgctggctccccagtgcctcaccataggtctggagcttcctgggggccgaggtgttctggaagagttccagcccttgtgaccgcaggtccagttcccagcggcaagagaaattggtgccatggtcctctcttctcgactgcactgtgaacatgaccttggcgggctccccctttcccacgggctgccggcccagctcctcctcccctcggagcagcaccacggagaggtgggcccggggggccccgccagacaccaggcagctcaggttgagttcttcacccacaggctgccagaggggcaggggagccagctccacatgctccgggaaccctgcaggggaaaggggtgttatgtgaacaggacaggctggctgcctgcccacagcgggtgtgttggggccctggacacacctgctccaggaacctcaccactttttccccacaacactccccaaaccacctaagccagatgggaatgttaagagcttcaggataacctggtgagatgtccccaagtggttgtgaaggaggcaaaacaactctttattcattgcagcatctgagagtcacaagtgggaaaggaacttaaaggctattgccaggagtcccagcaaataaatacagtacatttaagctgcccagtctctagactttgctataaaaaaacaaaacaaaacaaaacttctgttcttccttctctctttggccatatttttctgcatagcatctctcacctctgaggtacaaaatcatcgactgagttcatttgttttctattattcctgccatggaatgtcagttcaggagggcaggaatcttttttttgttccctgttgtactgttggcacacgggaggtgctctgtgtttgtagaaagaatgaggttggagtacccacacctatttgaggcctttcggaagcctgcttttgaaggttcccaaataaactgtctgatcccctgaaatgtcaaaaatgtaagaacaacccacagatgctcaaaaaaaaaaatacccccaagtatcccctgaaaccagtatctgtgggcagggtattcacaggccagggtctccattctgcatgaggtaagaattccaagcctggatcttcctgccagtggaaattgccagcattagctgtggcttagcattgagagccccctgctccaccctagactccccaaggagaggtcttgaggcttcccactcctagtcccttctcaagtggccctgaaatgtcacttaaacagca

SEQ ID NO: 46639 - DNA, 2488 bp, Bovine  19866880881689
  misc_feature (1)..(1): n is a, c, g, or t
ncttgcctgggtgccaaagggaggacccacgcatggtggaggcccagtccttccctgcccagggcaacccccctctgctgacggacactggcttagctggttggacctgttctcactccgctgcccacaggaacactgcccaagccaggaacaacaggctctccatttcctctgtgtcttttgcttcttgttcctttattctctttgctcccttcccccgaaaagaggcaagacattcatcttagtaatcaagtcagaccatgatttttccagcgaaactcatgacagttctgcacacctgaatgactaggtagaaacgttcacaaggatgagctcttgggtgaggcgccagccagcttctctgacttcctctctcttccttgtgtgtggggcaccctgtgctgccccaggtgaccccgacttccatttcctactcatcagagtgctgccactcccactgtccccatcctggcctttgggggtgttagctgactgtttccgcagcctcctgttgccctggttcactctttctaacctctgtatgcccttctatggactcttggtcaggttcaactggaggaagaccacctgttggtcacttaacttgggaaggaccccaactatgcttccactttcccagtgccttttttttttttaaatcttaatttttgactgcactgttcaacatgttggatcttagttcccgaccaggggtcaaacctgtgccccctgcattgggagtgcaggctcttaaccactggaccgccagtgtctttaaagtaacattgtcatagagtgcctgtattatccctttccactatcagaaaaacaccccccaaaaagggaaccttacttagattgcaaatgacttcttaatgtgtatgtaggcacttgcagtggggcattctacacattgagcagggggaaccattgtattttctaatatccgtgttgaagttatttccaaagttctttaaactgtggtattatagatgaacagtgttgcttaacaagcgttttctttcttcccttttttcttcccccaggctcaaagatttggaaagagatagtttgacagaaaaggtaaggtcatctccaccttaacaaaatctattatcagatgtgactgtctgatagactatgtagctcaaagtggaattggctctcttttccttaaactcttaaggataacttggatgtttttgtctaatgtgctatattaataggctgttatcagttagcttttggtaactcatcaagtttcccaatctaggttccctatcagcaagtctagattataacttgccctggtcacactgtttttttcagaatcagttttgttctactataccattatgtgtctgtttcacttcctaatcttcccatttttcaccaccctgtagatggtgtgatatgatctttttttttttttttaatatttatttggctgcaccaggtcttagctgtggcacatgaaatctagttccctggccagggatcgaacttgggtcccctgcattgggagtgtggagtcttagccactggaccactagggaagtccctcttaaaaaaataaaaataataagtaatatgatcttaatggaactatcacgaacatgtcttgactcagcgttgcctgcctttcagtcattgttatgtggccaggcagtgtaagtgtgccttagtgcgttgttttagagtgtggggacttctaaacatatatccttcccttaggaatgtgtgaaggagaaactgaatctcttgcacgaatttctgcggacagaaataaagaatcagttatgtgatttggaaaccaaattgcataaagaagaattatctgaggtaagtcttcagggtcctggcgtctggaagacttggcctcccgggtaactggtctgtgaccagggaggctgaataatcccaactccccatgtcacctgatagttatacaaagggaacacatgtgtttccttattattctctcattgccacttgtttacattcactgctactcaaattatcctttcctgctgtaggagggctacctggctaaagtcaaatcccttttaaataaagatttgtccttggagaacggagctcatgctttcagtcgggaagcgaatggatgtctagagaacgggagccagacaagtggtgaggattgcagagtggtaatggcagagaaaggcaagccccccaaacctgtctccagactttacacgcccaggagaagcaagtctgatggagaaacaaagtgtaagagcattcgactcatttgaccttgttggagtatggtatcaccaaaggggaggacaattagacttggcgccataggttcatcccacccgctcccctgggcatcacttctttcttgtgtatccatctgctgctaagtcacgtcagtcgtgtccgactccgtgtgaccccatagatggcagcccaccaggctcccccgtgccctgggattctccaggcaagaacacggagg

SEQ ID NO: 46640 - DNA, 897 bp, Bovine  19866880900936
  misc_feature (1)..(1): n is a, c, g, or t
ntcctgatccccagggatattgggggggtatatgggggtagagactgtgcagttcttgctccgtgtctttgggaccctcgtagttgccgcccacggaagggggttgaccacaccggccattgtccccaggtccttctggcctgcacaccaagactcggtcaccgccctgcgcttcctccaagagacagcagaggagctggcccagaccccctgggacacccaggctctggggccctactgggagccgaaggccctggagaccctgggacctctacctcaggccaaggatgacaagaacatgctgaccctagtcagccagcagagccccaacctggggtccccacgggctccccctacttctccagcccaaccacagagaaggccccggaagcagtcaaacccccagcggggtgccgaaaaagtggaccctctttttgagggggtgaccctgaagtttcagataaagccggattccagcctacagattatacccagttacaggtaggagctggcctgggcaagggcaccctttctgcaagtaataacaatatcagtgggccttccctagtggctcagtggtaaagaatccacctgccaatgtaggagatgcgggtttgatccctgggtggggaagatcctctggagaaggaaatagcaacctgctccagtattcttttgcctgggaaattccatggatagaggagcctggcaggctacagtccatggggtcaagaagagtcggagagacgactcagcaactaaacaataataatagagctggggggtagggaggtgctcccaggcatttgcttatggactaccaccccagccctgcattacaaatggcctcatctctgtaactgcctttctcctttttttatttctttatatttttaa

SEQ ID NO: 46641 - DNA, 1448 bp, Bovine  19866880922625
  misc_feature (1)..(1): n is a, c, g, or t
ncaggtagggctggatttcaacgcacagccctaacccatgccatttctcccaaccaactgggaacacaaggatcggttagagataagtgatacgagtcagtatttactttgtcttctccttcattcatttcagcctgagctcctccaggcctcacatctctgtctggctcctccttagctttgtgtttaggtgtcctgtcacagaaaaaaacacacagtcagctaagggagcccatcaccgtttcaagaagccacagtgagggtttacacggttccctcccccaagttagagagcatggatgatttttctcatctgaagggtaagttttcattgcaagaaacccaagagggctttggtacttcagaacttatgatctcagaagtgccaccaacacttcatgtgttgctgagacacgccgcagtttaaaaacaagagacaaaagggctcccctgatccctgataacctgatgggaatcctgcctgtggaagattcctgtgcaggtttgctagtgggctgaggtgacatctgagaagtcttcccctccttccaccagggcccaggcacttggttcaggagttctgcccaccccagactcaggcccagtcaatacctgcttcagtccattgcatgtcagaggctgcttttcactgccgccctcacacactgccactgctgagcgcacgccccagctggcctagtcctagggctgaagcgggtctgcctggccaagatcagtcaatggccactgagccgcaaacatataagctcaaaaagtgcctactgtcctgagccgctgagctctggggcaatttgtcacatagcatcttcacagctacaggcaagagacagagctgctcaacgctctttaaccaccacctaacaaactgcttcctgtatgaacagcagtaaggacagaccactaaggacaggccagcggtcaaggtcaggtcaatctcagttgacctcagcctacactgtggttgcctgaccttccaagaacagaagttacccacacattacacgtatgaccttaatgccctgtccaatccataatttttacgagaacacttacttttggaagtaaatttcacaaagtacaaaaggcatgttaactgtacttacggttctttggtttgacttctgagtctcttttcttcctaagtggatgggacggggaggcaaaaaaaaaaaaagactagttaatttccccccgtttgattctaatatttctattaaagagctttatggaaataaaatacctaaactgatcctatagtctaactggtaagaaggagtctcttctattcagatagcacattttttttggtggggtaggtaggcaaggagttaaagaactcttagattctgctgtttaagatggatttgcgggcagaattactgtcacttgtcaggattaagtgttgacaatctccttgataactttat

SEQ ID NO: 46642 - DNA, 713 bp, Bovine  19866880935843
  misc_feature (1)..(1): n is a, c, g, or t
nattgaatgtatttttctgggagtcaggagggggttacgtagccacgagggagatgacaggaaagcagagaccagcggatgaaacttgagggacacacagggacatccagctgactgacgaactgcttggtgctcccatttccatctcggcaaacccaggtgccgaggaggggaagactggtcaggcccgggcttgggcaggcactctgggctgtggggaaagctctttacctccctcttggctttacactccttgtcataatctcaggacctcagttgccctctgaggcaactgaaatggaggtgtccatacctgcctggcgtgcctgggattgtctgagggagtttggggtggagggtgggggaatgctggaaagcgtttctgccagcaacaggagtgtcatccagggaggttgctcaggtgaggttgggccccaaggatggaggttcatacaatgagacttggaaggcgggcgagaacgtgacctgctgccctgtccttgcagtatacaaagcggacgtggcacgcctggtggcccggccagaccccacggctgaatggaagtccgtggtcatcctggtaccagtgcggcttggtggagaaactctcaaccccgtgtacgtgccctgcgtgaaggtaggttctgccaggctcccccgtgcctccccgcacagcccccctcactggagccctgcagacattttcagcttgg

SEQ ID NO: 46643 - DNA, 1787 bp, Bovine  19866881022693
  misc_feature (1)..(1): n is a, c, g, or t
nggatcttcccaacccagggatcgaacccaggtcttctacattgcaggcagattctttaccatctgagccaccaagggtaaaatcaactaattactcttattattcaattatatttttattcttttatgaaggatctgataccactttcaaaaaaatcttgtttcacagaggaacaggctgagtctcctagagtcaagttttagggtgctccgtctttggcctctcctctaaaaatgaacacctgtccttgactcctttctcccccacacccaattcctcaataattctgtccaatccctcccaagtctgtggagaatccatacgtcccagtccttgtcatcactctcctaggcagttaccatcacccagttctcctggcttcaccctctacagagagcagaggcagttgtaaatgcctgagcctaattaagtccttcctctgcctagaaccttccaggagtactacttcactcagagcaaaagaagtttctcccctgggtccataaggctttgccccacctgccccattattttcctttgtttcttctctgcctctccatccttgctccaatagcactaagatctttgcttttgggagaacacacaggcatattctagccttaggacctttgcacctgctgttccccaattctgaaatgctcttccttcagaagttcccaggacaaggaattccctagcagtccataattaggactccctgcttccattgcaggggttgtgggttcattccagattagggaactaagatcccacatgccaaaaataaaagttcccaggataaaaaaaaaaaaaaaagttcccaggataataatcacctcagctcacagcacatgtcaccacttcttccaaaagacatcacctgaccaccatcgcatcactgtattgtcaccggaatcatctccacacttcttcacgcccttatcatctctgagtccgacacaagaacatcacttccacaaaagcagggatttttgtctgttttcttcattgctgtggagtttagcgtcaataaaatatattttcctaggtcttttctgcttccaccatcttcatctttggctgctttttcctataaattcctgtatttaaaaagtctgcaaaagtgctcttaggaagggcaatcgcggtcaaagggcgtcagtctgtagctggcggggttaccagggtcccggcgaccgtgggtgcaccagggcaggcggtggaaccgctggtctctaacccgtcccgctggggcgaggagcgctcggagcggctggagctgccatccaggccgggaggcagccagcggtgcaggtcgcccgaagccccaggggcgctcccaggccgccgggaggcacctgggtctcggcagcaggggccccggttgcagcagacgaggcgcaggagcgcgtgacgcaggtcgaggttggtgaacgtgtagatgatggggttcaggagcgagttggccatggccaggcccaggaaggggtctgcctgcaggagtacagggcaggcgcgcgccgggcacgccacgtccagcaagagcagcaggaagagagggccccaacaagccacgaaggccaggagcaccacgctgagcgtgcgcaacagcgccaaggagcgcggcgtgtggcgcgcgcgcatcgaggcgccctcgccagtcctggggtgcgcccgtaggcgccgcgccttggagcgaacctggcagtatattcgcgcgtagagcgcgcagatggcagccagaatgccgagaaaggcgagcacgcagaagagcacgtaggccttg

SEQ ID NO: 46644 - DNA, 964 bp, Bovine  19866881057311
  misc_feature (1)..(1): n is a, c, g, or t
ntgatgactggaagactgcccccttgtgccctctagtttaaggcctcccttaaggtaattctcaagttctgggattctggttaggtcaccccacacagtatctccctgaaatgcacaatgactgtaagaaatgagtcttatcacaattttacagatgtagaaatagaagctcagagagctggaaagtcttggtgggtgaggcgaagctgagattagaaacaaggtgtatggcctccagggaccccaactttgccccacgtcacactgcctccctactgtcaacacacacacacacacacacacctcagtgattctggaagccccattccaggcagagaaatatccaaggagtcccctgggatcacctgtccccagatcagcctctccccatttcagaaggtacaaaggtcttcagccaagtacgctccagtcctagcccctaagcccaagccctcatcaatgacaccctccatcctggcagggtgccagggctcctttcctggccccaggaaaggggcaacgaagctcaggtgctacctcactgtgggacagtgggcaaccctcccaaaatacacttcaatgactctgttctcaggctggtttcccagacttcatcctggcctgagcccctacctggttgaggaccttctgcaggtagggcgtgcccatgcggtcagccaagtggcggtaggaagggtgggagaggaagaacttgcgttcagcagccaaggcagctgtgatatctttcttaccatcgatgtccttctggcttcggttcacgactccaatgtagcctgtgggtggggtggaggtcaaggggcattcagtcttgcagggagtgaggggctggaggtgaaagggaagggctatcacgtgggtcaggggcatggcctacctacctctgcgcagcgggagcagcttgttctccaaaacatcgcgggcatctggccctgtccatcagatc

SEQ ID NO: 46645 - DNA, 1610 bp, Bovine  19866881087900
  misc_feature (1)..(1): n is a, c, g, or t
nggaccagtgagaatcaagactcttactcaagtaaggggttgactggttcagcttgtgcctctcccatgtccctgtgcccataggcccatggcaggattgtgcagaggcccgccaggcaggccatggacagagtggagtgtatgagttacgagtgggccggcacgtggtgtcagcatggtgcgagcaacagctggagggaggaggctggactgtgattcagaggcggcaagatggctcggtcaacttctttcactacctggcagcactacaaggtgggcacaggtgggtggggcagggctgggcaggggaaggggaccagctcctgcctttctgactttcttgccctgctaggtgggcttcgggcagcctgatggggaatactggctgggccttgaacctgtgcatcagcttaccagccgtggggaccatgagctactggtgctccttgaagactggggaggccgtggggcacgtgcccactatgatggtttttccctggagcctgagagtgaccactatcgcctgcggcttggccagtaccatggagatgctggagactctctttcctggcacaaatgacaagcctttcagcaccgtggatagagaccgagactcctattctggtaaagggctcttattttggtggtgtgtcggggcaggatagaagactcttaatgaggaaatgaaagagggtggggtaagactttcctctggtagggatcagggcaaacaagagaatggaggacaggactcttattctggtgagggagtctacgttcattctctaatgagtcaataagtcaggccccagcctttgtgaaaggtggtgggggaaagggggagctgtgagagctaggacttttaactgttgtagaaagaaaggagaggttgttttttctggtaaagggatgagaggtaaagctccttgtttgcagaaaggatggaggaaaatatgacttgtactttggtaaggggataaggaagaaactaaggctattactttgaagtagggggacagagtatgcctggcaaaagccttgtgttagtgaggtgctggtagaggcttttattctggtgagaagaataaaataaggcttttttttcccctctcccctcaggtaactgtgccctgtaccagcggggaggctggtggtaccacgcctgtgcccactccaacctcaatggtgtgtggcatcgtggtggccactaccgtagccgctaccaggatggggtctactgggccgagtttcgtggtggggcttactctctcaagaaggctgccatgctgatcaggcccctgaggccgtgaccctctgtccatctgtccctcaggtcccaggggatgtgtgtcagcaggagcccaagttgttctggccacccctccttcgtggctccatgcagaccacgcccacagacctcctcccgttgtggatctgcagggcttccccagggctgtgcagacagtgcccaggaatccccctgccaatatcttggacccacatggctccccaagggcattgagatctcagtttgagctcatattttataacaacacaaaatagccacagaccgtgtctggtttgcatctgcatcggcaggggtcactccc

SEQ ID NO: 46646 - DNA, 867 bp, Bovine  19866881144706
  misc_feature (1)..(1): n is a, c, g, or t
ncagagttgcaaagagtcggacacaactgaagtgacttagcaagcatgctcccctgaatgcgggggctgccctggccctcaccacccacccaggcccagcctgcaggccacgcaccaggtaactgagggcgctggccagctgctgggccactgccaacttccaggccaggggcacgcggcccctctcccgccgcagccatacgtccaggggcccgtgctccacgtactcggtcaccatgatgtctgcaaaggcctggtcactttagatgctgcacacccacacaccctccagagtgccgggggcaggacccacgggctgaggctcccctggggcagggcgccaggggagacttgggagtgactttagggagaagagaaacatgggctggagtgcaggctgaggtgggggcagggtgaggccaaggtgcaaggcagcattggggtccagggtagggctgaggcagagaggaggctgagagtaagtgatggaggtcaggaggggactggggagccagggggaggggtagatgattggagggagaggagctggaggttggagcccgagtgacacttggatccccctgtgcactgggaggggtgtggggtcagcacgcgggccagtattggggagaaagcaggagagatggagctttgggtctgggggctgcccgtggccgccctatacaatgaagtacatgcagaggaggtggggtggaggaacaagggctgagctctgggaagacagcggggccagcaaggctggggtctgcatggtgccacggcatagaaggggtcagaaggtacacaagggtggggctgtagaggtgtctggtggtaaagggagtttgggatgcagtctgcagtcag

SEQ ID NO: 46647 - DNA, 1065 bp, Bovine  19866881248344
  misc_feature (1)..(1): n is a, c, g, or t
nctctgtaattcccatttgtacagacagggagactgaggctcagagaggcgaagccccttccctcagacacgccgctagtaaaagcggaggtggggttcgacgcgggagtcccaggaattgggggaggggtgttcccacgcccccagagctttccggggcctcgctgcctgcaaggaggggccgccccctgggtccgggagggagcaagcttcacctgccggcctcccactccctgcacccagcctcaccttgcccttgacgtcgaggatgaagacagccgaggcggacatggtggcggccggcggacctggggggtggggagggagcgccgggaggcgacggtggtggcgccgcttccttcttcctgcggaagcacccgctcgcaggtgaggacccaggtgagcgcgtcttaaaggggagggccaccaggtgagcggtgccgtcggccgacgggaagacgctgcgggggcggggcagggcggagcttaagatgtgacaactgccccgcctcacttttccttcgcgccctggagtgaggatgggaggagaccccagaccaaccgattctccctccaaggaaccgaatatctatccatccatccattcatccatccaaccacccaaccactcatccatccacccatccactcatctggtttctcctgactttgccacactcacatccaccccaatagagcaggggcttagtccttttcatgtctgtgtccccagggcccagtgctgggtgctcaatgtgtgtgtaatttattaatacatgccataaatatttgctaattaatttattctttcgttcagtgacaagaactatgagttacactctcagcaggaaaaacgtagctgcctttttttttttgggtgggccaagtgggatcttagttccctgaccaggaatcgaacccattccccctgcagtgaaagcacagaggtttaaccactggaccgccagggaattccccaagtagtttttattgttattccttatgttattctttcaaaacttttttttaacttttaaatttttatacaggtctaaaggtcacact

SEQ ID NO: 46648 - DNA, 767 bp, Bovine  19866881312621
  misc_feature (1)..(1): n is a, c, g, or t
nggcaggaggagaaggggtgacagaggatgagattgttggatggcatcaactcaatggacttgacttttagcaaactctgggagatagtgaaggagagggaagcctggcgtgttgcagtccatgaggtcgcagagttggaaaggactgagcaagtgaacaacgataacaaagagaaacaaccgcaataaagacaacactaaatgctactaaaagtcaggcactgtgataagaggtttaccgaaattacatcattatctttgtaaactatccccatttaggatgattaaactgagggtaagggactcgcccagagccaagcattaccaaaggagcaggcccatttcacctccaccaggggaaggagcgactccccaggatccgctcacctagcgcgttctggatctccacggacctctctgggctcagaagggtctcatcaccgtcataaggggagcggaagcggacgccctcctccgtcacttcagacagggacaccagggacaccatctggaagccgccgctgtcctgagggagatcccaccgcagggctgtcaggtactggatggggaatatctacccccaaggaatgccctcgaaccccggcctcgatcccaccttaccgtcagcagattgtggggccaattcataaagccgtggagaccttgggccttctggatcagctctgggccctggtttggcggaagaaagggtcaggttagggggtgagtgcaaccctgggttcaaatgttgggggcgacagggttgg

SEQ ID NO: 46649 - DNA, 880 bp, Bovine  19866881401440
  misc_feature (1)..(1): n is a, c, g, or t
ngacaggactggcagtagggagggggcggaacacaaggcagcttaaacagatatcagggttttgatggcacctcagacagagcccaggatattccatgcctgccttggtcacactctggacctccgctccctgatttcttttggacaaagctctgcagctttaagacaggaatccagggctgtgctgcacagctgtagtgatcctcagcacccaccaggtaatcaggaacacctgggaggacacctccacccctgccccccccccagaccaccgtgtgtgcgattcactacctcccacgactcaggcagaggcccctggagggcagagccctcaccgacctgtagaacttgttgaccctgatcttgatgtctgtctcattgggccggccgttgctcttcttgctgcagaagatctcctttatgcggccaatacggtagggctcaggggcatccaggttgctgcccttgatgtagtcagagtacttccggtagtgttctggatacagagcttcgtccacaggctccttccgggggcgtttcacaggactggacagcttgatgctgcagagaggcaaatgctctgagtgactgaacgtgaaatgttagaaagtggtttggcgtgactgacctgtgataatcactgtttaaattccagcgcctgaactaacgcagctcagtaccctgatcacagattcagagattcaacctcatccacactttgacacaggtattccccatctgtgctctgggtctcactgctgaggttgttcacattctccctgcacccggccttagggcaggacttcctggcaggtgatgtgttcagctccatgggtgtgagcagccatatacacaagccctgcccggcaggagagtgcca

SEQ ID NO: 46650 - DNA, 1077 bp, Bovine  19866881410106
  misc_feature (1)..(1): n is a, c, g, or t
nttctccttcccatcattgagtgttcacccaagcagctaggaaactctgcctcggcaggaaccctcttccagcggctgcttggtgacatctcggctttgcctcggctgacccaagggggtagtccaagcacacgtggggtccacctttgcaatttgggcctccagcgggctggaaggccttcgatgttgccagatgcgcttactcacccgcagcagggatcagagtctgtgcccaacgctggactgctttgagaaggggggttttcaaaccaacactgaggcagtaaaacactttgctggtgtgctgatgtgcatattcttatatcaccagcattgaagaaattttcagaattccttggtggcgcagtggttaggactgagattctactgcaggggactcgtgtttgattcctgattgggaaactaaaatcctataagctatgtggtgtgaccaaaaaaaaaaaatttgttttcctccaactcatggactttgcgcaaactgtgaaaggtgggcttctgtgcattggtttggttgccactgcaaaggccagggcagtgggggtgtcggaggactggatccttaaggcaagatgcttgggcatggttttctgccaagggagtgcctctgaggtagatggcccagatgctgcccctcgccctggtgacccaggggctttgattccactgtgtccttgctctcacccagcactccgaggcaggtggatggctgtcactcgctttctctgccacttgccacctcagaaccgcattctctgaaaagcatctctgcgtgtgcgtgggcatccactcaggctctctggcccaccgtccccccaccgccccttcttgtctcatagctgcagcagctctgagataggagcagggtggggtctcggtgggtctgccccatgtcagcccctcagccatgctctccatttggctcacatcatgtgcccatcccccgcccgcgaggaccccgccaacgtcaccactctgctttcccccagctcagctcctacccgcggttgcgagaggaaacggaacgcatcgtcaccacttacatccgggaacgggagg

SEQ ID NO: 46651 - DNA, 1202 bp, Bovine  19866880247360
  misc_feature (1)..(1): n is a, c, g, or t
ntcagtgattttggagcccagaaaaataaagtcagagactgtttccactgtttccccatctatctgccatgaagtgatgggaccagatgccatgatcttagttttctgaatgttgagctttaagccaactttttcactttcttctttcactttcatcaagaggctctttagttcttcactttctgccataagggtggtgtcatctgcatatctgaggttattgatatttctcccggcaatcttgattccagcttgtgcttcctccagcccagtgtttctcatgatgtatctgcatataagttaaataagcagggtgacaatttactatcctaaagtagttgaattaatccactcactgagttaatttcatattttcagggcatgtatttcaactcaataatttataaatgttcttttaaaaaatagaaatatccataacacatgcatatcaggtttgaccatcatttctgtcatccaccagaaaatgaggcagaaaaacccattagcattttgttaatgatggtgcctacaatgtaaaaaaccacaattctagattctttctaacaacacttaaatctaaaactgttttccatcccagtttcccccttgattatttattacttggcacacaagaagcgtctcttctctttcaagaacatctttgaacacagaacacagtgtatcatacaaatatcacattgactacaatctaactgaaaaccgtgtggtcctgacatttgctgctgtcccttcgtctctctgctagcaccatatcctaaatttacaatctgctagagaatattcagcttggcttcaggggcattctggtggcaagaaacctccttgggggatataattctcaagttcgcacaaaagcaaatttctcatctttgggaagcttgtcggcactctggctgctagtatccaagtaactattagatgaggaacaaggttggtcatagggttagagagaaaagatgataagaatgtatgcatcacttaaaataaatcagatccatgatccatttgtctaagcttaagtgccatgcatgtgtgctcagtcatgtctgactctttgtgaccccatggactgtagcctgccaggctcctctgtccatgggattctccaggcaagaatacaggagtgggttgccatttcctcctccaggggatcttcctgacccaggatcaaacccatgtct

SEQ ID NO: 46652 - DNA, 1390 bp, Bovine  19866880264460
  misc_feature (1)..(1): n is a, c, g, or t
ntttccttttaaggagtaagcgtcttttaatttcatggctgcagtgattttggagcccccaaaaataaaggctgacactgtttccactgtttccccatctatttcccatgaagggatgggactagatgtcatgatcttcgttttctgaatgttgagctttaagccaacttttccactctccactttcactttcatcaagaggctttttagttcctcttcactttctgccataagtgtggtgtcatctgcatatctgaggttattgatatttctccctgcaatcttgattccagcttgtgcttcttccagcccagcgtttctcatgatgtactctgatagaagttaaataagcagggtgacaatatacagccttgacgtactccttttcctatttggaaccagtctgttcttccatgtctaatcactccattatcaaattgcctttctcatttccatttcagcactattctaaaattttatttgtgttaaaaactcatttctttctctttggttactaggagacagcattctgtgagttgtgtgactctttatagctgaaggcaaatatgatagctaactcaaaagcaggaaataattagcaaattcacacattacccttctgttttgaattcaaatccaatggctacaggttaacaagatactttatctttggatagaagggtttccaattttttaaaaatgtggtgataatttggctcaatggtaaaacaccaaacacgccaaaccccatcaccttaaaaaataaataaataaataaacatctctgttgaagacagggcatggtactagctaaagaaacaatgtgtttgaattttaaatagaagataatcatttccaggcacacacacacacacacacacatatgtatttgagaatggaaaaatcagatccatgacagttaataatacatacacagatgtgtaactggctaaaaataaggaaaatcaaatttattaaagacagacatctatatccatgtgcgtggctgccttgcaaggaagtccaataatagactatcttctttaattcaaaaagtccccaaggacagaggtcactatcatggactggatagacacctgttatggaaacagaaggagttgagatggggttgtcatccagggagcccataagtgtcctatgactcactgtgaactcacagacaagaggaagcaggaaacgttctctaacataaaaaactgtcattttaatattgcacaccccccaaaatacagtctttaaagaagacaacaaaattgaaactgttagttgctaaccctactttgttgttgttgccaagtcatgtccagctccttgcgatcccatggactgcagcacaccaagcctccctgtccttcactgtctcccagag

SEQ ID NO: 46653 - DNA, 3531 bp, Bovine  19866880353653
  misc_feature (1)..(1): n is a, c, g, or t
ntcaagatctttcaactttcagcaccacagtgcctgtggcaataacttgattccagaaaaactgtaaagtcagtgtaaccaaatagttttcttagatcattaaaaagcaccacatacaacatattaacaaccaagtctatcaaataaaagtgatgtaaatttaaagtgttcctccaaaataaaaggtttgcacaattaatggaaaaataaataaaagcattcattagttgtttagtgaaaatgctattgctcagtcatgtccaactctttctgaccccatggactgccaagctcttctgtctgtggaattctccaggcaagaatactggagtgggtagccattcccttctccaggggatcttcccaacccagagatggaactcaggtctcctgcgttgcaagcagttaggtatgtaaggtgataaatgatatggaacatctacccaagatgatgaaattatttctggaatactcaatttccttttatttctttctggcagtaattggttaatatagctagttgtcaactgagtcaaagccttttcatctgcatgtgtaaatgtatgctctcttcctatttgctctggtgaagtaacatgcttgaggtaaatgaaaacaatccagattaattaagataaggaaacaagatacaatattcctgttttaactttctgataaaattgcctgacctatgaaagaattgtttctactgagcctgaacttcaaaagggattctgtgtaaacattaagaaatatggttccatgagtgtgtggattttagcctggaggttattactgtctcagaaaaaggctgaagaaaggtcacttaaagtaaccacatgttatattttattccaataaagtgataaggaatataactgcagagcaaccacagaaatgaagaggttatgaggaagttgaaaattacctggagtccactttataggttcttggtcgttgggatcactagaaatgtgaaaggaagcatcatagatctaggagaatattgtgcttaaagatagcagcctgcatgtgagacaccctcccctttaagattgtcagataagctataagctatctggttccattttaatttcagataaacaaattattccaatataagtatatccccaaaactgcctagggcatacttacactaaaagaagaaaaagttatctgaaatcaaaatataactgagtgtcttgcatgtttatttgccatgttgagcaaccatattcccccattctctcaggatccttttaaattttcagaaaatagatgtgtgcatgctaaggcagttcagtagcatttgactctttgtgaccctatgcactgtagcccaccaggatcctcagtccatgggattctccaggcaagaagactggagtgggttgccatgttctcctctaggagatcttccccacccagggatcgaacccaggtctcttacatctcctgcattggcaggcatgctctttactgctatcactatatgggaagccccagaaaatagaattaaaaggtaaaaatgtgttagggggccatcaactaaaatcacccaccctagccaggcatgataataactacttgcaggagttatttcataatagggaggtcccaataaggaacagggaacttgcaatttgcctccagcttggaagcattcaagaatttgggagaggccaaaaggaaggaggatatgctttagcctataaaatggcctgcaaacctcccagaaatctttgccctggaatacaccttgactacgagatgcacacagcaggaaggaccttgaatcgaccaaacatggacatgagcaagacagttagccagagacaacctgaaaggttagccctgtgaaaggaaaatatctcttgccatatcaataaatgagaaacagccattatcgatttctggcctccaaatgagaaagagcgcttctgaaatgtgatccagtggatgtttcccctccctccacccacagtaattgttgaggagttggggaatgcaggaaaaaaggtgaagaaggaaacaggttggccccagacagctgaagtacatatgaaaggaaggaattcagtgagcccagaggcttgcatcttcccatgcatagaatactaaattccttaacttgacacctgatcactgttgttcagatggtctactcctctgttgcaaacttgtatatagcccaacttcgcctcctgcctccttagagctctgaagtgctctttcccaggctcagagtcctaaacattcccaccaaataaaataactctccattcaggttgtgacttttttagttgacaaccctaccaccataagccctaagactatgagccacatggcagagcagtcctcctggggttcccttacactgctcctctctgctcaagctcacctttccaattaagactcttgctttatcagcatgtgtgtttcctcagacaattcatttctgagtattagacaagaatgtactcttgggccctgcaagagatttctctgccagtaacaagtgcacaatcgcaaaggaaatacatgttggctgggaggtccatggagacatcagaagaaagtaaaaactctacttgaaggaaggtgaatgagatgacattagtaaagcacattgtagatagtttcagcctaacgtgcctgcgaaggagcttcagtgaaggaagcagccagcctgcttggcaacgtcgttggaaaggtctggaccaaggaatttgaaaagaattaacagaaagtctgtatcttaaagagctaatattctacacctcccagcaccacttgcagaaatgcagactgcatagattttacatctcctagcaatatgacaaaagtaaccataacaataaataactattacagagagaaatcaaaagacctgtttggcaggaataaggaagctataaggaagtggttgccctctacctggaactaatttctcaacatctcaccctaaagcaaggcctttgagtattcaaagtactcaaagatccaattcaacttttctctctggcatacagtaagatctcaaaatggttagctataattatgatgagaaagagcagactatagtggaacagtaagtcagacccagtggtgacaatgttctttgagtattattaagtggtagctcaaccaaagagaaatgggattgtttggacttgcttctctaagatagaaaagaaagcctagattcaagatagatgtgtgtgactgctgagaatacattcaggacttgtctcttgagaaattaaggttttggggaatgagttgaggggggagacgcaaggatctctaacatgcattttagatgctttttattgtttagccaccagggtacacgattttgcctcctaaaggagcaagtgaccctttaccactcaaggggaattcagaagtgaggttttgtaagattaggagtcttaatcaaaaatatccccattggttaagctgaatatttctttctagtgtatccgtaattaatcaacaccaaagaaaagcccagagggaccagaggtt

SEQ ID NO: 46654 - DNA, 2991 bp, Bovine  19866880488886
  misc_feature (1)..(1): n is a, c, g, or t
nttctgttttgttttggttttttggcctctagcatgcaggaatcttggactttatttagctctgcaaccagagaactggatagccagggaatacccccaggcaagttgtttaatagtgtagaagggctggtttctgaactgctggaagataattagcattttaaaggaagtgctaaattcctctgatatgacttctaaccagccaagcctctccacttgtctctgaaccctccgtctcttgtcagctggctctccttcccttccgctatctttctccctctgctgctttatctgtctacctctccctttcccactctctccctctctttatacagcatgcgtgtgtgttcagtagctagtgcagtccgactctttgagaccccgtggagcctgccaggctcctctgtccatgggattttccaggcaagaatactgtagtgggttgccattttctgctccagggtgtcttcccaacccaaggattgaacctgggattgttgttcagttgctcagctgtatcagactctcttgctgccgcacggactgcagcatgccaggattccctgtccgccaccatctcctggagtttgctcaaactcatcatcaagtcagtgatgccatccaaccaccccatcctctgtcgtccccttctcctcctgccttcaatctttcccagcatcagggtcttctgcagagttggctcttctcatcaggtggccaaagtactggaacttcagcttcagcatcagtccttccagtgaatattcaaggttgatttcctttgggtttgactggttttatctcactgtggtccaaaggaccctcaagagtcttctccagcaccacagtttgaaagcttcagttctttggcactcaaccttttttctggttcacttctcacacctgtacatgactactggaaaaaccataactttgactatacagatctttgtcagcaaaatgagatctcttctttttaatacactttctaggtttgtcatagctttctttctaaggagcaattgttttatcttaattaccatttattatcttaatatgacacattcatacctgagagacaattattttaatgcctaaaaaatccaacaacagtgtcaattttctgacagttttttattcataaagcattttcctatattttaggagtgtgtttgctttcatcacaatatataaatcatgaataaaaaaatgtgatctatgggcatgctaatattttatgaattttctttcttaaaaaagtgattgtgtgtgatggctcaaaatggaattttgaaagcttattaaattttactcaagtagaggttcagttcagttcagttgttcagtcgagtctgactctttgcaaccccatgaatcacagcacgccaggcctccctgtccatcaccaactcctggagtccacccaaacccatgtccattgagtccgtgatgccatccaaccatctcatcctctgtcgtccccttctcttcctgtcttcaatctttcccagcatcagggtcttttcaaatgagtcagctctttgtatcaggtggccaaagtattggagtttcagcatcagttcttccaatgaacacccaggactgatctcctttaggatggactggttggatcttcttgcagtccaagcgactctcaagagccttctccaacaccacagttcggattcattttgatatttggcaaaactaatacagttatgtaaagtttaaaaataaaataaaattagaaaaaaaaaagcagaggttggacttgatatattttattatgtattttaaaaaatatctggttcaggttggcaaatgcctagttgccaaaaattttaaaacaaataaatagaaaaaaagtgaagattattgcctaattttagggataatagaccaaagaatgaaagtgttaattagctaattttcatacagtactgattgtatccctttataatatgattcagttcagttcagttcagtcactcagtcatgtccgactctttgagaccccatggactgcagcacaccaggcttccctgtccatcactgactcctggagcttgctcaaactcatgtccattgagttggtcatgccacccgaccatctcatcctctgtcgtccccttctccttctgccttcaatctttcccagcatcagggtcttttcaaatgagtcagctcttcgcatcaggtggccaaagtattggaatttcagcttcagcatcagtccttccaatgaatatttaggactgatttcctttaggatggactgattgggtctccttgcagtccaagggactctcaagagtaatatgatgaatgaccaaatgttgatgtttaataagggttcatcagaatcgaagcaaatagaaggtctctcatgagctatgacctataggattgcttagtgatggagagaagatatctatggctttattttgggattggccacttttgaaagatgctcaacaccatagggattcatttgaagcagctgtgggccctctgctttcccatctgttggcttgttcttcttgtattttgaccaacatgtcaaattcatggcttctgttgtcttcctagacaaatctttcaaatcttttcctagacaaaagaaaaacacctctgtagtatctcagacctcttttactgagcttcaaagggcaaatggttaggagccatatggcaaaatctgttttctgttagaactcttttggtcatttccccatccagctctaaatgagcctatccaagattccactcaacagtgagccacactgaattcctgaggatgtgaccaaatcaaaaccctatctatgtgtgtctgggaaattaaaaagtgacagaatgcactagggcttgattacacttctatgtccatagttaaattgtaactgaaaggctctttcccctaaatatatttaaaaatatgcatcccaggatattagtaaatcaggtatgttatgtgattctaacttatgcatt

SEQ ID NO: 46655 - DNA, 1141 bp, Bovine  19866880535166
  misc_feature (1)..(1): n is a, c, g, or t
ngtgtgttctcctcctgcctttaggaaaatctgattcccctagtgttatcaatatccaggaattatggagggacatcttcaattctttgaaaaataaaaggcaatattattttaggttttgcctttgaatccactgcaagcacagctcaaatcatttcaagctctcttcatttgcgtggaagaaatgactaaaagtgattaatgagaactctttgagaacttttgatgacaagtttattgggaaatgtgaatatggaaactgctatcatttctgtttctaaaaaccatttccatgaaaagagtgaaaaacattattaagcccagaaagcctttgcttttacaccaaaaagtgaaaatggaataaaaaggcaagtcaatataaacatcatgtgttccagatgagatttaccacatgaccacaaaggagtgagacagggttctgagaaataaatgacagagactgaagaaatgtaaactgtaagcccttttcatatcatctaaaaaaaaaaaaaagtgtcacattttctcttgtgactctggaaaaatggtagctgatgaatataatttattgtcaaatgccaaaggcagatgtgactattaagatgcttctcttttgctttttactctgcgactcatgaaccagaaggctaatctcatgagtaaagaatcactccggtttcccaggtggtgctagtggtaaagaacccacctgccaaaacagagacataagagactcacatttgggaagatcccctggagtagggcatggcaacccactccagaattcttgcttgaagaatcccatggacagaaaggcctgggggctatagtccataggattgcaaagaattggacatgactgaagtggctttgcacaaataatcacatgtttgctctgtaggtctataaatatgtataatctaaatttttatcactctttataaaaatctcaggctggtttgaaaattcaggaaaggtagaccaccttgacacaagaaaaagtgtccttgttatacagtactattgttgtttagtcgctcagttgtgtccctctttttcaaccctgttaggctcctctgttcatggaattttccagcaagaatactggagtgggttgccatttccatctccacatccagta

SEQ ID NO: 46656 - DNA, 983 bp, Bovine  19866880602999
  misc_feature (1)..(1): n is a, c, g, or t
ntgtttgataccatgttataaaactccaaatcttgctgttgccattattattttattattaaaatattttagcaaagtacattccaagtcaggtacttcgtataactattgatttataaagtcatgaaataaaaagaaattcctttgcagtatctgtgaaaccaatatgccttcattggtaggccaatagcaagccctaaataattttatgcgtctttatagaaacgtattcttttttttttttttagttttttttttaattggaggataattactttaccatattatgatggtttttgccctacatcaacatgaatcagccatagatatacatgtgtccccgctgattctgaaccccccttcccacttccctcgctaccctatccctctaggttgtcccagagcaccagctttgggtgccctgcttcatgcatggaactcacactgtcatctagtttacatatagtgatgtatatgtttcaattctattctttcaaatcattccaccctcaccttctcccatagagtccaaaagtctgttctttacatctatgtcttcttttaattaaaaaaaaaaaaaaactttttttaaaaagcaccttcttactctttccctgcaaaggtcttcagagttaagtatgcactttattttgcagctgaagaaagtggggcacatggaggtttaagcaatttgactgtcagtgtggggtttggggaagataagctgctacaggaatccagtctttttcaacaagcttggctcacagatctcaactgaactgactttactccttcctttgcttcgatgatcatatacagtttgattggagagttaaactataatttcacagtgattacatgcccctgaagatcattttgtaagtaaatgttttgaaaccaaagataatcattgttgtatgaccataagcctttttcttatgccatattctccaccaaagaaagaaccaagccaaagttacgtt

SEQ ID NO: 46657 - DNA, 2410 bp, Bovine  19866880613248
  misc_feature (1)..(1): n is a, c, g, or t
nttgccttcaaaagcagatataaggtttcagattatgaaagatttcagatttgaagatacagaatttccagattgtggccagagaaaaaaatgcatctgtactgaaaaaaagaatggaacaatattcaatgaatttgctattaattacagtgcagtgttatgcttttttcctgtctggagagtaaaaggacttataaagtctgggtgagcagacggttctatagacataagttctccatggaaaactccttggatccttttcaagatcagtgctgtctgagctctgtttaagtgatggcttgaagcaatagccaaccatagggaaaaagcactgtcttggatgctaagaacccagactaactcatggaatgtctcatgaggctcactggacctaaaataaagtgaatattctctgtcttctggtttggtttccatgggaatttatgtttatgggggaagcctgtctcttcctggccaaaatatttggacaattcagtcagttcagccatttacagagttcaactgactggatgctttgtctttctggctggcacgaagtgctggtagtattggctgggtgaaaaatactgtcaagtctgagtcagtgcactttttggtgatgctgggcaaatttggctcacagttgattgatggcaagagatggcatgagcaaagaacattgagtgaatagataggccatgggtgaagttgagaatttcttaattcaagctccttgtagttatttaagaataaactcataatctttattttttcctccccccagagcaggtgaatgatccaccagaatagaatggatgtcttcatcatgcttatgttactatcatagaagtggaggaaggatagacaatagtaagattttctttactggagaagtggtttgtaatgaatttcttttggacaattgaagtcaattcagtttaatttgcaaaaatacttattgtataccaagtcagtgcagcttaaaggaccgacatggagacattagtacaggcacaacaggtatctctatctaccctcaaggcctggagtgctggttctcaattgtggccatctggtagtataacttggaaaattttttaaaaacacaaacgaacttatttgctaagcagaaatagagacatgaatgtagagaacaaatttatggataccaagtcggggaagagagcagtggaatgaattggcagacatatgtatattatgatgtgtaatatagataactaaagacaacctactgtgtagcacagggacctctgctcagtgctctgtggtgacctgaacaagaaggaaatctaaaaaagaggatatatgtatatgtataactgattcactttgctgtacagcagaaactaacacagtgttgtaaagtagctatctaaaattttaaaaaacaccttcatttgggctcctctgaaggccaatggcaccccactccagtactcttgcctggaaaatcccatggatggaggagcctggtaggctgcagtccatggggtcgctaagagtcagacatgactgaagcaacttagcagcagcagcagcagaaggccacttaaatcagaatttctgtgggcctgagctcaggtgctggtgtgattttgaaccttctccaactgcttataatatgtaatcagatttaagaattatgttttgtgggatagaaatatgaattcgtaaatacagcatgtgatgaacgctgaaatttgtggctaaaattagcttagtggtgagcttttcagcacactcatattttttttccttgagattctcttttacaaacacagcatctatgagccctcacatcaagtcccctctagaatttgtctccatggcaatttgcacttaccttttcataatacatgcaatcacatttgacattataaatcattatccatgttcctaagtcatgtggaaactcagtgggattattttgttccattatctaacacagtgctagagacataatagatggtcagcaagtatttttttaattgaataaatgaatttaccaaaagtaatttactgtactcatagaatccatggttcattactaacaaggttctcacctatattctaggtcatgaatctgtcctgaaaatgtcaagtgcataagaaatagatttggcgttgaagttcatacttaacactagtacttagagttacttttgtgcattatccttcacacaggctggcttctctcccacaatgaggaaattaaaaagtttttgtatctggagttttatttattgctattcaatttttactgaataacttcattcttttttacttttccaatatcatagtagaaaatactatctcaattacatgccaagtcaaactgtcttctctttaatgaaattttcagttcagttcagctcagtcactcagtcgt

SEQ ID NO: 46658 - DNA, 3649 bp, Bovine  19866880626667
  misc_feature (1)..(1): n is a, c, g, or t
ntattctcacctggaaaatcccaaggacagagggagcctggagggatatagtccatacgctcacaaagagctggacatgactaaagcgacttagcacgcatgcacaagctcataatcaaagtactccctctactcaaacaaatgattgatgtaaatactgaaataaaaagatgagaataaatatgaattatctaattttagtttcccatctgaacactttgtttgaaattgatgcccatggttgctgagtatgcatagaggtattgggaattctgtgagtactaacttattgactttagagattttggaggaagatttcctattcctaaatatttgtgtcctcattctctctgggaaccaagagttgtgagattctgactctcctctgaagcagtgtgggccacagaataatctcctattgatttgttagagaacagatacctgagtcctactcacaatataataaaatctaaatcttagtttctacactaaaaaaaaaaaaagaaatctcagatgaatcttaagttatctagagtttgagaagtacttatagtctacctttccttatagctgataccatttgatctccgaattcagaaatttttcttgtctctagaacacatcctgaaagtaattaaaaacaatcaacacaaaatgagaaaaggatagtctcctcagtaaatggtgttgggaaaactgcatatacacatgcaaaaaggggaaactgcatccctatcttatgccactcacaataattaacttgaaagaaattaaagacttagttttaagacctaaaatcataaaactcctagaagaaagcatagggaaaaatgctttttgttcttgatcttgaaaataaattttaggatatgattccaaaagcttagacaacaaaaataaaaataaatagttggtattacattaaactagaaagcttctgcacagaaaaggaaatcatcaagaaaatgaaaatggactaaaaggaaatatttgcaaataatatatttgataaggagttactgtgtaaaatatataaagaactcacataactcaatagaagatgctgctgctgctgcatcgcttcagtcgtgtccgactctgtgcaaccccatagatggcagcccaccaggctcccccgtccctgggattctccaggcaagaacactggatagatccacttaaaaataggcagaatatctgaatagacattttttccagggaatatatataaatggccaatagacacttgagaagatgctcaacatcagtaatcatcagagacatgaaaatcaaaaccattgagatacacctcacagctgttagaatatctattttcaaaaggacaagaattaacaagtgttggtgagaatatggagaaaagggagaaataatgggaggtgatgaatgtgttaatgaacttgattttggtaattttacaatgttatatatatatatataaatataaaatttccacttagaaatatacaattttatttatcaattattcctcaatagctgaaaaaatatatatatcaaagagggaataaatagtcaacacattgaataatctaggattcagcatcaaactcctcatgtttttctttcttgtccttttttctcagtgtctggcaaattttatatctgccaaataaccttgcccctagagagttagagacctaacacatagatactatttttggttttctacccatgttcaggttgactttattggtttgagagccttcaagtcatggcttaagtggccatggatcacaggaggcatgattcaatctctaaggctgagtttcacccttgggtttccagctgctcatatcactaaatcacgctttgtcctgctaccttgcattgctggttggtttctagggtaagctccctactagccagtaaggaaatctagataaggcatcttatttatgaattctggcatttgcagagcttatgaacttcttgacttccaataagcacatcataaatacttgttgcaccaaaaagaatgaaatcatttctgtgccagagaatgatcacagtacaaaacctgattcttggtgtatatttcaccatttaattctaatttttgctctttgatcataacatattgaagcagaaaagagagccaggaacattctgttctctgactaaataatgtttattttaaaatttcagagaattcagttagcctactttctctagacttaatgaaagtttgtgattcaaagtaaactaattattgctgaagtctagttttcattttgaattaaagaaaatatgactttaaaaaatcttatttaagcctctagcataacaataataatcattttcttttcattgattaggctagagctctctgtcatcttttgtcagtgagtaatggcaacccactccagtactcttgcctggaaaatccaatggacaggggagcctggtaggctacggaccatgggatctcaaagagtcggacacgactgagcgacttcactttcacttttcactgtcatgcattggagaaggaaatggcaacccactccagtgttcttgcctggagaatcccagggacaggggagcctggtgagctgccgtctgtggggtcgcacagagtcggacaatgactgaagcgacttagcagcagcaaggccccagctgggtacaaaaagtttggtaagaataatgtgctagtggctttgaaaacaaatatttatttgctttttattgaacttttgtgagcccatgcaagtccattatcttcaaaattctggatctggctatagcttaaaaattttatatgcaaattatataagaagaattgaagtcattgctgtatatttttcttttgtgaaatatatgtgtacataccccatgtatcatcaaaataagatcttgcaagacagtataaataaacttaagtaatagaaagcattcaactgctaaactgcattagtttgttctctttttaaaattgctttaccaaattatctgctatcttactaagataataattaagtctgctagaattttaagtgaaaatttctgaattagtgggtttttggagggaaatttgacaaaatgtaacagcacaagtatacacgctcttacaagtgctcatctatagatttatcctaaaatatgctaaaatgtgggaaatatttagataaatatgtttattgcagattttttaaatgacttcacacttgaaaaaattgaaaattcaacagttgaacaagattaccgcttgacttagggattgtggttactcttgaatatttttatttgtataccttttttttatttttgaaaatagtttctatgataattgataattgacaaaaagacaattgtatggttatttgaaaaaataaagtgaattaacagtttacttaagactgtttcactagttttctagttatggttccactgagtaagaaaattgtctataaattactcttttgagtgttgggccttaaccaagctattcatcctgttaacaacagcagattcaaggaaagaataatcaaaccaacaaaggttttctgaagcttatatcccacactaagatctaggaaatattaatacatcagaaattcccactcttatcagaagctactacctccaagcttagttacctacaaattat

SEQ ID NO: 46659 - DNA, 1080 bp, Bovine  19866880639200
  misc_feature (1)..(1): n is a, c, g, or t
ntagcctatcacttctccagcagatcttcccaacccagaaattgaacttgcatctcctgcattgcaggtggattctttaccaactgagccaccagggaagccctgtatagtgatgggtaggaatctaaagtttctttttcctgcttgcaagaggatataaattgacactgtaaaattttgtttccaactgaaactcacatacattatttcagcctgtaagtgtttagaaaggaaatgactgttacagattggaaaggtgcttgaaaaggggaaagacacttaatttggacaaaaagtaatttattcaacaaggatttgttgccatccaatgaatgatggcacacgcaccttggacaattttctagatatttattgattaaatataactatgccaatacaaaaataggtagaagaatcctagccagtatgatcacaacggttttgttcaaatcagctctggcatttgaccaaccagggctcagttaagtttatgagtctctttttggctgcataattgcttcaggcaacattcacagagggattccctggtggttcagtggtaataaaccctcttgccaatgcaaaagatgtgggtttggaccttgggttgggaagatcccctggagaaggaaatggcaacccactccagttttcttgcccgggaaatcccatggacagaggaacctggcaggctacagtccacaggatcacaaagagtcagacacaacttagtgactgaacagcaacaatgtccatagaaatgcttaggccaaggtgcagtgactttggcactctcatatactctggggaataaaaatttccacttttctggaaagaaatgtgtcactatgtacgaagatttctttaaatgtctcttagccaggtaaattcatatttaaaaattcatcttactcaaaaagatgtgatcacatataaataatcataggaatatttttaaagaaataaaaatgtggaaatgacttgaaaatttaaataaagggaattacaataaaataatattagagcattttgccactataaattatcattggtttgattaaaagcaaagttaatgtccat

SEQ ID NO: 46660 - DNA, 1161 bp, Bovine  19866880701030
  misc_feature (1)..(1): n is a, c, g, or t
ntgagatcccacatgccacagagcatggccaaaaaaaggtaacgataataaataataataaaggattttttaagaggacacttctgtgatgtacccttttccctgtccttccttgaccactccctctcctctcactgcctttatcatccacagccagctgtgtgcctaccctgccggtgtcagcaaaggaacagggtgccttccaagaggctctacatgagcccccaaatatctgggaaatgcgtccattgcctcatgacagacagacccttccaccctcattttgtgaagggatagtgagaatcctggagttctccctgcccatcagtcacaaatcatttcatcacctgtgctctggataaagctataaaatcagacatccactcaagagacatggtctaagtattaactttgggctggtttccggtggtatatactcagttccttgcctcatttgctctagtgttctgtcatagaatttaaaggatttctaaagacaatgaagctgaaagcaatggaaagaaacttggccagggaaagagaaaagaagccttcaatatgaaaatcatttaaaaagggatgaaagaattatattaaatagaaattatagtttagtaaggaaatgactccagggctggtaaactcatcatgatttaggaggtgaattccacagtaaagcaagcaaagctttggagtcagagcatagctaccaatgcattgatacctggaggatgccactagggcaaaggtcattgagatagtctgggggaagtgccttccagcactactcaattcacaagggagctgggaatcatgatggtgacctaggaacgtctggccaagtgtttaatttattcaataactttcctgagtctctcactggacatcttggttagggtgctaagaaataaaaacaatgaagaaagagttattatcctcagctacttgttgagggttaattacaatgcagttgatacattctcaatcatccctgctcagatgtcaccgaaaccaaaagacctcagcccaccaaaaggttaatcactcgttatagaaactacagctctgcattgcagatagctttgtatcatgttgatcactaaagtcttttaaggagttccttcttttccttttctttttctctcagtcttttcttcctct

SEQ ID NO: 46661 - DNA, 1199 bp, Bovine  19866880758924
  misc_feature (1)..(1): n is a, c, g, or t
ntagtttattgagctgtattctgattatttgctattttttgccggcatgtgcatgtcagtacagatggtaatttaaaagatatccatggggagacgttgtgaggggagagacagaaactagaggatttagaaacaacatttgcccctgtcagtaagctcatgagcagggggcatgtggtaacacctagggcacagtgaagggtttggttcaggcaagaagaaagacacttctgtgcttgctgaggaggtaccagcagagggtttgtgcagttttccactttatcagagctcccttctttcctttgtctccagcaaaaaaatttaatttagtgtttccaaaatatcttttggcaagtctctttgccttttctaaagttcatttaaaacaccatccatttctccagcaaagccagggagtccttgtgtccatatgacacgactcctgttgctatggcaactgaatgtttactagagaaaatattaccagttaataatagcctgaatggaaataatagctactgctaggcccttcagagttacacaccatcaatttccaatttgctgaaataggtgcaatttgctttttgagcttcaaagtattactttttccaggccttcacgatccttcccccacaccatgcaccacaggcccacacccacacatccatatgctcctaaagaatgttctgtttgtccaaaatgaggacagagggcagctgttctgttggagccccgtcagaatcccaacagtaggaataatgaataaattagaagtttactatttattggctttggtgaatagtgaaatcacagagagaacgatcacagaaagagagtataattcatactctttcttatagccaatcttttccagaatctcattcccaaagagcaaaccagcaagcagatgtgttgaattactgtgtcaaaaatcatgcctgtgcataacaaaaatgcctttcaaggtattcagcccactctctccctgagtctgggctttttacgcatttgttcctttcttgactgatggcttctttctattatttattaattcagcaaatgggtattaaattgggcacaagcctggctccccgggtatgcagacccagctctggcccgtgagaggagctttcaagatactgcgtgcagtgttttgatgaagtcacccctcccaccaccagctttcccactgcatgcca

SEQ ID NO: 46662 - DNA, 1544 bp, Bovine  19866880904361
  misc_feature (1)..(1): n is a, c, g, or t
nctttttgattataacccttttgtatgatttataacccaaattaatttctgtgattcattacctttagatgctgagatttagtatccaaactctcacttatttgcccctgaaaattaagaaatgctacaacattgttaagtagaacaacttcccttaattaaaaaaactcacatataaacataatgaaaagcagaaatgagcataactgtagttgcttgacattgaaacaatacaagatcagggtcttctcaccctgaaccctgttcgcctttgcctaaacaaaaatcccttccatcgtatactgctggttatgctgaaattttatcttctgatcttttattccatttggaagagttcttcctttcttcccaaggggaaaaaacaaaacaaaatatgctatgctttatgaggaagatcacaatataaaatcaccttcacaaagatatatttttcatgcaggttttctttgtagaatgtttgctttgtaacaatcattcatattctgactaaatataaaatccttgcttccctcctctaccaagttcatggttcaaaaacctgggagtcatctaactcatccttcttccccaaccatacatacaggtcaccagatacatttgaattttagttaaacaatgaataatttgcatgtgataaacatgtataatttgtatgtgatccaactattgcttggaatgcacttatgttaaaaaagttattgttgtttatctgaaaatcaaacagaagtggacatcctgtatttctatttgctaaatctggcatctccacccacatccaattcatcaccaaacccaccaactcctacttcctcaatattttctaaattaagtccatttatttccatctctactatttgtactcttggaaaagacaccacatttatacccatttgctttaatgacctcctaactggcttccaacctctaaacattcttcgttctttgttaaagccataaagattctttaaaacacagccctgatcacaaaacaccatcttcgattattcctgttgctttttaagataaggtctaaattcctaaacttggctttcactgctatgtcttatctgtctggcttagctctaagcaatcatgattttgcactctcatacattccaatcattttgaaaaacctttcaatctcttgaaaatgctagaccctgctctttggttttaatatgcacacatgaattttctcctacctagggcattctttcaactcatgagtttcacttaccctttaagctggaccttggtctctttattctcagatatattcttttgccttcccctgctctgctatcattcaactctctaaactgatgtcataatcacctcttgtttacctactgattaaggagagagacccacccttcagctatggggatggctgagccctgaaccctgtcccgcaacacggaacagattagactgacaggagcattagtcacagatactcataacctgggagccaaggaccttgcagcaagacatagaagggttgcgcttaggaccagagtgaa

SEQ ID NO: 46663 - DNA, 1326 bp, Bovine  19866881023414
  misc_feature (1)..(1): n is a, c, g, or t
ncctcacctttagcaggagttaacataagtctctaagttaaatggtccagagtcaagaaaagaagttacaaatgaaaaatccagatggaaccagctgggaccagatggcaacaaatctgacctccaacagaccctgagttctattatacacagattttgctacattggcatggtaaataacacacacccggtggccatgagtggacattcaggacaataaagtataaaaaagagtgatgcaccccactcccttggaaaaagccccaccccttccccagtagactggtgcacctacctccccatcattaggctcagtcttcttccctttgtctttactctttaaaattaaatccatctacccagatggatgaaaggtgatctgtaaacttaattcccccttctctattttttggccatgaaataaagcttaagctgtgttgatctcagctttgatttcatctactcaaaccacaatggaaaaagaaccttctcctgcagaggcacagagaccaggctgggctcaagactgagtagggtccaaacacctcatttttttttttttttacagtttctatttaaggatcatttagccagtcttctaactgtatcatacactcatgtttaaattagggataattttggccacaagtaacagaaaatctaacagcagattaaacaacatggtaatttgttttttgcccaaagtcaattcaaaacagagacaagtgtcagaaattttcagagggagtgctctcagaaacatcaccttaggggatttgaagcaagcaggactctgggtagagggagagttggcctgaagttaatttataataagacctgaactgaacttgtggggagctccaaagatggatggctcttcagagatggttttcccatgttgaagagagacacccaggtatttatactcccacatcaaccagacgttgaagaggggcttctccagggaggaggcaaacatatcctcagtagggaggtgttcttcagctgataaaattctggaagatggcttgacagctgagggatgttagctcataatcttagcagttggaagaataaatccttcggtcttgaagggggaatctaggagcccataacctcacaataagactagctatttgtagttgctatggttttagttcacccactcagagatgtcagaccttctgcatatttgtttgttttagcctttcttaacacttgcaagatggccactccaattccaggaatccacataagaaagaaaaggtggctggtaccactggttatgattctcatatctagaaagttaaagtccttcagcagatg

SEQ ID NO: 46664 - DNA, 688 bp, Bovine  19866881059428
  misc_feature (1)..(1): n is a, c, g, or t
naaccatctgcaactggataaagtgctcattttgcatgttaggaaaactataaaaaatgactgcatgaaattaaggcaacatctgagctcctggggttgcttatcacgtttaaagttgacagtatgggtctcaggaggcagcagagagtttatggataaacacagcaggtagtaaaagaacttaaatgccaaaaatcactttaccatagaaaagagatggagaggtaatgatgaaattaaagacataacacttaagaccttacttcttcaaagcaatttccttttaaaatgtccaaaataattactttaaataattaaccggcagagtggtctgtaaactattcaactggtaaaattattttgaatgtctctctgagtgcatgtgtgctcagtcatgcccgactcgcttgcgacctcatggactgtagcccaccaggcgcctctgtccatgggattatcccagcaagaatactggagtgggttgccattccctcctcctcagaatcttcccgaaccagggatggaatccaagtctcctgtggctcctgcgttggcaggcggatttttcttttctttaacccaatgagccacctggaaaatacccaagtgtccctctgtacactcacgatttttgggtgaagcagagagaattctaaataagttgcctaggcttaatttcccttttaag

SEQ ID NO: 46665 - DNA, 776 bp, Bovine  19866881105558
  misc_feature (1)..(1): n is a, c, g, or t
naggcttgggctctcacaggcacatttggatctgggtttcaatttcaatatgtgctatgtctctttccttacaatatcatttggcttgagttataaaattgtattacatagtaagtgtatgggctttaaaatagaagtgtatacagaaacagtattcatttacttatttattatccatgttaaaattaggtaacatttataaacctattaaataaaaaagcaaaatatatcctctcttcattttttcattgtttatttaaggcgaaatggtataacactttaaattgaaatagtatgtcccttattcctcattcagtagagtgattatttaacaagtcttaaatttattgagaggaagaaatttagtagctcaaatggtaaagagtctgcctgcaaagccggagacccaggtttgatccttgtgtaaggaagatcccctggagaaggaaatagcaacccactccagtattcttgcctggagaaactcatggacaaaggagccttgcgggttacaagtacatgaggttgcaaagagtcgaacatgccttattgattaaacaacactgaagaaatagcatgctacaggaatctccacaagacaagatttccttttaatatctccagaaaattctcactacagatgtgagagatgtttgaattgaatgtttcacctgtaaataatatggtcagaatttcatgaattcgttagttttaacttacatgttacaaagctgtacctttgtatttcatttcagttatctggtaagacatgtcat

SEQ ID NO: 46666 - DNA, 1944 bp, Bovine  19866881112252
  misc_feature (1)..(1): n is a, c, g, or t
ntgtgtacacagagtttcatccaactctgtaccaagcctcacacgtgacccactggcatgccctgctatgggtgtgatgcctccgtgtcctgctccctgtggtgtggaccgtctccctttctactgatctcacctgtgtgggcacttactgatatctcatttgcagcagcaactcctttcctatttctctctgatcatatcggttttatcttttatcttttttaacactttcagtagaaatgagaaggaaaacaggtaaagtgtagtaagatctggctgtatcagcagttctcatttgatagacaaaagtcactttaagttattctttggccaaataataattgacatattttatcaaaataaggtacagtaattcccctacatatgaactttcaagttgcaaactttcaaagatgggaatgtgcatttgcatgcccagtcacatgacttagttcacatgtgtggcatgcatggtcacgtgtgtgcctcctcacagctgtgcttttgtgtactctactatatagtattgtacagagtacagtagtacagcacctttatttccagcccaggatgtctggtaagcaagcgtaaaagcagcagatgattgcgttagtttagtacataggctaactttgttgggcttaccaatgcattctcagaacagcactcatttatatgtaggcaaattattgtgttataaaaatgtactgtttcagatgttccatgattttgattggttttatagtattaattatttaggaagaaaattttgcaactttggaagccatacttatccatttatgacttcttagcatcttagtgacatgtagcaattaacttgattatcaagatggccaagctagtgtcgaggatatgaccaacactctggaaaaatctgactcattgtgtactgggcttttcactctggggcttaacaaacaggaaagaagcatacacagtctggtgcttgcagtcaaggagctggtgttcagtgttctgggcagatttcaaagtcttctgggttgtatccaggcggcataaactcatacctaggtcatggaatcagaacaccagaattctgtttcgatgtccaacactttagtacaatcaaatggaatgcaacactgaaatatgaaatgcaatgtttcagctaaatccatgttcaagttggcaacttgtgttctgctgtgcagaattgaggaatttgctattgtctagaccacgctttagacagtgagccacaaatccccaattcgaggctattctgttgttacataacttgaagagatttttttttctcccaaagtcattgaagaaaaatgcaagaataataaaactttaaagaagtgggaacgcatgtcaaataaactcaaatggcattatctatgaaagagaagtctgtatgctattcgttaatttcttaaaactatattaagactattgtaactacattaagttctaataaagtcaaatgagagattggaagagaagatctcaaaactcttttcctatttaaatttttatagtcttatgaatatgcaatatatttgaaatagaaaaagacaaggcagaaagaaaacaaatacaattccctccataatactgactgcatttatttgattttttaaaagcacaaaagagagggtaatttatcttcattggattttctttttacatgttttcaatattggaacacatagtgcagagcctcctttcaagcagttatttctcaatggcttttttaaaaagtgaggaataaatgactgtctaataagaaaaaatttcctaatatacactgtgcattaggaaaattggttttgaaatcttaaataaaccgctaaatataactattattcagaaactggcaaatatgaactatgagcacccattcacaaaaaaaagtaattttattcctttctctttaaagaaaaagagttatatttg

SEQ ID NO: 46667 - DNA, 868 bp, Bovine  19866881122905
  misc_feature (1)..(1): n is a, c, g, or t
naaattgcatttagcaaagtcacaaatttataatataacgtgtcaattccaaatgattccttctgaagactaggtcttcattaaaattgtatgtatatgtaggaaagtaattttgatgcattcactgaattgagatgctgcctgtatatacagagcttttattgacaatactagtaatgtgaagatataaaaagcaacgtccactttcagtaatacaggaagagaaggggctactctgtcaataaccagggtgaggaaggaagctgatccaaacttcagaggctttgaaactgcaggaattagctttctcaggttggtcgtttcattgttcacttactagacagccttgagagcttaataattaaccacagaggctatttatagaattttaaaaacatggccattcctgagcgatctgggccgtttatcctactgctctgagagttgacaaggtcacgcagaattcccgtgtgaagagacactaacctcaaggtccaaattccccaggttgaagagaagctacgctggcatgagaaagtgataaaagagcagcctggacagtttatcttcccccgatcctccaaaacctccctttgaaggcttttttacctaggtgcaattccaatccccttccattaacgccagggcttgattatctcaactgcttctaatagggttaagtgaatttacctcagtgttctgaaagaaaaccagactcctaaagttgctaatatacacttactaactcatgaccaggtcacacatccactcccttataaattttactggggttcttctttttacgcacaacgcctcctctccacttgaagccatctactacactctgagcgccttttcgttgtgtaat

SEQ ID NO: 46668 - DNA, 1277 bp, Bovine  19866881206439
  misc_feature (1)..(1): n is a, c, g, or t
nataatctctatgtctgggcatgttgctgcaaatgacattgttttattcttttttatggctaaataatattcatatgtgtgtgtgtgtgtgtgtgtatcacatctcctttatccatctgtctatagatagatatttagattacttccaatgtcttggctatcgtaaatgaatatattggagtgcatgcactttttttgaattataatttattttggatgtgtacccaagattgtgggatcatatggtagctctattttcaactttttaaaagaacctcccataccattctccatagtggttgtacttatttgcattcccaccaacagtgtaggagggttcctttttcttgcactttctccagcatttattatttgtagactttttgatgatggccatttttactaaagtgacgtgatacttcatttgtagcttcccaacaatccaaagaaaggacaaataaaacaaggcatactatcaaaagccacagaggatttaagaggccgaacccaatgacctacactggaatttggtcaaaactctaggcttaacacatctaactctttcagaaacaatatcatgggatttctgatgaccagcttagaataggactagagctggccagactccttgatatgaaatgaaacaccactgaaaactaataggctggtgaattttgaactagaaagtttggcctttcatttcttttggccagagtgctttcaacaaaagtctaaatcatatttttttaaagtagtctcttaaaagacatgaatagctacaggtcagttacaattggttcacttatgttcttccttaagttcaagataataagatggagtctgaggcttgggggaacaaaatgtctacacttttgatctaaatattggatctatatttgtaacaatttttcacaaggatgtagatgatactcaaagtgaatgaaaaaagagagagtataaatctagaaacatgggtttgtagtttaatgtgatgacatgtgtgtgcatatctgagaaattagagtgatagttgcataagtgagtagatgtgagtgaatatgaacaatgaaattacagggtaagctctaaagagaatggaatacaagaaaatcctttatttccttatagcaccttttccctctctcacaactatgcactggggatactaatatactttttctccaatttaccattttgtccccaattgctatatgccagcaagtttggaaaactcagcagtggccacaggactggaaaaggtcagttttcattccaat

SEQ ID NO: 46669 - DNA, 825 bp, Bovine  19866881232870
  misc_feature (1)..(1): n is a, c, g, or t
naccagcctgtttggtgatgttagaaaactaatgtgcacttcaattcttgtgtatagtatttacttagaggaatttcatcatagataaaaattactcagatcgagaaataaaattatacagatcaattgagaaatatgagttttgctagtaatgagattgcctttatgggaaaataatgccttgtttgtgaagaaaaatgttcagaggttagttgcattttttctgtttttgctcattaaataaatattatctgtttactagtatatttccctggtggttcagatcgtaaggagtctgtctgcaatgcaggagacccaagtttgatccctgggttgggaagattcccttggagaaggaaacggcaacccacttcaggtattcttgcctggaaaaatcccatggacggaggagcctggcaggctacagtccacaaggtcacaaagcgtcaacatgactgagtgacttcactcactactgtatttatctggtaccactgtgcctagggcattgctcaccaatttattaattctggatgctacccaaatgcatcagccagattcttcaactttgatggacttcttcagcattattaatatttctctcaagttctccagtatttcaggtattcatgcatatccactgcacaggccggcaaatctctgaaggttctatagactttcagctgtgtttgttaccacaagaacattcagtttctaaaagttaaaaacatatctctaagcagctcataaattctaacttcaagtttaaactgatgccagatgccagagtcaataaccctttaaattggtggatctcaattccgt

SEQ ID NO: 46670 - DNA, 1019 bp, Bovine  19866881276690
  misc_feature (1)..(1): n is a, c, g, or t
ntgtagattcctttcctttggcctcaaaaagggcaaaattgggactgcaagagcgaaagtgaaagagtaatagcctgcctctctctctattcccctgctattggatttcactctgggctggctctccgaggactgtggagttaatgaattgtgttctccttctgactcagtgtgaggccacacacttttcgggtcactttagtacaacagcaacatgggtgagagtgttattaacaatcacctcttttcacattcttgcaaattaagcaatactggattaaaaactctcatttgtactcaattctggacaatttcacattgaagcctatttttaccaccaggaagagcagactaagtatcctgatactcaactggatgtatttatcattagattttctctcactatggcaatgtgctgaagtggctggcggcccagcaggactcattttccctctgcttccaggaagtagcacagtgatggttaacagacatggttgtagaaagcgtttcttttaaaaattcctgtgactgcattgaattgtatgccaaatatatacatatgtataactaaaaatatgggaagcatgtatttttccagtcgcatttaattgcatcagtatagagattatattggcttctgcagcaacagctaatgaaccatgtatagcggaatccagatgtttagactatatactctgccaatccattatacaaagtttcaattatgactgtctcccattgtgtggaaagaagaactgcatcaccgataaggaaatacaatggaaggctaatcacattgttgctatttgaaaatgtggagggaagagcttagggtagggttaggttaggttagggaaagtgttattttcagtaaggagatggtgaggttggggtaaaggattcatggcttatgtttccatgaaacccttctaattggtattgcttatatgacaatgtgtttgtttcattaactccaatcacagtcacactcatatgccacaaaatacaaaaacacaatg

SEQ ID NO: 46671 - DNA, 1478 bp, Bovine  19866881336024
  misc_feature (1)..(1): n is a, c, g, or t
ntccagagcagtctttgagaggctacattgccttttatttactttcttgagccttggagcattttttttaatacccctcagagctttgaaagggactgctttttcccccagaggaaacctgaatagttcacaactggtaaatagctcaattcttctttctttcagaagatgaaacccaagatgaaaggatgtgatttttccaaccaccattttaacaaggactcctcccccacccaaaagatcaatcatatggaaaacagaaaggttttcaacacaaggatgacttatcatagaacatgaaggaaaagtataggaaatgaagacacatccttcgtgagataaatcagttctcaacggggaaaaaaggagtatctggaaattcatgaaatctaatgcaatttaaaataatagatagatagctgtgaattgaaccttagaagcttccttgggtgtgacagatattaagaggtcctgatatcttccaatgttcagtaatctttgatgagtaaatgtgagttaaactaattatgttatcagaatttctaactggagtatgattatggagttaaggcaggcattagtcgtgaaaatttaatttgtgtgtcaatttgttacataactacagattaggtgcaattgtagcgatatttttgtccctctggtgtattgagagctatattcacaagatctactctcatgaataaaacatcactgagtgtatttcaatatcacctggagtaacagaagcaaaaattgcctctgggacagaagaccacattaaagagaagacactctcaccttgggccacagctttacatacaactacagggcctggaaaagaaagattcttcattaagactatttttcatatatcacactaactgtacatgagtccagaaacaaggatccattagacaataaattccttacgtatttacagctcattttgaatgtgtacacagctaatagacacatataaacaaacacactgcttttcaacagcacatcaaaaaagaatagtcatcagaactgaatatgtagacttcaaaatatggttcagtcctgaaacaaaatagcagtctaaggattaatatagattgtgttaaatctagaaaatagaacagaagtagtcaagaaaattagagataccaagggaacatttcatgcaaagatgggcacaataaggaacagaaacggtatggacctaacagaagcataagatattaagaagaggtggcaagaatacacagaaaaactgtacaaaaaagatcttcatgacccagataaccacaatcatgtattaagctcactcatcccgagttagacatgctggagtcaaagtcaagtgggccttaggaagcatcactataaataaagttagtggaggtgatgggactccagttgagttatttcaaatcctacaagatgtgaaagtgctgtattcaataagccagcaaatttggaaaactctgcagtgg

SEQ ID NO: 46672 - DNA, 756 bp, Bovine  19866881365437
  misc_feature (1)..(1): n is a, c, g, or t
nttccaaagcactctgctagaaaggtagtatttggccttatagcactagaatcaaaagaacaggcagaaataattagtctcaaaataagcacaaatatagtcaccttctcaggagaaattcacattatatttttacctgagggatggtggagacagatgagtataactcaaaactttcatttgaaaagcattactcatattctctcaatcaaatcaacttcatctgagtctttgatcctgtaattatttggcttcccctacatgatcggattcctcaaggaatctaagaattgtctccaataggagccacagtgaaaataaaccatgcagggattcaagtctctgaaccactcagtcttccacgaacaaacgtctctgtgtcatgtacctgtctgggaattctcgagggagggcaggcaagctctccacattggcaatactattgttgggacactgtattgctcccggcttgcccatctgatagcctctcccagaggaagagctgcaggaactgatagacgctttccttccacttcatgcttcttgaccagtgaaaacaaagttgcagaagcggaaaaatcagtaatcacataacaaaagacctcaggcataaaaatctttcactttggacagtggaaacttgattttgctacatcctctttgaattttgcttagaaatcacaaaaaccatactggaaaaagccatcaaagaccacgtgtcctgtttcctgcccccagggggtctgttctacatgt

SEQ ID NO: 46673 - DNA, 1509 bp, Bovine  19866880404712
  misc_feature (1)..(1): n is a, c, g, or t
ncgcctccaggcctctttcaggctcttgggagccggaggaagaggtcacgctgtcagcgctcgccttttctgccagctgtgcgcctgtggtgggtacccccagaatgctgcagtggggaccggagagctttgatgtgcaggtctcacgtgatgctggtgagaaccggcccccatgaagcgcttgttctgggtctgcattgcttttatccagtcctgatgaggtaggtactatttccacttttcagatgaggaccccaaggtacagagaggtagagtaacttgctcacggtcacgcagccactgagcagaggagcagacgtgggactgtcagccattacctgagctgtcccacccgtggccgcccgccgcacatggctgtgagcatccgggatgtagctggccccagtggagacgtggtgatttcaatagtaggaaaaagaatgtgaactcactatttttttatgtttattatacgttatgtgtgtgtgaagtcattcagttgtgtccgactctttgcgaccccatgggctgtagctaccaggctcctccgtccatgggattttccaggcaagagtactgaagtgggttgccatttccttctccagaggatcttccccacccagggatcgaacccaggtctcccgtcattgtaggcagacactttaccgtctgagccaccagggaagacaccagtagttaggactctgcccttttctttttcaagggttcaatccctgatgggggaactaggatcttgcaggctgcagggtgggaccaccaccgcaacaacagcaacaacaatgaaagcccttatacacagcacaagatcaatatacaagttttctaaaccctggagaccaaagcaagtaaaataaaggctatcaagacccagaatctcagaggtacgtgctcacatgatttctttacaaagaagtaacaagaggttttgctgtttgttttttgttttttaggaaatgtatagttgtttacagaacagccagagtaaatgcaacctgatgtttcagcttcaggcatcatatcccagacatttctgaaacccacagagggtcgtttttacttcttcagaatgtctccccacctcccaccccatctgccttcctttttcctccagtggaagagtatacacaaactgtacctaagaatattgtataaatgatatgccagtgtagaaaacacattcctaacacagtctaaagagtgcaggattcatacatccattcattcaatgaatgtttactaacaggtactgttcaagcagcactgtgtgagtgttgatggcaaaatggtacaaagcaaatgcagccagacctccgggaagagaggctgttacacgtgaaccaggcagaggcaggaaaaatgcagcacaatgaacgctcttagtgaaggggtgcactgggggtggggccaggggaggggtgccttcctcttgagagtggggagagaggggaagtagtttcaaggagctgacagccctcacattggccactc

SEQ ID NO: 46674 - DNA, 927 bp, Bovine  19866880478889
  misc_feature (1)..(1): n is a, c, g, or t
ncctgcccttttaatgagctattattaaaaccagtggctgacttaaaggcttcctaaattaacactgagaaacttggctttcctagttgggtttggggagagttccagcagtgtggcccactcctggttattgataacttttggaatcctgctgggttggcctgcctcacgcctacaaagcaaggaaaggtgaagacaagtaataatggagacctaaaatacatcatcaggaataaatgtgttgtgaggaaattccaagctttattaaatgcacttttggtaaaagaagccctacagagaatttcttaataaatttcagagaggggaggtgtttggtcgctggagtagcctacataagcaattgtggtatttctggaatgtcaaaacggcagattgctggaggtgatcactcagcctgtatcacaactgtttcttaggataggctgaggtggaggacagtggtttcaggttggctgagactcctgttcttgtcttaaaggattctgtgagggacatggactcctcagtttggaaagagcttgagagtatagccattcctacatggagctgatcttcccgcatgtaaaaatctgtggccggaagagacactgtcctgatattaaacaccttggtaactcgttcccaagtccaacaacacccacagccaggaaatgcttcttgatgtttagcctaagtccctcatgcttcagtgtaagctcatttcctctcactctgtccaaaacagaaatagggaacagctgctctccatccattggttcatgctcctgaggacctttacttcatccattccctaagtcttctcttctccagaataaatagtcgaactcccagaaacattctctgagactgacccaaaccacagtgtccaattactttctgagtgcttcctttaattccaacactgat

SEQ ID NO: 46675 - DNA, 790 bp, Bovine  19866880502712
  misc_feature (1)..(1): n is a, c, g, or t
ngagtctggctggctacagtcagggcgataggatccaaagggtaggacacaactgaagcgactttgcacacacacacacacacacacaaggaggccaagaaccctgatcggtaacactggtgattctctgcctctcaccctcctctggctgaaaggtcagctccagaggaagacgtatctctggcacgagcccagcttctcttcctggggtgccctcttttttgaattaagctttgtggaggattatccacactgctcaagtcagaaggggcctcttagagagaaatgctaccatgggcaaaataccttcaattcccttaaagggaaaaaaaaattccttttggtctacagatgggtaattgtgttcactgtttccaaatgtccacatgccagcctgggccagctttctactgagatcaaacggactcccgggtctcctttctactgatgtgggtgtgcctttagccatggtgtaaaaagctgattcctccacagagtggactgggcagactacactgttcacacggcaaagagatgaagaatcaagccttttccagagtcagacaccagaagtcacaccccctgtgaggaactctcaggctcccagatcctacagtctaggttgcccaacacatagaaacaaacctggaacatccttgagctcaggctgtgaaagtgttagtcgctcagtcatgtccgactctttgtgaccccatgaactgtagcccaccaggctcctctgtccatgggggattctccaggcaagaatactggagtgggttgccatttc

SEQ ID NO: 46676 - DNA, 2326 bp, Bovine  19866880510016
  misc_feature (1)..(1): n is a, c, g, or t
naccctaatgctgggaaagattgagggcaggaggagacagggcaacaaagggtgagatggttggatgacatcaccaaatcaatagacatgagtttggacaaactctgagagatggtgaaggacagggaagcctggcgtgctgcaatccatggggttgcaaagagtcggacacgacttagtgactaaacaacaacagaaggtggagacttcagctttgcttttatcttttcagtatctagcatggtgccatttattgagtagacactaaaaatgtgttcagaatctgtctgaatggatggatgagtggatgtaacacacacaaatccatacttactaatcaccccaattctcaaaagtacttatatgatacatataagtctagaaacacatgggcccctttgtataaatgcctctcttctatttctacctccacttccaacctctccacaaagctggtttgggagcatcgaacagttgagagataaagaactgaatctcatttccccctgtaactcaatgtgtgaccttgcacaagtcacttgttttctcatctaaattatgaggggaatggcctggatggtatttgagccccttttctgtcctaaattcccataattctatggctatctacctaccttaatcagacttatctaaataatcacaaaaaacaccacttcatgctgaagaaacacagtcataatagactaagcaaaaccaaatgcccttcaatatcctgttgtgaactataaaatgtcccctaaaatcacattttccccttgaaacaggatgtaagaaaaatattttcctattaaatccttttaaagtgcaagggaaagcatttactctgtgatttgccgtccaactcaataaaaaggggaggattcagccatgttaattacagaagatactgtcagaaaagcaaaggcggtggaaattcaggttggaaaccaagataccacgccagcaacacgatgcgcgagttttctggaaggagcttccaagtgtgtattgagcagtttatttctgccattacgtggggaaaaccagtaaatgagtttttatgaagtgatttatgaaactcctggggtggagggagggagaactgggaggcagtggcaccaccatacaaccctgtgggggagaggggagagagagggcttgaactttggtagctgttcattacattgctgcaagctgcatcctctgaaatgggttaagcaaagtgggacactccttaaaagaggtaaaagaggctagaagatttcagaggaaatcttggtacttgagatacctgaaagcctcctgttagattagagcttttaagggtagagattctgttttccttatttctgtagtcccttggagtgttaggaacagggctagaaacattgctccagaaatggaaaaagaagaggtggatctctgtgttcatccaggaagacagaaagaggtgtctactcagctcataattagctctcttttctgttggagtgaaccccctgctctgtgctgggcttagtcactcagtcgtgtccgactctttgtgaccccatggactgtagcccgtgaggctcccctgttcatgggatttcccatggcaagaatactgaagtgggctgccatttccttctccaggggatctttcctacccagggattgaagccgggtctcttgcattgcaggcagattctttaccaactgagctaccaggaagccccgtggtaggcagaattatagcccgccaaggatatccaagtctcaatccctggaatgtgagagtacttggcaagggggaaccgagattgcagatggaattgaggttgttaatcacctggcctccagatacagagattatctcagactaccaggtgagcccaatataattacacatgttcttaaacatagaagagagaggagcagagctggtgtcacatgatagcttgtaagaaaagtgatgcagttgtcagaaacctatttatcttgtgtaactaaaattttatacctgttaattagcaaaccccctcccccagctcctggcaaccactattcttttcttccttctatgggtttgaccatgttgttgttattcttgcttagtcactaagtcatgtcccactctttgtgaccccattgactgcaagcacaccaggcccctctgtccatgggattttccaggcaagaatagtggagtgggtagccgtttcatcttccaggggatctttatgaccaagagattgagcccacatcccctgaattggcaggcagattctttaccatctgagccaccaaggaagcccatgattattttagatacttcatataagtg

SEQ ID NO: 46677 - DNA, 3224 bp, Bovine  19866880666663
  misc_feature (1)..(1): n is a, c, g, or t
ntaatgtctttgctttttaataagctgtctaggttggtcataacttttcttccaaaggggcaagcgtcttttcaaacaaagcatagtttgtttcagtcctttgtaaatggcttctataaggttatgtattggtttttctcttctggtgttctgacctcatggtaggccttagatcacctacctctagcttatacctagagaaaggaaatagtacctggagaaggagcgtaaaattacgttaaaaattgagtgtataagtaactttcgaaaagatgcttctcaagtagcgattggctgtgttcgatttggggatagcagaatagcgctgatgtggtttcccagcgtgggctgtcgggcaggcgcccaggcccccaggggatgctcctggacagggggatggggctccggagccctcaggtgacacggcacgtggagaccgaggctgcaggttggggggctgcagcggaggggcgtggaagggtctggaaccggcatgagtgggtgacagcagggcgcagccgagttcacaggaaagcggggtcgtttggcacttgggggcggcggggacatcctcccgaacgtcctcctctgaagagcgccctgtctgtccctgcagggaagtgtttcggagggtcgggcgacctccgcaggcacgtgcgcacgcacaccggggagaagccgtacacatgcgacgtgtgcaacaagtgcttcacacgctcggccgtgctgcggaggcacaagaagacgcattgccgggcaagtgacgaggggccgggcgccctggaggcgctcgcgcgggccatcgaagccccggacctggagcggtcccagagctccgactccttctcccaggacgtgtccgtgcctctgatgcccgccgtgaccgtcaaaatccccgcgcacccggtggatgagaactcggtggcggggtttgacagcccctgtaagttccagccggtggctcagccccagcacgggccgagtgagtcagagaagctcagcctggagccggtgaagctggccaagcccccgcacgtgccgccggcgcagcaccaggcctacggctacccggacgtggacgccccagccggcgctgagccgctgcaggccgacggcgtggccgccctgcgatcgtccctggcggccctggaccaccccccctgcaccgaccccctgggcagccgcgccgctgcccccgcctacaggaactcggagggccagttcttttctagcatgaccctctgggggctggcgatgaagacgctgcagaacgaaagcgagctagaccaatgatgcccctgtcgggtctcactcagcgtcgggcgccggggccgggcttcggggcaggacgccttctcaccagctccagacagagcccgatcctgacctggaggggctgagcgccccagcaccttgagctcagcgtgcggaagaaagcctcccggcccctcgcggaggggcacgtgggactgaacaaggctcatggaccgggcggtatggactgcggggaacgccgcacattttggtcatggtaaagggaaaatacacatctataataatccagatactatttttgcatttttacatggttgaaatttgtagcattttgtatttttatttacaaaaaaggttttatttgtatagggaactcatacaataatttaatttgaataaatggaagttgcctttctgcatactattgtgtttcctccaacattcttattaacctaaagaccatgtggcggtggtggtttagctgccaagtcctgtctgacccttgtggaccccatggactgtaggccaccaggcaagagtattggagtgggttgccattgccttctccaggggatcttcccgacccagggatggaacccagatctcctgctttgcaggtggattctttactgactgagccaccagggaagccctaacctaaagaccatgctgctgctgctaagtcacatcagtcgtgtccgactctgtgagacctcatagacggcagcccaccaggctcccccgtccctgggattcttcaggcaagaacactggagtgggttgccatttcctcctccaatgcatgaaagtgaaagtgaagtcactcagtcgtgtctgactcttagagaccccatgactgcagcctaccaggctcctccgcccatgggattttccaggcaagagtactggagtagggtgccgttgccttctccgatagtggaataaaaatcaacatcaggatttccctggtggtccagtggttaagaattcaccttccaatgcaggggacacaggttggatacctggtctgtaaactaagatctcacatgcctcagggcaactgagccaaactacagagcctgtgccccacaactagagagcttgcctgccgccaccagagaaaagccacacaccccgattctgcatgtgtaacgaagacctgtcagaaccaaataaataaattgaaagcttaaaagaaaaagtttttttttttttttttaaagggactcccctggtggtcctgtggttaagaatccacctgccagcacacgggacatggacttaatccctggtctgggaggatcccacatgcaactgagccctcaggccacaactactgaagcccgtgcacctagagcctgcgctctgcaacaagagaagccactgcaatgagaggcccgcacgccgcaaccagagagaagctcccactcaccgcaactagagaacgcccgtgtgtagcgacaaagacccggtgcagccaaaaataaataaaaagcgtccaggagggctcaccctgaggatgaatacctggttcagttcttccgtcatcctggacagtggcttcaggaacccacagatcagagcctgggtcctggctgccacatcccagtcaggtcacgggcaagctcctcaatctcccagaaacttctgtgggttcacttttctgtggtggtttagtcactaagtcatgtccgattcttgcaactgcatggactgtagcctgccaggctcctctgtccatgggattctccaggcaagaatactggagtgggttgccagtgccttctcccacttttctgtagtgcgaggtgagtagctttcggtagtcttacagggctcaaatgatctcctcatccacttgaaaacacctgcccagggcctggctgtcgacagcttctgaatgcatccttcttctcagccgcccagcagagccgcgcggcccccgcagg

SEQ ID NO: 46678 - DNA, 3252 bp, Bovine  19866880724602
  misc_feature (1)..(1): n is a, c, g, or t
ntggagtttataacatgatctaaatatagtgctaagaaaataaaaatgcaagcaaagatgggatcctgaccaaaggggaaaaaaatctaagttatcagagaaacacctgagtttgaattgattctgctacctacagtgtgacctggggcaagtcacttaaactccctgtaactcatcatccgtgacatggatacggtaatatcacccacccagagctgttgaaagatttaattatatgtatacacatgcatatgctgctgctgctgctaagtcactttagtcgttgtccgactctgtgcgaccccatagagggcagcccaccaggctcccccgtccctgggattctccaggcaagaacactggagtggggtgccactgccttctccacgcatgcatatacatatacacaaaaggcttaggacaatgcccgagcctgctaccataacagtgcttcggaaccactccctctttttccagacccagtgttctcaaacatcctcaaatagtagagtaccaagcactttggggggacctcatgaaatatggataaatgaggcaaaaaattttgttgttcagtagcaaagtcatttcctactctttgcaaccccatagactatagcacaccaagcttccctgtccttcactatctcttggagtctactcaaattcatgtccattgagtcagtgatgccatccaaccatctcatcctctgttatccccttctccttttgccttcaatctttcccaacgtcagggtcttttctaatcaattggttctcattagaaagcaaaaaataaaaaataaaaatagccatgccctataaaaatttatgtcaattctcacagcatctaaactagaatggagggtgatatgggccaagaggctgaagaaattctaggcagggacagcttaacaatgagaaaattctattaccttaacctttctctaaaactgagaagtatcattccaattttaactataaagtctccctctgttcaggataaaattggatggagcagggcaatcctataatgttaccattagtatctgatgtcaatgtgatgccagatctcaagagcagtgttgttcaaactatccaacagaactgagtctttacctacctttgatctacaatggagaaatctaatatatggatgaccacaggcctccaacaggtcaccaggaaggcgcagcagcaaaggtcatatttcagcggctcacaataccttctctgtggacaaacaatgactgaccttcccatcaatgtctgacctttcaactcttgacaaatgtatatattttctcagcaattacaacttaagctactaaaggggcagtttaatcacttttatcaaagggaataaattaaagcttccctggatcccagaacaaaaagagctcaactagcctttgcggtcaaagaaacctcttttttcactggggcacacagcttttctcagaaatcctcactgtttgaaagcaagatggagagttagaaggaaggttcagccccaaattacagaagttaaaaaatataaaatctaaaaggacagtctcagagtatctattaataagtagatgtcttttttttttttaactgagggaaattattattctgatttatctttaacatcattcaagactgaaatctgtgaaaacttggagatgatgttttccagttttataacctagtggtaaaccccagagattatacagctattttgaggagctagatacagagatgagctttccaggtggcacagtggtaaagaatccacctgtcaatgcaggagatgcaagttcaatccctgggtcaggaaaatctcctggagaaggaaatggcaacccactccagtattattgcctggagaatcccatggacagaagagactggcaggctatagtccatggggtcgcaaagagtcggacatgacagcatgcatacatgaagatacagagatgaaatttagtttcagtgcaattggggcaaagtaaactgttcagagtttatcacctcctgctgtctcccatgtatgtaggaatgggtgtcaggtgaaaggtaagtgatgttgctaaaattctgcctctgttcacaggtaccaaataggaactcagagacagagttttgggtgaagtagaaaagaatggttttattgctttgccgatccctagattgggaagatcccctggagaaaggaaaggctacccactccagtattctggcctggagaattcagtcggacacgactgagcaactttcactttcaggaaagaacagttttattgctttgccaggcaaaggggcccacagtgggctaatgtcctcaaaactgcgtgtccccaactggaggggttagtgaagagttttacagtgttcagggagcagggcgtggtcaactcatggacattctgattggttggtggttgaggtcaccaggagtcagtatcattaaccatcttccaactggactggggtctatgtgcttatggtcagcatgaagttaaccttttccacctggcgggggtcttagtatctgcaaaacaacgcaaaagacatggctcagaatattatctatagtccttgaggaagaactaaaggtctttgactttaatggctaaagtattaatactactattttgttttgctggactgttttcctttctttctgcattttctcacttctctggccaattttattctttgaccaaagttcttctacagacaaaggggaaggtggagaatacagacgtgggggctctattctgggaaggcctcacagggtcctgctcagttatctaacctcagatggattgttttgacttgaataaaaggggtaagagaggttctaggctaaggttacagagctagcaccacacaggaaattagttaatgcttcacccagagacaaacttttacagcaagtaaggagaaaatgaagtgcacaaagtaatacagggtgtcatgcctgtggtcatgttttttaattcaattttattaaaatacaattcaaactttacagttattgtattaagatgggaaagaccatgaaagtcttctgtgccatgcaagtactgtcaacttaaaggtgaattgtagttttataaaatatgattgacctttctttaacaagtggaaaacattagcatgtcatgtggcaatactgaaaaacaaagcattaaatcccctaaaattgtttttattgtataaaaagaaaatcaaaagaaactctataggtattcactaaatata

SEQ ID NO: 46679 - DNA, 1697 bp, Bovine  19866880767847
  misc_feature (1)..(1): n is a, c, g, or t
ngaacagaaggcagatgagtggttgccaggaggtgggaggaaatggggagtgactggttaatgagtacaggatttccctttggggcgatgaaaatgttctggaaccagtagtggttttggctgcgcaaaacagtgaaatcactcagtgtcactgagtcacacacttgaaaatggttaatttaaagctaggtgaatttcacttcagttacagtaataacacattgcttatggctaatgatgttggaatatttgtattggttaaagacgagatggtgtgataacccagcacctgctctcagccccattttaagcccttgacagcaacctgatcatggagttcacattgttgttcccattttgcagatgggaaaacagagggctaaagggcatacaaggaagcacggagctgggatttgaacacaggcggtccggctccagagcccacgtgagaaagcacaagagagaagcctcttgggtcacaggactggactcagtgccagggggaccagggtgtgaacccagcactctctgactttagatcaggcccataaactctcagatcctcgacatcacaccccttgagtggggtgggtgtgcctgatgctgccagtggggcagtgaggttgaggtcctgtggagggaccacctgccatgatcatacccactctgctcacaggtgcctctcctgggctttggcatgcttgaaacaacattttggtagcttctaattctatctccaagggttctctaggcaatctccatcaatgaaaggaccgcgtctttcatttttgccaagggctctgctcccagagacaggcccatgtaattaccaccttggccccctgctgtgtggtagacagtcactggattcttttacgaatcctgcaggagatgggattggcctcctgcagggaggccaaacccccaaagtgaatttataagtgcaaatcagggataaaggtaagggagtggagagtggcccacatgaattgctaaatctggctcccagaggggcatcatctgtctggctacattctggaaacatctgcgtggaccacttggacctgagcatctctctcaagccactgatggaattctgtttcggccactgaatgtttctggggatggtggactggtaatcttgggggcctagcatggtatgtttagtcagggaagccagtgtggtcccaggaatgtgccattttttttaacacaaaatatttgtttttctgtcttgtgggcatggagcctttcttgagccaaaatgtatgtagctcacccataaaaagtgctttttgtcagaaaggaaggatgaaacccctgtctactggatgcctgcctcctggcatgctctgctccaggcaggcccatgagattaacacatccatctgggaagtggttatttttgcaggtgggaacctgaggctggggtggtggtgggatctcctgtgcgggatcacaaggagagttggggtagaatcaggaaaccaacccgctctgagtctgaagagtgagttccttccactctaccagggcttccctgcctggggctgggagatgactaggaccatgggcctgggggttggccaatccctatttcctttgcgtggatgggtgataggtttcacatatgacagccctactgttctgtggttgtatgtgatactctagccaataggagcaaaatattttaaagg

SEQ ID NO: 46680 - DNA, 1079 bp, Bovine  19866880788133
  misc_feature (1)..(1): n is a, c, g, or t
nattgccatgaacagagatttgttgttctttcacttgctaagttatgcctgactcttttgtgaccccttggactatagcccaccaggctcctctgtccatggatttcccaggcaggaatattggaataggtttccttcttcagaggatcttccagatccagggaattaacagagacagaggatgatcacgatgccggtgatgagagcaaatccttaacgtaccacttactagcttacttattcttatcattcccattttatagataggaaaaatcaaggtacagaatggttaagacacttgctaaaagtcacacagccagtaagtaaagagcagaagtgaaacccaaagagcccagatccacagtctgaaatgccacccacggagagagcagttatgccggaaatgcctgcaggggccagacaggcggaagtacagagcagctgcaggaactctggctttgagaccagaagtggattcaaaacagtttaggagctatctctccccctgggctcttggcctggccagacttgcccacgaggccacccttctaactctgccttgttggctggaccaacatcctctcttttctccccttcactcactctcacccacgcatcctccttaagtaactcaatctcatcccaggcatctccaagcttactttatacaatactttctgtccttggagttattccaggtgcctcaccaccattctgttgcctgcccatcaaatttctggctcccccttcacatgggcatccccaaagttcacctttacatacagcttccctaagaggaatttgatttagagttgaaaagcagatacagtgacaataatcatctccttgggcagcagtatttttcccaggcagttgttttcctccatctctgctctagctcgtggagctggaaaatgtgagggctccactcaaagaatataatttccataaaatactttccaaatttattaagggagcagacagcaaaaggaaacccacaattaagggagtttttgcatgcactcagtatctttccactggctggagtatcatcttcctgaataatgaggtctggcaaa

SEQ ID NO: 46681 - DNA, 756 bp, Bovine  19866880968103
  misc_feature (1)..(1): n is a, c, g, or t
ntacttggtgaccacgggtgttacctggagactcacgggcccgcctcctgcgtcagtgtgtgtgtctcaggggccgcttgtcttgcagaacacccagtgcatcccagaaggcttggagagctactatgccgagcaagactccaatgcccgggagaaattttacaccgtcattaaccactacaacctggccaagcagagcatcacccgctccgtgtcgccatggatgtccgttctgtcggaagagaagctctcggagcaggagaccgaggccgcagagaaatccgcttagcgagatgggcaagttccttaatggtgtcgcttgaaggtaacaaggggactttgagggacatttcatcaaatataattactgataatttatagaggttactcatgtatggtgcaaccgcttctgtttgctaattgctgctttgcaaatacaacttgctgcggaccattcacgggcgtaaagtcaagtgcgtatcagcactgcttagggagctctgccaccactttccatgttagggaatcttaatttagtgactttcctgggatttattggatgctgtcaaaaaaaaaaaatttacactggatatgcaaggggtttgaacttcagataaataataatgcattttgtggaattttttttttccttttaaaccaccttgctgtttcgcaaaccttactccacagccacatctagagtgatccctgctgtgctaagggcaagctgtacttcacgtttcttcccacctccca

SEQ ID NO: 46682 - DNA, 2657 bp, Bovine  19866880980769
  misc_feature (1)..(1): n is a, c, g, or t
nctctggaaacccattcttaagattctgacagcatgaactgtcctactctttgttgttttcattctctcttttcttctctttcttttcctatacttaaattctttagtaaatgttactggtaattatgggttctttatgactatgatcatatctgcctcaagtcatttcaactatcctgcctccctccctacagaaagaagctgtgacttgataagaatttccttggcatttgagctggatgtcttactccgtgggcctgagaggggccccctatctgctgggatgcaagcaggagctggatgtgagtgttttctggggaaaaattttagatttaaatcgacctcaaggatgaaaccaataaaagtgcctggggatgcctcgcctttgaggttagaaacctcttgcattgatgtttgtgcttctgagtcaccagtagtcgagtctgcagaaatgtcttttctgggacaggaaatcctcaggctaaaatataaatgctctacctgagtgtgctccccagtcaggcttttgaaaaccaaaaaggagatgaaatcacagaccagtttaaaacatgcctgttcatctcagaaaaaagtctctctgctgaattctttagattctcaaagcaaaaatgtctgtgtggaattaatcactcccaaccccacccctgcccctaactctgatcatgttccaaggatatctttaataaaaaaaaatttgtttgaaaatttttcaaaaattttttttgaaaattgaagtatgattaattaacaacgtgttaatttccagtatacagcagaatggttcctttatatatacatatgtacctatttttttcagattcttttccattataggttattacaaaatattgagaatattgacctgtgttatacagcacattgttgctagttatctattttaatatacatagtagtgtatacacacatttgttagtcacaaactcctaatttgtccaagtatgttttctcttttccttaaaaacaggagactcttcatctttgttcattgtacagctcaagctggcagttaggaaaagtcatgattactgaaaatacacaagaagcttcattactgtgaacacgtgattgtcagaccatagctcagttcttcccataccttctgttgccttactcctaagaatcccatgctaatgtgcatctttcaggctttctgcgtggaggctgagattttagtggttggcaacaaaagaaagggccttaggaatgcttatcctttgcaaaacagaggtttgtccagtgatggctgtgctgcgcttgtagttctcaggtgctacacaagagggcgcttctgtatcccattgcacaaggccctgaggataacagggtgttgcgtggggcagctttcagtaaaagtatttcataaccagggcctgcttactctaggccaaatgacttctgaccgcaattaagaaaaaggaaagttagatttgtgcagattcctctcttacttgtatactcaaattgaatggaattttgcagtcccatgacagtttctttgagctggggccttctaaggaaggaatcagggttgtccagctggaattgcttccttttgtacagccagagtccacagtaggcaaaactaggaaatggccaaagatcgtcattcatctcaaaatgttgccaggaagtaactgttctgaaacgagccctccctccttcctgttcttcattctttatctcatgctccatcccatctcctatgttccagactcaatttctgagggagaaccaagccctgtttttccatttaaaaaatctgattgaattaattccccactgagacatgaattaatcatattattcctatctgaatgctttcagaattaataaaacaaacaaaaatacacttacttgaaaagaggatacccaatttaggctatagtttatagaattcagatgttggtacagtgatatgagaaaaaatgtttatgttagctggttgttgttgttcagtcacccagtcgtgtgcaactctttgctaccccgtggactgcatgcagcacaccaggcctccctgtccctcaccatctcctgaagttcgcccaagttcatgtccattgcatcggtgatgccatccagccatctcatcctctgttgccctcttctccttctgccttcaatcttacccagcatcatggacttttccaatgagtcagctgttcacatcagatgaccaaagtactggagcttcagcttcagcatcagtccttccaatgaatattcaaggttgatttcccttaagattgactgattcaatctccttgctctccaaggatacagcaagaggttagctggaggtggattgaaatccagatgttatcatggggtgatgttggaatcactacaataatgtactcagtatacctattaagtgcctacagtgtgcaaagcaccagggatgcaaggatgagcaaaaccagacagggaccctcttccaagcatatagtcttagggggaaaggctgacataaatcagtcaagaaaatgcgtgtcaattcacacctggggtcactgccactatggtaattactagtgatgttctctggagaggtggtctccccatccctcatcatacatggatagggttgcactttcccattctttgaagttagg

SEQ ID NO: 46683 - DNA, 1054 bp, Bovine  19866881024005
  misc_feature (1)..(1): n is a, c, g, or t
ntttttaatttgttaatatggccgaatacacaaaatgtcaaacagctggctatgtggttcatatgataaattcagtggcactgtgtgcattcgcattgttgtgtaaccaccaccactacccagttccagaaccttttcatcatcccaaacagcaactctatccattgaacaataacccccattatccccagcccctcagcccctggcaaccacccttccactttccgtctcggtcaatctgactgatcttggtatctgatgcttctcagcaacccaatggtccataaaccagcagtgagagagccctgtaagttaatgcagggaaaaggcaccataaggcccaggccctttgttctgggcctaagtcaggttcacaggtgaatgaatttgtctcctgtaaaaatactgagtcaggtaagttgtcctgtaagtttgttaaagacattttatcaaataaactagccaatgtatcataacatatagacctaactgtcctggaaagacagaagaaacaggcaaagcccaagcaggggaccattttgcacatgggcagaatgctgcctcagggagtcaatccactagaatacgacttgcagcacatatgacagctgagacttaatttgatgattcaggattatcaaggaaagagtaaatactgttccatgtatcatttactagagtagtaaaacagtatatatttaagggggaaaagttctgaaaaagtgcttgtgtgtgtgtgtgttagtcgctcagtcgtgtccgactcttgcaaccccacagactgtagcctgccaggcttctctgtccatgggattctccagacaagaatactggagtgggttgccattcccttctccagaggatcttctcgacccagagatcgaaccctggtctcctgcatcgcaggcagattctttacctttagagctacaaggcagtcctgaaaaagtgcttcaggacagattattccagttaaccagaaaatgtgtgtagaatacttaaatgaaatactattgcttgatcttattggttataagtaaatctttcactgagg

SEQ ID NO: 46684 - DNA, 2559 bp, Bovine  19866881045228
  misc_feature (1)..(1): n is a, c, g, or t
ntatttcagctttaattctcttactgcaattcagcaatgggaacattgtcaacagctcccttttatttgttaaatcaggcctctggacaaagaatgactcttttctcaaaacccaatttttaaaaaatgtttgttgttattttaatcgctcagtcatctctgagtctttgggaccccagggactgtagctcgccagactcctctgtccgtgggatttcccagccaagaatactggagtgggttgccatttccttctccaggggatcttcccaacccaaggactcaacctgcatctcctgcactgcaggtggattctttaccactgagccaccagggaagcccaggaaatcttagggaatgagtcttattgtcctgactggagcctgatccctgcctatggtgtgtgacctgaagggtggaggatgttacatggaagaacagcagcttctgctgaaactacgttcgaagtcagaggcagtatcagcttccaaaaggaggaaggtgctattgttgatagaagagtggtttgggaacaaaaaaacaaaccaggcatccaccacaaccatttaataatgaataataaacgtatcacagggcaaacagtcagcaaattaatatttcctcatcatattggactgggtttcctttactacatttgaggcacgtttgtgagctgagtattctgggaagcatctgaatccaccgggagatgagtagaatttttaggtaggtgggcaggcataacatctatgcctggctattttgtcactaatgtattttacagtgagtttctagatgacacatttaagtaatccacagatgaaatcctggaatagtactactactgtgagattactgcccacaggcagacatgacaaaggactgacagttggtatgctttgtgggttactagcaaaatatacttctaacatgtgactctgcctaagtcaacggcagaccataattgaacaaccattgcccaatttgtgggctaacagaaaaccaaatgtttgccttgaaactttccaactcggttcaagaataaaatccaggaatatgataatatacacatcaaatggacatgaatgcattcaactcaaaaatttaaggaaggacgcagtgtaagtttaaaatttttagaagtttcccaaagactaagaggagataggagacaggaaacctttccttagttctcccattagcaaatcccagaaattacattccatgttagttcagaagcacttgcaccttgagagtaagatcaggaagaacctagacgccaaatcccagctgtaggcacgccagacctctcagggcctcccattcagctatgatctcacagaaagtaggctcaaagacctgaccgcaacattaccctagaaaaagcaaccctgcatagagccacaggccaatcctaatcaaaggaaggacagagaaaaaggttgaagtgacggaggagtgtgggggacttcaacctgcagagtcatctcagtcagctttctctcctcagttcctgaatcttactgtgttagagctgactttaggggctacatttgccagcagaatatgggaatgctgatattaatattttcaaagtccatcagtagattacttaaacatggcaccttgaatatctctaaatattccaaggtcaataaaaaatcacatttctacgttttataacaggcacccaacagaaaggaataactgatgagattcttaatcctctgatgagtaaaaagtaccccagcactcacgacaaagccagaggtctgcagtgtctccttgctagcacagtaataacatgctggttggctacgatgaagacaaccataaacttctaacttttcttagaaaagacggatgttcaatcattgcttctataaatgacataaatttttttctttttaatgtcaatctgagggcagggctatgatgaaaacatggaggacctggaagaaaaccatccaaatacgtaagagttgactactggagggagaactctgagattccagcttccactgagggagagaaggggcccgaaggagacatgatgatcaaaggagccatgattatcagccctcagccttcacgatccatgaggccaggagttgtccattatgacgtctctgcttcgagcagcaccttgaaagtgctcaggaactctttactgagtggtcaagtaaaggcttcaaggcttctctacaaatcaggaggactcgtagatacacaaatcaaagaaatctttctcagtcttttcactgcagatgaggaaagcagttgcataaacattatcataaattaagcaatcaatttgtcgaacacagcaacagacagtgcagttggaatggaaagcaaactctgtgaatgaaattcatcctatcattgttctcattttaaaaaaactagagtaaaaacaaagttctttcagctatttggttatggcagaaagagaatttcagagttagatatgatttctaccttttaaagctctttcactcctgtctttcaatattaagaacccgaaggatggttcactttgccctatttttcaagaca

SEQ ID NO: 46685 - DNA, 1037 bp, Bovine  19866881055071
  misc_feature (1)..(1): n is a, c, g, or t
nctcccccaggccatcaagaacaacgcaggcttccgggtgtgggtgctcttcttcctggtgatgtgctccttctccctgctcttcctcgattggtacgacagctaggcggcccgggggacggcgccccacaccggagccactgatgggagcggggctgagatgtgtgctcacagaagggacaccagacctgtggcttaagcattcagtaatgaaaaagaaaaccacacaactgaaactggtctgcgctgcaatcctgaggccagagggaaggagcggggggatggttattcctgcacctgatggggctgctggggggcgggggctgccccaggtagggggcctggtgggcttcctgctccacaaacgtctccaattcagaggaggcagcggccattccccaccccagcaggaagaacgcggtcagtcgctcctcagggcagatgacctgcgctccctgtggtttcctgtgtgcctgagcaactgatgcacagactcctgagcagaggaaaagccagctcgccttcattcaccctgtgaaactagtatagaaccgcggccacttactgtcttattggtgggtccaaggttaggatgtcactgcgggccacctgcctcctgtcggggaagaaatgtgggcaggggcctggctcctcccagcactttcctgcggcagaggggggcgggcaggggaggcctgacttcctgcccctggggccccccagaagctgcgtccagagaagggcctgggcctctcctcccacccaggccccaggagttgggaacgcccactggtacagattcgtgaagcatctgcaaccacatctgtgcagaaagtccctggtactcgtgggccccagggtatggtcaagggctctccacaagacaggccagggcctccacagggatccttgtgttctttatttgcacagactgagaatgtcgaaagttacacgtgaacgagtttacagtctataaatacacgcctactagaaaacacaaacagggttgccttggcactgcgttgacgtgggctgga

SEQ ID NO: 46686 - DNA, 1422 bp, Bovine  19866881254440
  misc_feature (1)..(1): n is a, c, g, or t
nccccaagacatcaaaaaggcactgggtccagtaatgctggaggcggccgtcattaagccctaatggagtgcttcattaaggccccttcaaaggcccccatttacagactcggagattgactaatttacacattgtgggaaaattgctaccagctctgcccacacccagcaggaggagagacgccctctctctttgaaaggtgggaactgcaatcgggcactttaatggtagcgaaagacccaacccaggccctaacttttggagctggctgaagcgtttgtgcactcacccggaatggtatttgtctttccggaggcagggtgggacagacacaggtgtgcggctttggagccgaccactgttaaacatacctgggtttcaaccccaggtctgtcccattagctgggagtgagcatatgacttagccttcctgggcatcagtttctcttatcggaaaaatgggtatgatcaactcactgctccgggctgggacaagaggtaagagcagggaaagggcccgatgcatgctggctgttctcaccttagcataaacataaaggagagcaaacagctaacctgaagcagtggccatctttccagaggctctctttgtgggattgttgatcaatctgcagggagatgctcgcaccaagagaggcctggggtccacaaacagatggcagtatttgctgctgtgagtcagacccatcggctgttggagaaccacgttatacagccttgagggtagcacataatgggatctatttgtatactttttcctttgtcatcagagcaatttgggaaggacgtaaggaagtgtgctgtctttgggatgctttcatgtggatatatgcatgctaagtcactttaattcttgtccaactctgtgactctatggactgtagcctgccaggctcttctgtcctccggattctccaggcaagaatactggagtgggttgccatgccctcctccaggggatcttcctgactcaggggtagagcccaggctcctgcagcttctgcactgcaggcggattcttcactgctgagccaccggagaagccccactgtgtgagaatagctctcagccagcaaaggaactcgtgtgtcatcagaggcgaacctcagcatggctctgccccggatgtgctaagcaacactgaccacactgccagccctctctggtcagcagagacttccgcagggataagccctgtgatgtccctggaacctctctccagcctgatacactggggtcctcccaatgcactggggtcctcccacctgtcgctactcacagggtggtccagggaccttagcctcactaggaccttgtgagatatgcagtttctcagcacccctccccggtctcctgaacaggcacgatcacggggtctgggaacacgtacagtcgaaggc

SEQ ID NO: 46687 - DNA, 1210 bp, Bovine  19866881343112
  misc_feature (1)..(1): n is a, c, g, or t
ntgggctgtttgaaaggcagttctgtgcagctgccatcgaacgggtcgggggcttgtttggaggtttcggctgtgggcggatgaaggccgactgagggtggggcgtgcgagagtgacccgtccacggccctacactgctgggcgcccgcggagcactccggcagcaagtgaggtgggtagttttcactgaggacacagttcgtgtcgggagtcagggtgctctgcagggagaaggtgccgtgacagggcaggcctggaggctggtcaatggtggctgacttcaaaaaggtgtgacacagactgaggacgttctgaacctgcaaacactgggccgtgtccagcatgacttgtatgttgtcctggttaagatccagatgcgacgtgtacatgaagtccaggatctgcccgatgccactcacattcttaatatccaaatgaaaaacatcattcttctggcctgaagagttctgaaagaggctcctgataaaagaaaggatatctgcttacagggttaacaaaccatacattctgatagctttttcttttaagtaatatgcatgctaatgttcaaaatgactatcctttgataaatgctaagattaaaaattaagtatgcttttgagaattccacggacagaggagcctggtgggctacagtccatggggtcgcagagtcagacataactgagtgactgacactttcacacttctatctgcaatagctcggacctggaagcagggcttcccaggtggtgctagtaaagaacctgcctataatgcaggagactcaggtttgatccctgggttgggaagatcccctggaggaggaaatggcaacccactccagtattcttgcctagagaatcccatggacagaggagactggcaggctacagtccatagggtcgcatggagtcagacacaagtaaagcaacttagcacagcacaggacatggaagcaacctagatgaccactggcagatgaatggataaagaagtgtggtacacatacacggtagactattactcagctatgaaaagaaatgcatttgagtccattctaatgaggtgggtgaacctagagcctattatacagagtgaagtcagtcaaaaagagaaagacaaatatcatgtattaatccattatatggaatctagaaagatagtattcaacgatgctatgtgcagggcagcaaaggagacgcagaca

SEQ ID NO: 46688 - DNA, 748 bp, Bovine  19866881480695
  misc_feature (1)..(1): n is a, c, g, or t
nattgactacatagatggagaacagattttacacactggaggccaccacaaatgtgttataacttggactgccaggttaactagattttgttcagacctaagaaaaaacaaccctccttttcccctctgtgtaactaattgttacctgagaccactagacagatgtgccaccatttgccactatttagctctgtgagtcggagaaggcaatggcaccccactccaatactcttgcctggaaaatcccatgggcggaggagcctggtgggctacagtccatggggtctcgagagagtcggacacgacttagtgacttcactttcacttttcacttttatgcattggagaaggaaatggcaacccactcccgtgttcttgcctggagaatcccagggacggcagagcctggtgggctgccgtctatggggtcgcacagagtcggacacgactgatacaacttagcagcagcagctctgtgagagagaattcctttcaaaactgtaaattccaaatagactccagaaatcagaaataaattcacttcagcagcaaagaaagcaagtctcagaacaccttcttttaattgtttatattcaaaacttcactggctcaaagtaaacattaccatggattaatgaaatgccactgagttcgtggtttttttttttcccccagaaatctgtatatgaatcatcgggcaggaatggccggacctggacctcacatctctgagcagccattggctgga

SEQ ID NO: 46689 - DNA, 2326 bp, Bovine  19866881519722
  misc_feature (1)..(1): n is a, c, g, or t
nataaatataataaatatattaaaaataacatataaaaataagtttgtcaataaagtatattacttgttcagtcactgagtagtgcccaactcatttgcgaccccatggactgcagcatgccaggctcctctgtccatgggattttccaggcaagaatactggagtgggttgccatttccttctccaggggatcttcccgatccagggatcaaacccttgtctcctgcactggcaggcaaattctttacccctgagccacctgggaagccccagtaaagtatatcagatggtgatgagtgttatggggaaaaacaagaaaaagtaaaggaagggaaatctaggtagagtgtgagggaacaggtgaattataatttttaaatagaggggttaagatggcctcactgacaagatgacatataggacatgcttaagggaggggagctaagagttctcctgacagatactctgggggaaagcattacaagtagagcgaacaagtacaaagcccctaagacaggagtaggacaggagcagacctagcatttgcatgaaaagcaaggacaccgagggtctactggacctctgagcaagcacgtcaagtaggcagtagaatgtagtgtttgaggagaagtttgagctggaaatcaaaatttagaagttagtagaattcaaaaacagatatgcattgttcttcgagcaaacatttaatgagtcaactatgtgccaggaggagtgggagagggagagaggcagagaaactcacctcacaaaatgctctgcaattcaaccccggcttaaccagagcgatgagggaggccaagaagaaagaaacttagggcgaattcccagtcacggtttttagaagacattagtcaaagaaagatttagtgaaaaatgtaagaaatattaaatctgattcctaatctacaagatgaactggagggctgtgcttaacacctcaaattctcgctgtgaagtcattactaacattcttttcattgagttgtcattgagaaactcctgtatatgagtctgaaaatgaatcagaggtaccttactttgcaatagtttcaaagagggaacttcatttgcccagcccatgttaatacagatgctgtagctccctgtacttaccaagcatgatcaaggcccttataagacggtgttttgttccacacagttactcctaaaaatggatatttcatccctaacatgggctgaatataaatctcaaaagaaatcttagggaggacagcataattttgatgcaatcctagcagcaatttatatgaataggttatgcatcaaaagtttgcaagtttagatacgtcgcttgggtacacaagacaggctataagtgtccatctgaacccctgtggtaggtgaatcaacagtccccctaaatctgagtgatggggttcatcgggtcacttgtgtactgaaatatcttaaatatgggactaaaatgtgtaccaataacaaacaacattcacaattagttcatatatacccctaaattagctaagggtctcttgaatagaaactagttctagctagcgttccaaaaatggggagtggggactgaatggatgccaatgttatccaacatgtttgaaagaaggattaaacttcagggtttatcaccctaagctctactgacattttgagccagataactctttgttgtagggaaattatgtggggagtaggagctgtcctgtacattgtagggtagtttagcagcatcccccaagcaatgtctctagacattgccaaatatacctaggaggctgaactgccaccagttaaggacaaccgtttaatgttaagacatgggaagggcaaagacacagctggccctctgagacaactggaagtaggtatttaaaaacttctctgtgagtctgcctgaagggttatcgattctgcttatctttaaaaaaaaaaaaagaccaccaccaaaacaaaagaaaaaaaaccagctcatagtttaaccaatcttttctattgtttgttttggtgtctatttcatttatttctgctctgatctttattatttctttccttctactgactcggggtttactttgttctttttctagtccttctaggtgtaaagttagggttgttcatttgagatccttcttgtttcttaaaataaggcctgtattgctataaacttccctcttagaacggcttttgctgcatcccacggattctggaaagctgtgtttctactttcatttgcctcaagctactctttgacctcctcttctgatttctctgctgactcactggtgctttttggtagcacgctggtttcgt

SEQ ID NO: 46690 - DNA, 1906 bp, Bovine  19866881527291
  misc_feature (1)..(1): n is a, c, g, or t
ncgctggcgcccgggagcctcgcagattgccttgagaaacccatacttttatcaaatcgccagatggccccgtattagagaaaccatttatttattttttcccctctgagctgcttagattctcagaagccggctccatctaaccccatggaccttccagtagcatctacgctcctgcctgaaataattgttcctcgggttttactggcgcccccatggctgcttgtaaattcttgctcattcccaccgccccccccccccaccatttggggaaaattttgttcaagaggagagacatgaatacagcactcagagcccacccagccgtgggtgctgagtccactcttcttttaccttgagtcgttcggcccatacagaactgcttgagatgcatccacctcacagacaaaactatggaggctcgaggtggccccctagcttgccaggaatgatgccaacccagggttatctacctcttttcaaggctgcaaataatttggaatctacactgaaaattcctaatagtctgatatgtatatttacataatattttttccctttaaaccagagacttggcaggacctgtgattacgtagaggaaccccagatgattatggtgtggtgtctgggcttcgtggaagcttttggcattggtggctgccttttctctctctctctctctctctctcttaaggtttgtgagaggaaactggtgctggccctaagggggctgaacaagtgaggggctggagagcagagttgaggagcaggaatgatgcaggctggaggcctgggaggggagggggaacacaaacagagaaacgagagttgtaaacacaaatcagccccgtggaggctcggagggttgggcaggatgggaatcctagctggggcggatggaaaatgaagaaggaggttggaatccgctttgaatcctgcaggcgattgactcccgggcaatgggacaggcgcagggtggggtggggggtggcatattctgcctcccacttgaaacgtcgttcccaaaaggcgggggagagcccacaagcacggcgtgtcgggggaagagctcaggcaaagcccaggaactgcagggatgactctgaattccagggaacgcatgctgatgagtaaaggaacagatgcgctcagtgtaccgcgggggcggagaagagctgcccacatctcatcggcaccgcagacctttgcagtcctgggattagcctcattttaaagatggggacgttgaggtttagggagatgaagtcatgggccaaaatccccaagagagtaagtgggaggctgaagtttgaacacttcttcgggttccagaatccggctctcatcactgcacacagataactcccggagagaagcaggggtgggaaggaggctccaaagaaggaggaggagtttgctcctctagatagggtccatggagagtcccacgaagaagcgctggcagaggaattcacccggcagaggggaggagaggtctaggcagagggaaccgtgcaggcgaagggctgggggcttcactccacccagtgggtttgggggcctgacaggagtttagggaggctgaggcagtgggagttcgcgggttggaggggcggatagagcagaaacgggaaccacaggtagtcctgactgtcagcaaggctggcggcacgagctcacatctgtgtttttgcaagtgatcgctgatggaacaacagagcatgcgcacgaacagaacagaggctaggtgtccagcgtttcctcaagttcttggccccgccccccgtttgggtgtagtgtctacgaggctccagtagtgcagaattctgatggaaccaaacgtatgagaggtcagtgagactcaaagcaagtacaaggtaagatggttccatctacagactgccaa

SEQ ID NO: 46691 - DNA, 857 bp, Bovine  19866881536443
  misc_feature (1)..(1): n is a, c, g, or t
nagactggtgaccctagcgatcagagccgcagggcatccctccataatttttattgcgttattgcaagaggatggggcaggaggctgttccattcagcaccgttacgacaggctgtttgatgttcacttcactcctttcttaacgggggctcatagccaagtaccataccttacagtccgactgacccgaatcttatttaaaaggctcaaccctgaaaatgaagaaaaagaaatgccacactattggttttaaattggaaagcgttaatagcaaattgtggtcataattcatagtcactgttttggaatttttcctcagggtaaaataatgaattaagctctataatagcaatttaatccattatttcacccacatgagctgttgatacttgttccagaatggctgcggagcattatgtaattcttcgcacatttccattcatcactcgtgatacaggtatattaatacccctgggttaatataagcagatgtttgtggtcaggctgagtggaaccaaattgttttctgatgttacacagagaaaaacacctcctttctgagcccaccttcactttacttgcctccagtgaaaccactgcacttagtaatctatttctttggggtaagttttaaagacatgaaagtgactcctgttcttcagttcttcagtttgcctgaaaagtgtcccacggcccctgtgccgtgaggcaggcccctggaagcaccaggtgggtggctggcagggcctatggtctgtggccatgcttggcttacacattgggaacatgagcattgttgatagaatttgagcgccacacggacaggcctgcccaccctccccgtcatctaggccgta

SEQ ID NO: 46692 - DNA, 1727 bp, Bovine  19866881615159
  misc_feature (1)..(1): n is a, c, g, or t
ngtggtcatgcagtcagcaggtgacacgcccagggtcccacagtcagtgtgaagccacctggccagcttgacccggaggcctgtggtcccaactggctcagctgaatgacctgtatcctgcacacttcctgcttttgttcccaaacaggaagcaggtgtagctggttccctgcctgcctgccctggggctctgggtgtggagtgtagcctccaggtgtggcctggggccacctctgttggaatcacctgaggtttgattgtagcagtgggacctcggaccctagggtattgtaacaccctctccagatgattcttttgggtttgtgaccttttgtgggtggggctgcattctagcacgtgggcagggcaggctcagaaaagccggtgccttttgaagatgctgagggttttagcccttctagaatgttctcttggctttttcctgcccacttatgtttctcgaatctctgaatgcacgcagacagtgaggcgtgcttctctggtgggtggtgtcagctggctgagggcggggggctctcttttggaaaactggggtgcatgtgggcagcagagaggaggacctgcacgcacccccccccccaaccttgagggtcagtcacagctctcctgggacagaacatcttcctcgtcctgctggtgaccgggcagcttccatgtggctccccagcccagccgtctcttcattctttccggccccgtgtgtgaagggccagaatgaaaccatgcctttcagctgttgaagcaacaagtaaataacatggcccccttttgtctgtaacttgtgtagttcaggagccggaggccgctgctctgagcctcatctttatatacctttggatggcatcctcgagacgagatgtctttttggatgttgctttatgattatcacccggggattaatctcttggctacgaggttgctaggctggttgctaggtaaccgctggctggggagagggttttctgaggctccttcatatgggattgctggatgagccacccagcggtggcccaaagtctaggcttccaaagaggttggtgtcaacaaggaaagcggtcgcttagttaattggaggtgtgtttgtgccaagaataaacatgggcctaagatgtttctcaaatgaactaaacctaaacactgttttaattgcgtggtcctgctcacgcatgcagagcagcatgtcatggtgttgtgtgggattctggagagcggaggggccatgaggcagattaaaggaagacttctgcttgcgactgctgtgatggagggctgttgacacctctgacatccacgcgtgttctccttgtgagttcagggttcgggtgaacaggctgcaatcccagcccctgctgccacgttgcctttgggcctttaagagattccaaggtcagcctcgcccagatggcgcagggctgggagaacgtcctgggaggagagactggatttgtttgcatgggccctgtgtgctgcactgggggttccctttgccttctgtccacaaatgaatctgttggtagggacttccctggtggtccagcagttaagactgtgcactcccaaatgcagggggcaatgggggggtgttgtgtgtgagcagttagatccctggtttgggaaataagatcctgcatgccacacagtgtggccaaaacaagagaaccaaccaaatgaatctgtgggggtttgtatcttttctcacatcctta

SEQ ID NO: 46693 - DNA, 742 bp, Bovine  19866881847945
  misc_feature (1)..(1): n is a, c, g, or t
ntgttcccgctatactgcttaggtctaccccagaatacggtgctttccctcagtgcagacccccagcaactgccaacaacagtgggaggtgtcgcggttacaagtcctaccacatggggcgtctaaactaataaagctcaagtgctcagacgccgctggacagagcaggtgatatgatttaactgctttattccatttagaagtcggccagactttcgaacaggacctcccaaaagggtttataatctggtttaaaggctgcagatccacattgtgcatactttgttatagaaatccttttctaatccagaaaaagaaaatcactcctcccaaggcctctgagtgtcaaatgaggagaaatatctgcgctgcaaagacctaagaagagttcactagagcaacacggtggacccacggggggcttggcccagagggcagcctgcctctcagcttggagcccactccccagacctgcttggggctcttccagttatgttttatttgtgccaaacaccttcacacctgtggctccatgcccctcaccctgacctccacctgtgccccagtgaaccttcccagggtctagaccccagctttcacccgtgtggcgctcaaattctatcaacaatgctcatgttcccaatgtgtaagccaagcgtggccacagaccacaggccctgccagccacccacctgggtgcttccagggggcctgcctcacggcacagggggcccgtgggaca

SEQ ID NO: 46694 - DNA, 1894 bp, Bovine  19866880603795
  misc_feature (1)..(1): n is a, c, g, or t
ntggtttaaagaatagaaaaagatttctgtgctaacactaatcaaaagagagctggagtggctatattaatataggacagagtagatatttgtgcaaagatttttactaggatgatagaaggtgatttcttaaacttagaggttgactcatcaaggggatatcctaacttctctggcttaaacaatgaggacatgtgatctcatgcgataggaatgctgtgacatctgcttacagggttggctagttcaacagctcaaagacatcaaaaagtcaggttatttctgtgttttggctctgctatccctagaacatcagcttggtccttaggctctcctccctcataaatgaaagatggccaccatcattctagaagtcacaggaagtggatgaaaagaaacctcttttctccccaattgctctcagctgacttttcctcaagggtcatttatcagcaccatgtcaacccttgggcacctctaaactaaaccaaactcgggcaaagggaaaggtattgctaactggatcagacgagcattcagcaaattttttctgtagagggtcagatggcaaaaatgatagttctgtaggccatatgcagttctgttattgtagcatgaaagcattcagagacataaatgatgacatggcagtgtatctttttacatatagaaacagcccatgcactggatttgactcacaaaagccgttgtgtgctcacccttgatacgaatcacctggagtagagacaggactcccattgtcacgggctgggtgctaaaacaaaatgaatattctcttagctaggaagttggaaggcaaggctgttgcgttggcagtcagcaggatctgtcacatacagtgtctcctacagtccctggagttgtttggtgctcaggaaaccctggctggttgagtggtgagagagacatgcactaggagagtgaatgagcacctctgcagacagacctaagctctgatagggaattgttgccgcagtctcacctctgccccagggccttgcacgcccctgacgtgagatttgcgcaccttacagctgttgtgtgatacaatttgggtaagctggagggcaaccaggtgaaagagagagctcatggtgctgaagcgacacctttgctccaccaggatgacttgcctccctcgggtccctgacatcaaagcttccctgtggcagcagcacaaataataaattaaaaggaaaaagatcaagcgtgacagtgcatggctgaaaggctgaatgatgatgttatgaagccagagaaagacagcccttcacccccctttaaacctagagttacactccttcccttggctagtgaacacggttcttttatgtctgcaaatgccttctttctgtactgaatgtgtaacatgctgtgaaaatatgtgggtgcctactaggatgattcatttccccccaaacatctagcaattgggggagtcatatcaccccatgtaattacaggtttggggcaccccttcctgcagctagccaggagctaccatattcatgagcaatttgctgttaatctaaccaggatcctggggaattctgaatgggggagatacttaagaactgacaaatcggtaagttggcttttaaatgatgaattctaggaaaggaaacctcagggttgattataagaatagtttgtttctagaactaagagctttcaggagtgttgcctttaatttaacaaaaacagaaaaattctgaacatttaggcgatgccaagttcagctccttgccccttttctctcagtgcaaggacatttgtcataaaatgcagttaagacatggagaacacagcaacctgtgtggtgaccccgggacgaaagagcagataaaaccaaggagggtctcggaatgcagga

SEQ ID NO: 46695 - DNA, 2150 bp, Bovine  19866880221659
  misc_feature (1)..(1): n is a, c, g, or t
natgacaatctctaggtccatccatgttgctgcaaatggcattatttcattcctttcagtggctgagtaatattccattgtacacaggtaccatattgtttttacccattcatctgttgatgggcatttaggttgcttccatgtcttggctattgtaaacagcactgaactgaacactggtgtccatgtatactttcaaaccatgatttccctcagatatatatccaggagtgggattgttggctttatggtagctctatttttagttttttaaggaacctcctccatactgttctccatagtggctacgtcaatttacattcccactaacagtgtagaaggggtcccttttctccataccctgtctggtatttattatttgtagatttttttggtgatggccattctgattgttgtgaggtgatatctcattgcatcacaatagctttgatttgtttttctctaataatttgtgatgttgagcagtgatgttgaccatcttttcatgtttgcctgtatgtcttctttagagaaatgtttatttcagtcttctgcccattttgtaaaagatgtatttattttattttttggctgtagtgggtcttcattgctgcaagcaggctttttctagttgcagggagtgggcgctactcttcattgcagtgtgtggggttcttgtcgcagtggctttttttgttgtggagtatgggctctaggcgaatgggcttcggtagttgcaacacaggggctcagtagctgtggctcgtaggctctagagcactgattcagtagttgttgtgcacaggcttatttgttctgtggcatgatcctttcccagaccagggatcaaactgggtgtcccttgcattgcaaggcagattcttaacctatgggccatcaggaaagcccattctgccaattttttgattgggttatctgttgtctctatcaatctttaaaatctgaattgttgtcaacatttaaaaatcaaaagatagctaaaaaatgtaaagttccagtgtctttgaaaatgagaatatctggttatactcagcccactttacttcgtggtaaaaattcactggggtagcctctcttttcccttcagttgccagacttgctagttttccccactccccaccatgcctcagtgtgttctcagcaccagggctaagtggtggctgccatctgttcagtcaaacttgatctgctttacttatttccattgcttgtctgatcctgcaggcactggagtttgtagctgtttttacagagttgattattgttatattccttatattcaaagatatattgacctttgctatctatatggatgtcaggggaggaattattgtgtccattttccagattggaaaacagaggcccaaagttaaagaagttgcccaggatcacacaactttagtactgaggtgaaagtagttttacgaatgctcaagatttgcatttggtttgttcagttcagttcagtcgctcagtcgcgtccgacgttttgcgaccccatgaatttgtaattgactattaaaacatggagacatttagttttttgccactatcctctggtcccacaactataaaaggacaatactggtttagatctgtagttttcagacttcatgtatttctgaaatttccgaaaaattgaggtacccaagcacaaggttgctgacattggtgccaactttcatctcgctggttaatattaaaaaaaaaaaaacacacaaaacctcaaaccaagcactatttactgccactgctatttaataactgtaatgaaggaagaatatagtctcagaataaaggaggcctttttaaggaaaggtgtctatgcatacagacaaatattattaaacatttccttagttttttatttcaccatggcagatgcagacacagggggagtcgctggactgggagatctttaaggttatgtctatcttactcattttaggtctttcttttttccaatgctctagtgagagccagttcgccaagccagcccccaaatgtacatcagaatgcctgatggtgtctgggtagttatgtgggcacatgcgcttctgggttctgttctactcctgtttccagagtctctggtcttcataaatagacagaaatcacctggtccttat

SEQ ID NO: 46696 - DNA, 2575 bp, Bovine  19866880353328
  misc_feature (1)..(1): n is a, c, g, or t
ntggtgttggagaagactcttgagagtcccttggactgcaaggagatcaaaccagtcaatcctaaaggaaatcaaccctgaatattcattggaagaactgatggctgaagctgaagctccaacactttggccacctgatgtgaagagccaactcattagaaaagaccctgatgctgggaaaaattaaaggctggaggagaaaggaacaacagagcatgagatggttggatggcatcaatgtccactgactcactggacatgagtttgagcaagctctgggaggtggtgaaggacagggaagcctggaatggggtcacaaagagttggacacaactgagcaactgagcaacaacaaccattgagacttcctaaatagctctgagttcccttctttaaagcccaaagaacataggactttccttggtggtccagttactaagattccacactcccaaggcagggggtccaggtttgatccctggtcagggaactagatcctatctgctgcagctaagacctggcacagccaaataaataaaagatcttttaaaccacaaagaacagactattgctttgtgactaaaaatgtttaaaagtagcaagtgcattctctaagttgggttaggaaaggctggcagcaagctggcagctccttggaggaaagtctcttccttagtcccattttaagacccaaattcatcataacacttcagcacaattaggcaagctgcttagttgctcccaaatatccatctctctttacaaagtatcaccagagcctgtcaaagcagcactgaagtctccagcactctcctctgtgaatgtcattctggacagaggattgccattgtgttaattacattagctggctcaggacaacataatctcacctgaataacactgttccttcctcttcttttcctccctcttcttttcctcccttcgggttctctgcctgaacatttttgttcttctttcattcactcactcatttatccttgcacgaaatagttactgagcatttcctatatgccaggcactgtgccaagtgctaggtatatatcagtaacaagcctggtaaagctcttcccttgtagatttccttaacctttatcttagttggaattaaaaaaaaaaaaaaaaaaacacagtggaaagatcctttagccaaaattagggtacctgtattcttatcccaactctgttaattttcctcttcaatatataaaagagtggaataggaacagtctctaagaatcttacatggatttttttttttcagtagctcctaactagtctgaagctttcattttgcctctctcctccctgcacatttattctaaacacagcagccaaactaaccttgttaaaatgttgtcagatattgttactgctttgctcaaaaccttccagtgggtctcactgaaaatacaactcaaagtccttactatgccttggaggtagaatacaatctagtccctaactactttctaaactcttttcaggcaccctctccttcactcactccacccaggcacactggcctccttgctgtttcttgcacactctaagcatactcccccctcagggcctttgaatttgcctttctgatgcctggaaagctctttctcccctccctgaagttcacagggctcatttcctcactttcttcagtcattttttcaaagatctccttttcagaaggcagtccctgatctgccatgccacagttgcagtcctccaacgctgctgctagtcgctcaagttgtgttcaactttctgcagccacatgcactgtagcccgtcaggttcctctgtccatggaatttcccaggcaagaatattggaatgggttgccatttccttctccggaggatcttggcaatccagggatcaaatcgacgtctcctactttgcaggcagattctttactagtgttacctgggaaacgtgatctgactaccctatgtaaaagaccatctcagagttggtctctgaccctttaccctgctttttcctttttaatccttattattgcctaatacatcataatttacttatttatcttctgtctccatctgctagaagatattctccaatggaagagggatatttacctgttttattctgtgctgtatacccagtgtctagagcagtgcctgacatgaagtaaatgttcaataagtgtttgttgagttaatgaaagaatgtgtctcctctagtaataaaataaggtctcagtgcatgtcataatttagtcatatttggaggagttcaaatctggctactggggcctataagggaccaataaagtactggacttaggctacaaaggatgttcaccaatagcaaaagaccatcaactgaagccaatccatcccactccattaagagttctgtttcagagtatggtggtcaccctagattagacttgaatgccattgcttctatgcagcttcttattgggagaggagtgggcatgactatctttgtttgacttaggccagagaggtttggtcatttatccaatgtcatccaggctttttaaagctgagagaaaataagaacaaaaatc

SEQ ID NO: 46697 - DNA, 1179 bp, Bovine  19866880396356
  misc_feature (1)..(1): n is a, c, g, or t
nattctccaggcaagaacactggagtgggttgccatttccttctccaatgcatgaaagtgaaaagtgaaagtgaagtcactcagtcgtgtccgactcatcgcgaccccatggactgcagcctaccaggctcctccacccatgggattttccaggcaagagtactggagtggggtgccattgccttctctgaagatcacattagtattactcatcaattctgataatatcattgagcaccaggatctagccatgcctaaagccaacaatcccccagattttccagtgtcatgactcagatacatcctctttttaatttacaggggttgaaaagttccctgtttccattaatcctactgtatcccatttctatcacttgtaattgaaaaagatctgagaatatgcaatctatccagaaagtgagattgctacatatagcacataatataaagctttagatttagatgtctccataggtttttttttcctgtaggtcaggagtcagaaggggaaaactgtagagtaaagatcatgccaatgtcaagaatctgccagacaaagttgcagaacaatttgttgaaatgcccttttggccagtcgtgctgagcatttttaacagtttatagtcttcgcctgagaaatttagctgcctacagggaaagtctgcgactcttgtgatgtcatagcattaatgaaatagacaaacactccaacaagataagctgataggttctacatgatacatgactgaggagaggtagcagccatttattgaagacctactgtgtgccaggaaggtcctgtgcactgatgtcattctcacaataaccctggagagtgatacagtcatctcccttttgttaacatcaatgttaaagtcagagaggctaaggaaaatttttctgaaatatcaatagtcagtaagtagcagattctgtgttcagcatttagcctctcaggttcaggtccacagttcttttccccatgctaagacagctttccttctgtagaatgcaggggcctcactgaaagcaaatggcgctaaaggagaataaaaacagcccagccctgaaggtaggtgggccaggggctaagggaaagcatctatttccaaaggggcagagcctgtggcaaggacaagcatggaaaaagctgtgttcacatcatggttgcagtatagt

SEQ ID NO: 46698 - DNA, 924 bp, Bovine  19866880472333
  misc_feature (1)..(1): n is a, c, g, or t
ngtctgggatagagcttcattttaaatagcacaagacagccacccctggagagactgtttcatatcctgtggtctctttcctgccctcacctgttttgcctgcattgaaattttcctctgcaccaacttggtctgaatataaaataaactatccctgtgtagtttatactccaagacagatatacagttttaaagtcagacacttccttgtggtggttgctttgatcctttcgtggaaatatcagattaaaatgcaaaaatatggcctgggtgaaatcaactggacaagtggagtttgaaggacaaagaggtaaacagagtgcctaaaacagattagacgacagtgtgaataagatatagctggaattaatagaatattattacttagtttgtaacattttataattagagtttaccttcatgtgctcatggtgataaacttctttctttctttttttctggatctaaattatctgaaactgttgttttgtttttaatgaaaggagaagtgagtctatatgattcctttcctggtatattctgcatcaaaaatcacagagaggaaagctaaacatgagagttttatacccatttagggaggtagttatgtaggaaatagtcatgagaccatttagactcccacgtatgaagctcatatataagatgccttcaggtaatgtctcacaattctctcttggaattagtttctatatttataaaatgagaagtttacatcagatcttatgtattagcactcctgatcactctaacagtctgtggttccttaagaaaaggaaaagggaatctttgagtgggagcaatgtgagttataagtgaaaggaaaacaaaacaggcatcacattcacattctatgttgtaagaggctctggtaccatgtattatggataattaatatactcccat

SEQ ID NO: 46699 - DNA, 1710 bp, Bovine  19866880485433
  misc_feature (1)..(1): n is a, c, g, or t
ntagagcagttttggtagcagggtatttcaattattataagaattatattcacgttcaaaggtctaaaagaattgaggaccataataaataatctcacttcctggaaagctatcccaatctagacatgattattgacagattccataaatatgtcagtttccccagaaaatgctttgtatgatgagaaaatatgacgtctgatcattatcctcagagatctgaagagaggcctgagaaagagaccaaaggcgtctatactcttgtcagtgattctgtttaggtttttccctcccctataaggctaagttttaaaaaatttgtttaccaaatcccatccattgttaacttgttttccccatctttactaaccaaagataaactgccagaaatactgaacatcatgtgataagcaatgccaccacaatgagttaacctaagaaaatacaaaagaaaaggtgtgatgctttcttgttagtctatagagccttgtcagaagtaaatatgcaatttgataatctctgaaatgtttaaaatggattctgagtcctcattactatttaataaaccctctaggtactcagggaccccatttgggaaatattagatttgaattattctatatggctccgagagaagaactggaattaatagattaaatatatttttaatgcacacacacaaattctgttttaatgtaattcagaaccttctgacagatcagtcaactgtgtaccggctgcctcagttgtagtaagggtccctgtcagtggaggtatgcaagcagagactggaaatccacctcccaggagggatgtagaaggaattcaagctacttttgtgaattgggatttgtaatttgctgcagaaaagtaaatgaaatgcaggtcagagacaagtcttcccccggctcctgatctccaaattatcatctgatctctgtaacttttccaagtcatgccgtaaatacacatccactcgtgccttttccttctctgaaatggcttggataataaattgggtgatgaacacgcacatacacacacaaactcatatgcgaccaaggattattaaaaggaaatcaccttggttatgtaagactctggctttaagaaatgagaaggacctcagaaataagacaatgtcagagccagaaagaccaccagaaaattcactggttcacagaccagtcctcaggcacagatggtgttcacaggactgaatggatgaaggcctcgcagccctaaactccagctgtctctcctgaaccaactccctgttcagcctcccacaactgaaaacaccatcaggccagccaggaaattcattcagaaagcacattggaaaggaacaatgccctgagatgctggggagaggggcttctatgcacagtgcttatgctttgtagtgcaagcccttatgaggggtgctgaagccctggcgcttttgaaactccttataaaggatccctttgtggttttctgaagttgatattgtccgagtcccccgaggctaattcagtgcaattagattaccactctctgcttttgaattcggctgtttttcagtgtctgttgctaaatgagtttaccatcttaacagggagctgctgacagtcattatcccagccgtgaaatgggcagcgttctctcttgcctcgtatactgggcaaccccaggcccctaaagaacaaggctctgctccctcgctcg

SEQ ID NO: 46700 - DNA, 1494 bp, Bovine  19866880752565
  misc_feature (1)..(1): n is a, c, g, or t
nattgtatacacacatctcacctcactaacccttgtaacaatcaatgcagaggaggtgaaatgaggaaaggaaggttcatacaagttttaacgggcaatggaagacatatttgcagtcaatagaaaggccatagggcctccaaggtggtactagtggtaaagaatccatctgccaatgaaggaaacacaagagacataagtttgatccctgggtagggaagatcccctggaggagggaatggcaatccactccagtattcttgcctgataacacagaggagcctggtaggctacagaccatggggttgcaaaaagttggacattactaagtgactcaaaagggctagaactttttagaaggtgatgagattaaaataacttatttataaatagatcatatatatatatataactataatgattttgactaacatttattgcccatcccctctacgcagataccatgctaagccctttccatcaaagacttcttttcaacagcacatctgctctaagagtattattaataaccacgttccaccctcacggccagagccctccccctctgatgtttcttcatggtaaccccgagttcatattttatttgtgcttccttggaactgagactgtcagtaactggaatcattaacaccatttctttagtttatttgtctggatgggagaagtaaatctgtttcctagcaactctgtcccctgctccctcaatttcccctcctcattatcttccccatgatcaactacaaattagccaaattatgggcaggttttagacttcccagaaacagaaggggcacttgcaaacatttgttctcttggcataaagtggctctgaggacccatgcttgctgaggacaaggcaggagaatggaaatggccattcatcttaatgtgcctgtgaatttcggagccaggcctcccaggatagtcacttaaatgcaatcttttgatcatttcatgtaaaaactaatgttaaccccaagaggagtcatcattttggttaaaaggggatccctatgacagtaattgccaatatggtaattttactctgagctctagtgtgaaatctcgaaatgactccccacccccaatgctacacttaatatcctgagaatcagacaactattccaactgacctagcacatactcttgtggaaacatgaaaaagtgacccctactcaaaatgtagaatgctattagggactcaagtagcccagatcctcttcaagctcaggcctttccaatcattaataatctatatggggacaatttttcccaaaagtagtcctttctggagttatttcctaagatgttccaactaagataatttcagaactgcttcaggaaccacggttaatcctgggtgatatggactgttagtttactttcgtttgtttattcagcccatatttttaagcacctaccatgtaccagaaactgttctaaacgctggggatgtggtagaaaacaagccaa

SEQ ID NO: 46701 - DNA, 1542 bp, Bovine  19866880825348
  misc_feature (1)..(1): n is a, c, g, or t
ntagggatccagttaactggagtcagcaacaggagtgagaaggcatgaggcaacctctgctcaagtgcctgactgccactttcctggggacaagcctgaaagcagtttcaggaaggagtctttctcctctctctgtacacaagcagcctcttgccccctttcctccccgtctgagcatcctcagcatctttgcacccacaccaagagatttccatacaagggaacagccactcagtctggaagtgacaagtgcctgccagcaaccaaccatgatggcccagctcgttcctcattctgacatggctgcaagtgactccagcttccttggcgacaacctcaaggttattggaatactgaattccccctggtagcgggtgtgttcctgtgcatgtgaatgcacacatgacgggggcagccgtcgttcgggctcctgatagccttcacatcagaggagcacgagaaagaagtctttcaagagacatggaaaactgccctgctccagaatcagccacatgtccccaccaggtgcaggaaacagccaagctcccaccattggaggccacaggatcaacctgcctttccagtcttatcctcaaccccactgttctctcaaggaacctcagtcacatatataattttcctaaaactccaccaagaatgtccctacattgggaggaaggcagcctttcatggttcttgtttaaaaaaagaaactaggctattccttagtacctaaaatggtagttcccttataaaaccacagataacctcttccaaccaatactactgagcagtcacagcagaagtaatgacaagaatcatggagtacctgctatgcgccaaacactgtactgagtgctttgcctgctttacattattcaacccgacagccaccctattggatgaggacactgaggcaccaagaggtcaggtgccttgccccatgtcacacagctaacacaaggcaaagcaaggattcaaacccagaacctctatctccagaacctgagccctctggatataccgtcttcctctgaagttccccataacctctcacacacaccatgaggtacagagcaggagacagcacctcaagaaaaaggggaggagatggaagtcaggcagtctcaccactgatgttctgggtcactttggttaggtcactccacctccctaagtctctctttgactcttctctataattaaatttctctaaaagtagtgcttaaattagatgacccaccttgatgtagtttgggatcccatatacaagtcatttcactgaatgtattacaaagatgccaaaaggaaaaagaactgcacatggtggaatttaaagcgatatgagtgtctcagtgaacataatggacataggatagaaaagcagtgagatgtgcaaaaaccaagacatcagttcagttcagttcagtcagtcatgtctgactctttgcgaccccatgaatcgcagcacgattccctatccatcaccaactcctggaagttcattcaaactcatgtccatcgagcccgtaatgccatcca

SEQ ID NO: 46702 - DNA, 1767 bp, Bovine  19866880829171
  misc_feature (1)..(1): n is a, c, g, or t
ntactccttggaaggaaagttatgacctaactagatagcataactttgccaacaaaggtccgtctagtcaaggctatggtttttcctgtgatcatgtatggatgtgagagttggactgtgaagaaagctgagcaccgaagaattgatgcttttgaactgtggtgttggagaagactcttgagagtcgcttggactgcaaggagatccaaccagtccattctgaaggagatcagccctgggatttctttggaaggaatgatgctaaagctgaaactccaatattttggccacctcatgcgaagagctgactcattggaaaagagtctgatgctgggagggattgggggcaggaggagaagaggacgacagaggatgagatgtctggatggcatcactgactcaatggacgtgagtctaagtgaattccgggagttggtgatggacagggaggccttggcgtgctgcgattcatggggtcgcaaagagtcggacacgactgagcaactgaactgaactgaactgaaatctggcccgtggtctgtttggggatggcttgtgagctgtgaatagtcttcctgttttgaaaacattgtcagaagaagaaggaagaggaggaggaaatagtacagagaccctatgacccacagagcctaaaatactggctcttcacagaataagtttcttgacccatgagctattgtataatttttcctgtgaaaaagcagccactgaaaatgaaaagaaaaaaaaagatatccggtatgcactgacatgaaaagagatctactacatactgctaaataaaaatgcaggtatctgaacagcatgagtagtctgattgcatttgtgtcaaaatatggaaggcaagttatctatgaggtatatgcaaataaaatttctggaaggatacacaagaaagcaaacggtggttgcctctggggaaatgagactgagatgtaggtgatgaaagagagaaagccttttacacggtactttacattcttctccaccctttgatttttcccgtgagcacgtgttagagcgctaaccataaaaatgagccggttggacaatacgatctcctggggcaccttcagctctgagtctgtctagaataataagttacaatgttggttactatctttttttttcgccagtgtgattactacgatgcaagtcacatcctgcactttgttttcattttcacaaaaacctcccgagggtatgacctccttctgccagatgaggagactcaggctcagactagagctgaggattccaggcctctgctctactacccagctccagaggtgacaccatcctcctacttgagcctgagaggcacagtgaggttgactgtgccagcaagtagaagcagcagaagatatggggtgagatgtaaaggaggccagatatgcaatatggctgaatatttcttccctggacccactgcaggcttctatggaacagatggcaaggatgggaggtcgattttttacaaggaagtgagaaaaaaaagtattttctactacccttcaaatcatatcatgaaaagggaaacctactctgctcgtgggggaagccgtgtgaccttcggtgaatcacagtccctctctgaacctgtgctttagcttttaaaaagaagaggttggcccacattggggcttacaaactcatgctgacagggccagtccagtcaagttaacggtcaagggacctgtggggatggtggggaactcaagaagtcttgccctatttagagcagga

SEQ ID NO: 46703 - DNA, 1521 bp, Bovine  19866880980557
  misc_feature (1)..(1): n is a, c, g, or t
ncggtgggacttaccttgggcagggatgctcgagagccggagctctgggtggtcatggtgagcacagtggtgatgcccaggcccacacgggcgggggcagcatccatgttgatccagaaggagatccacgagaggatgacaatgagcaggctggggatgtacatctggatcaggtagtagcccatctgtcgctccaggtggaaccgggcctcgatgcaggtgaatttgcctgcgggaaattagagtgggaaggcaaagtggcctagtggataggaacaaggtgctgaggtcagaacagtcttggctggaatcctggtccagcctcacactagccgtgtccttgggtgagcgtttgaatctttctgtgcctcagtttcctcatctgtggtaaatcggggatgatgacgatgatagtaaataataatgacaccaacctcacatggctactcgtgtttactgcgatggcaaatgagatggtaaaatgagtaaagaacttagcacagccctcacaaaccattagtgctcagaatgtcattcaccatcagcctcatcatgtgattatttgatacctacaggggagaaggtcagcctctgtggtctgcccttcacagtgcagcctgtttccactccacttcccttttcttcacctcacccatgacccctacactccagcccttgccttgaatatcctctgtactttcacacttctgagtttttgagcctgataatccctctgcccggaatgcccttcttccaccccacaacccgccaaggaatcctgcctctcctgtttaatggtgacatctcccccaggcagggcgcttcttttttccccatgtcccttcagctctgttcacgtgagcattggatcctttaaggtgtagtacactgagtaggcaagtcgacctctctttctctttctctgtcttctgcaccaggctgtggacaacgcatctcccagtctgtgtgtcccttgagctgggccgggccgtcccctggtggggtcttggctccagtccactgacacacagttgccaggggatttttgtacagttccctggactgcaccttccatgtggtcagggccttgccagtcttttctcattgaatccacagaactagcccggaactcagctcttacttaaatgtgggtaatgaagggccattgagataatgaatgagaaaaacgctgtggtgtatgagagccggctgtaattatttgatacctggggactcactggctctccggacccatgggccctgcatcctccagtgaggagggctgaccatggccttgagcatccccggatattggtaatttggggggcctggaacccagttcctttggagactgagggatgactggtctgctctctctctgagtctcagcttcccagggatgaagagagtagattttgaagtttctaggatatctatctccgaggtcactggaaagggacacctgtcctaaacagagcaaaacccaggctgcctgctcttctgggccttccacttgcatca

SEQ ID NO: 46704 - DNA, 1455 bp, Bovine  19866880993060
  misc_feature (1)..(1): n is a, c, g, or t
naacccaatgttagacatgaagcttttaaaacaaaaaaggaccccttgcttctgaaaattagaagaaaactgactttaatgagcggcagcaaccaggatcccaggagagtagagaaaggatattgtgtttttatcttgcactgttggctttggaaagtggctggaggcctcaaaggctcagatctccaatctcaaagtcagctgtcagctaactgctcaaaggcaaacactgcagggactctgagagccctgccgggacctctgagatgttaccaagaggaaggatggacacagcccccaggaagcgcagatcacactcaggctagggatcatggtggaaggggaagagtggtggtaatagcaattataataataatcctgcactttctctgtgccaggatatgtttcttttttgtgtgcatgactacacactctcccaatgaggtggatattgttaccatcaccattttacagatcaggaaaccaaggttcagagacattaagtaactttgccaaggtcacacattagcaagtagcaaagccaggatttagacgccgaagcccacattcttagtcattgtgaccaccatctatgtgggtatcaactgagtaagatttaccttttgagtacaagtttttctccctagagcattccacgaccaaccacaatgaagatctcttgaacctagaagcttaacccctcctaagatgctggaatgtcctctgcactcatcgtcaccccaaatctgctttcatgccttcaattacacatattaactaccttataaggcagatccaccacctttcaagagctttggttataggaaatcctacaatgagctgaaacatgttcctctgaaatgtctacccattgggcttatttctgccttttagggtcgtgagaacaagttcaatccttcttccacctaacggtcctctaggtactgaagaaacaattctggacccttggaatacaccttacaggagtggtcacctcctgccactcttataaaaaagaaaaaaattaagcatttatttacttgttcacactctcagtaaacattccccaaatacccagcatagatcaaacactctgctatctatgtgctgaggggacaagggagcttaaattctcagaaagaagataaaactatacacaaatcattatatacaaggtagaaaatgatgaaagcataggaatacctggaggggtgccacacaggttctgacaagagatcttttccagctaggtcgtgtgtgaagacagcctagaagagacaccatcagagcctggtctggaagaataagaagtattactgaccatctgctgttccaaagacctgggtggtcagagggtcctgttgcagtaaggaaatgagagtactggtcttggaatggatctgctgtcctgtagcgctctctctctctctgaaccttattttcctcttctgtaaa

SEQ ID NO: 46705 - DNA, 1149 bp, Bovine  19866881024774
  misc_feature (1)..(1): n is a, c, g, or t
ntctactctactgtgtgacagaccagtaagtctgacagacaaggtattaaagtgagaaaaatgactatttggaaagccagctgatcaagaagatggcagactaatgtctcaaaataaccatcttatgaggtctgggtgccaggttctttcatagaacagagatgggggaatatggagaaacacagtaaacaggccattaatctcttaaatagctcctggaatggcaagcttcggcagaggatatgttaatttcttcttccctgccattcacaggtggacagggtcctgaacaaaggcactttagtttaacagtaggcagaggggcagggttttctgagcaagccatcctgtatgattataataacaaaagcgatgaaaaacaaactgaagaaacagttccagtatggagccacaactggctcctccctgcgacagaactaggtccaaggccattgtgtggggcacgttgaagagacctcagaaatacgcagatttgactcccagtcctgctaccaaagttagctgggtgaccttgggctagatgcatcatacctctgactgtcggagagagagaaaaataactaataatacttcctatgaaaggctgttgtgatgattaagaaatatctataacaaagaccaagcacagcacccaacacttagcaggtgctaaaggaagagtagctctgaggagagaagagctttcaaagaacgtgcagtaaagaagagaaaaatgaaaggacaggagaaagcagtaaagcaccaaatgcagccttaattttaacctcccttttcctcacttgctctcctgcaatggccaagtaacatcacagccggttaagtacatctttgcttcaggaggtctgcttgtcgcttttgaaaaaggtaaactatagtccttgaggctgctttattgctcagagactgactacaagtttgcttgatggcgaagcagccttcagggcaccctgggaggtggattcatttgttattcttgcgtaggaggctttagcttctgggttgttaaagaacaaacaaaaatacctcttaaaaaatgggctatgggtttggtgaagcttgaaatgtaatcctttggttcagccctaagagaaaatcttcattaagctttctgaggtttgccctggtggg

SEQ ID NO: 46706 - DNA, 666 bp, Bovine  19866881032320
  misc_feature (1)..(1): n is a, c, g, or t
ncctgctaggaataagtctgtttaagattctgggatagtagtcttcccttggagcaagctgtccctccatattttatatcttggagcatattttatttttaatgatggcatgaatgcatttttcattcatcttgtgtgcaaaggcaaaaggtccccttgctttcaggatgacaaatacaaagtgattgaaaattatatagtatgttggggactggaacaggaccaagaattggttcaaaactgttgacagtatctgatggcatagctgattgacaggagtctggttgttcccaaggattatttttccctatactgcatcccaccctatcctattttctaccttactgctctcttcatcccacagacccttgggcgattttccacgtaaaggtaagggagggctgattcccagaccttggctcactctgccactccaggctgcctgagtgttagagctagtgtttgcccagctgctggagtcaactggtttccttttgaggatatacctctccccttccttctgctctcctccccagatgtttgtgaccaaaggcagccacaaggcctggagacactagtcttctgctctggtcactcctaggtcaccagcttgagaccaggaggaccaccctgctgcattatttagtctaggcgggcttcctggag

SEQ ID NO: 46707 - DNA, 790 bp, Bovine  19866881114978
  misc_feature (1)..(1): n is a, c, g, or t
nacttctatttgtaaagggctttgtgtttatgaaatacttttacatcagtatttattggaatttttacaacatgacaatgacgtgatcaaagatgacactttccactttccagaaggggagattgtggtccagaaagcttacagttcccatgtagttggcatgagtactacaactaaagcccagtccagaactctctccattccagcacgttctcccaggccaagggaccagagacccaggcatatgttcctcaatttgtttggacccctcttcctcaactctttgggcctgtttcctcagtactcatagtccatactcatcaaaacatagggaaaatattcactgcctaacaaatatctgggtgatgttcaaaaacagtcagaaccctcttcctgtgccaatttctattttaggcacagtccatgactcactggcgaccttgggtgaaaaagaggtaacctttattcctataacaagtttctatttctcagaactgagagctacgagaaacacagtttctgacaagatttccccacttcccaaacccagaatgggccctccagagatcatggatccagccctccatcatttgacagattttgacaaaccagtttcaggctgaagtcaccaaccagaaatataacctgggactgatgagtatattaagatttcagtggctttcccaagatctcctggctaatgaggagttagggtgtgaccaggatgaacctcgtgattgccaatgcaatgccaatggcaaactcacctgacagcatctctgctgtccag

SEQ ID NO: 46708 - DNA, 2694 bp, Bovine  19866881121831
  misc_feature (1)..(1): n is a, c, g, or t
ntttgactcatggacctttgtcacaaagtgatgtctcccttttcatacactgtctaggtttgtcatagctattcttccaaggaacaagcatctttttattttgtggctgcagtcaccacctgcattgattttggagcccaagaaaatgaaatctgacactgtttccacgttttccctttacttcatacacaattataaaagtcattgtggaatagagggagaaatatgaaggtggggctgggaaactgagatgtagttttggctctgtgtctaaatttttcttggtctaattcttggtctaattctttttctcagatggtccccagtttctccatctgggaaatggaagttttggattaggtcagctgtggtaaacactttactttgagcagctgcttggaagatgggtctggagcctgaccccagcaggaaaggggaacagggtggattatcagtcactgtcaagagactagattattgagtgggggcttgtctgatttttatgggttctcttgctctacagtcctctgatccttctaatttattatgcacctactacatggataaggcgctgtggaggagaggcggataaatatgttgctgtctacagaagaagccttctgtgtggactgagttggtgtttgtctacagtgcctgacaggtagtagcactcaatgatcttttcttttctttttttttcttgtccacaccacacagcttgtgggattttagttccctgaccagggaatgaacccagccctcagccatgaaagcacagagtcctaactactggactgccagggaatttccaatgatcatttgtcgatgagtagcttttgcccacttattgtttatagttcagcagatagactagagtaggtacatataaacaaccataagaggttgccctcagcctaaggagcataactggagtgctctggtggttcagaggaggaaggcagtatttggaggcagatggggacagaaatcagaatttttctgagttttgtgaacttttgcctctgtacacgtttgggaagacctgacatttgttgatgtccgtgttgtatatttctggggagaaagctttcttctgcctgtggggctgtccttagaaaggaatggagggatggtgtgagggggtaggtatcctaggtcctaggaagggatgaggctgagtaaggctggcactctctgaccttgtggactgaaccagtttcctgtctgttactctgacaccagggactcgggggggttgttgcacagtgtgggccttgctggtcactgtcagctttgcctgggctgcaccctcagttcaacagctggctggctttggccagctgtgcaattccggttttatttgattgcagtaaggggcttaggttggcctggagtgcctgacatgttattagtttcacttcatgatctgctaagcaccccttagggagcagaatggcacagttggcatgccctgagcctgcttctccaggtcttatgaagcaagactcccttcccttttctgtcttaccttctgcagctagatctgcctcttataaggaaccattatctggataagaagtgcaagtatttgaacagggttcttgtctgcagtgagatgaaatcttgggggcatacccagtggcccagtggttgagactctgccttccaacgcaagggatgggggttcaatcactggtcaggaaactaaggtctcatgtgcttcaggggtgcagccaaagagttaaagaaacaaaacaaaccttggatccttgaggctgaaaggaaccttgaggttccatctggttcttcccctgcccttagggaagtcagattctcttgggatatctcacattccttagcattgcttccagtctgttcttctagatagctttccctccattaattcttctgttgcttttatttaagtatcctcatgaagtagggtgagaagaatgaggcgcctgtcaaaattcaaagaggctcttactttgagatctgtgtaggtaccaacccctgcacgtgcagagccctgaaagtgagcgcctccttaaagtttgtgccttcacttgctttaccccagtccttgtcctcctagagcatcctaggtcctcaaacccagtcgatcaaaggtagagtttcctgtggataatcaagtgtggtcacctaaagatggatgtctgcctctcacagcatctcatttaattttcagaaagcttcattttaatttttattgtttgctggcaaaaaatcccctaacattaaatattttatcacagtttatcctttaaacaacctgagaggaagggatgtctgcccccattttaaagtaagaaaattaaggcttaaggagcttgtggcttgattgtctaactctggcataccacactgcatttgcttaaaccgtgccaatgttttctttcttctcatctcccttcttcttacctcatgtgcttgtttcaggaccagaatcatggcagtccttgatgttttctggttcaagttcaaccttcatgtctccaacctttcttttccccaaattgggacagttatatgttatgtagacaagaccccaaaaacatgactttggcaaacttcttccatatggttttcatgaagtgcaaagcctggcacctggtcagggctcaataggtatttgttaattgtatacttgtatacgccggtacttcagaggaa

SEQ ID NO: 46709 - DNA, 1029 bp, Bovine  19866881201466
  misc_feature (1)..(1): n is a, c, g, or t
nccttcattcatttactcatgaattgttattgcattaatctataagctatgccattcatgtattcattcataaaggcatatatcaatctattttttctcttagtttaaccaggtattacaaagaatagtatgagaattacctgatctggtagaaagaacgtaccctcctcaaatataattttccaactaaaagaagtagagcggaggtaggggaggagcagggtgcagaggcagggcttgatgacaccaaacctctaagtcagaatcaaaggcctcctccaattctataattccttgagtttacaaagtgtaagctgcaactcttgccctacaaaaattcatagactagaaaagggtctttactgtgattcatgtattttacatcccaatctactacacacatgcatcgatatgagttcaaaacaaagctttatgaaataatatttaccctgcaatataatccattatatattcattttaactgttggacaaaatagagtaagttgatttcataatctacaaacggttatgaccggaagttcaggaactacagtttagaaagtcaagagacagacttagttacaaggatgtataattcaagctagctacttggttaccatcatagactctcataatcctccagatccaacagccatctactcgtgtaggtgctatcacttaaatgcctcttaattgactgtgcttctccatatccgtgtgcctgctatctgcctctcatgtggacctcacttcctgtcctgacttcctgtctcctgtcttaccccttcagtccatcctccaaactgcagtcagtgattatgctaaaaaatgcatttgatgaaaagtctgtaatgctcctcccttatccacagtctacaaaagtgaatgaatatatccaatcccttagctttgtctggccttgattccttcctccagggtcatttctaacttcactcttgtatctatgctgaacccatgctgatttgcttgcaaatttttgaatcttacgtgctcttccatctctctgag

SEQ ID NO: 46710 - DNA, 800 bp, Bovine  19866881241506
  misc_feature (1)..(1): n is a, c, g, or t
naaaaactggctccagtgaggtctgtgtttcctgcacaactgaaagccattttcaaaagtttgccttgtcttatggaaaggggcctctctgcggacccaggccccagtgggaggcagccatatgtgcaatggcacagatgttttgagaagcccagagtttggacatccttggctagacagcaaggataaggctaaacaactctcttcaatagctcttgagccagggctgagctgtatgtctagctcactctcactgtgactcatttcttggagcaaaaaggtgtcactgtgagacatagcagtgcattgcattggctggttggaagccttctggtcctgggcttcagcagagccaataagagaaggatgggagcaggtatatggggacaaaataattcaattcaacaagatctgaatatctaacatacatgagccactgggataatactgtcaatgaggggaacggagcaagctgaaaaccctggtgagcaccttttcttcatgttggcctttcacatgaaccaagaaacccattaagaacctagtctttgaagggcttattgtccaactgaacaagtagaagggcacccaaatgtttgtaaggccacagtgtgtgaactgagtgctgaaggtaatgcctacatttccgaggagatttaggaaggagaatccatgcccagttctgggtagggatggtggcagtctggggttgcttcatggaggaagtgttgttagaggtggcttgtgaggtgtggataggatcggagagaagtggagagggaattcactaagggcttgtg

SEQ ID NO: 46711 - DNA, 833 bp, Bovine  19866881320772
  misc_feature (1)..(1): n is a, c, g, or t
nccaagcaactgggcctgggttacctttctccaagtgtcttttttccctacctggtataggttgtctttttattaaggtgaggtccaagtttatttttgtgcccatgctttctgatatcctctttctttcttaaaaaaaaaaaacaactttccagctttcaaaagtaataaatattattttaaaacatccaagcattactaaaatatttaatgtaagaagtaaaagcacccaatagtctcattctcaatagataataacaactatgaacagttttgggtccatttctctagacttttttcccatgtgagaacaatgaaacatttaaaaaaataaaaatgggatcctacaatatatatactgtttgcttcttgctttcccccctattgaatcttttttcctcagtatttttgacttttttgcatggaatgaggtcatctgcctttggcacttactgactgtgagactgtagatgaatcactcttcggctcagggtttcagtttcctcatcggtaaaaggaaacagccccttcccacttcgctgtgatgtaagctttaagggagagagcatgtgaaagtgtaggcaccctgcggtggcctccagtgaaccctcctctgtcctgttctcctgtttgactgggtttggagcactgaccatgacctgaaattctgatttcccgggttgtttctttgtttgtaccacctctagaagttaagctgtgtgagagcaaagaccgcatctcttctgctcatcaccgaatctgtcccccaaatgtaggaagattactagtttatggtataaaagtcaataaatattttttagatgatgaagaaa

SEQ ID NO: 46712 - DNA, 798 bp, Bovine  19866881359821
  misc_feature (1)..(1): n is a, c, g, or t
ngtggtaaatcctctctggtccttatgttatgaatgcagataaaatctcatcattgaacaagcagttgccaaacatcattacacaggattccatgaaggttacagagacaaaatgaaatgtagtttgttctttcaaatagtgaagagtttggtgtgggaagcataatatgtacttattaaaaatcagacagagctctaaaatgtgtcttcttattacccctgatgcagtctttgtcaacttcccactaaaatatccagatgacagaagaaaacacataaaaattcataattaaaaaaaaaacagaatgtggtaggaatgtttactaatcatgaggcagctgatattgctagagaaaaacttggcaaagtcttgcctcaagatgccaggcttcatctcgtaaagccctaaaacacatctcctcactgtctgcctaattcagagactcaagcagatcaccaaacagccatgtcaatattacatggacgctgccttttgaggaggctgtagcacaatgtttggtacatgtgcacactaattaagcatctgctaaatggctaaatgaatgaagaagcccttccctgatccacccttctcacactgccactcctaataccctaaaactacatcctttgagagacagcaccctctgtgggcatgaagcagggagagctggaaatggtgaactacatcctggaacatgacattttgtatgtataaaggggctcagttgggaaaagaaaaaagggatttgggggaagcaatagacactggaaaattgcattttgcaggcattcatt

SEQ ID NO: 46713 - DNA, 1342 bp, Bovine  19866881405620
  misc_feature (1)..(1): n is a, c, g, or t
natagaacctgggtctcctgcattggcaggcaaattctttaccactgagccatctgtatctacacctaaacagattaacatctgcacctcagtggaaaagacacatacagtattatgactaatccactgcagtttaagcttacaaaccccaaataagcactcacactgtctggatttattgctttgcttcctctcggacaactcttctacacttcactctttctgatgtcttaccacttccatgccctctctcttatctgataactttgcttaaaaatagaaacagagggatctcttgtatttacattatcaaatgagaacctgtccttatttagacccatattttctatttgtcattctttctctgcttctatcaagggccagtctcccgctgtgctgtctaccccggcccttacagcatccttgtgtttgtttctgtagtttccccacctcctgcatcacaattgttgccttttatccaaatcgttcccactgcatataaatatactgcagttgctcacagtctaccttctcgtgatctgaatgctacttctactaccatcagatttctctattctccttcacagtaaatcttgaagaatccatctacactcactggatccttgtccttatctttcactatttctttaatctgcttcagtctagctttcactgtcattacttctttaaagcctttcatatccatgatcatcatattgccaaaactaatgaactcaccttcaaacttcttactcattatttactgttgaccacactttacttcttaaaaccttcatcttggtatctaggatcccatcctcgcataatgttttacttgcctttttatgtcctcctttcttccccacccccaagtttttccttcacaatcctgcctttaattgtttgagttctccactaattggtcccagatcagttctcagtctgcacattttcccacagtgatctcatctacctcatggctttaaataccaaatggatgaaaatggctcccaaatgtgaatctgcatcctgtattctttcctgtgttccagatttatatatccatctctttactatttataactgaatatatgataggcatgtcaaattatcattttcaaaagagaattaaaatttttttctccctcttcttccatgcttcccacttccaccaagacaattttgtatcattaaatgactccttcatctatctaagaacccactcagagactcttcaggctgaaatcccaggagtcaaccttgatttgttccttactttcacttcctatttataatccttcatcacaatgtttcattctagttctgaaatatgttttcttta

SEQ ID NO: 46714 - DNA, 1192 bp, Bovine  19866881433911
  misc_feature (1)..(1): n is a, c, g, or t
naactagaaaatcagtagaatattcattagaaggactgatgatgaagctgaagctccaatactttaatcacctcatgtgaagagctgactcactggaaaagaccctggtgctgggaaggaatgaggtcaggaggagaagggggtgacaggatgagatgttggatggtaccatcaactcaatggacatgagtttgaggaaacttcaggagatagtgaaggacaaggaagcctggcatgctgtaatttatggggtcgcaaagaataagacacgactgagcaactgaacaacagaaaatcaatgctgtggatttttctccaacatcctcagcagccctgagaaggggtgagccaggcatatggattagcgcagttgactggttaaatcacaaaaatatctgacagcacagatgtgtaaacagatgtggtgggttgctctgcagtctacatttctgagctagactttaaatgcttgagtatgctataccagtgttttgccttgtaaccctgggagtaacttcttccactcccaacttgtacttatctccacccatcctgatgcatttccttgtttcttctgcatctggctgtgaaggcccagaaagtagaatagcacctacatcacactctgcacactgacagtgtgtagtacttctagaaacacatattgtatcaaaacatgagctctggtgccaggctgcccatgtatttctagctccatcactcaccatctgtgggatcttggttgaatgatttaagattgctaaagcttccattttctcatctatagaatgaggatccttcttacttaatagagaagttttatggtttagataaaatgctacagaaaatgcttagcccagcatctggccataacgaagattttaataaacattagtagtgtgcaataaatacaatgattctaaaccagcatggagcatgttcatttagactgttggatccaatcagttctaacccaaaagggaatgcactaatgcaaagtgaatggtggagttgagagacgacatgaaaaaaacatgagggccactacaagctggaggcaggtctccccactgagcactgcctgaggaaaggctgttggctggggcctctgagcccagacatcttctccaacataattgagaaatatgttcctcatgcattcctaatggagtagagcagatggcacaggcat

SEQ ID NO: 46715 - DNA, 1255 bp, Bovine  19866881648642
  misc_feature (1)..(1): n is a, c, g, or t
ngcccaaagtgatgagattcaataagaaaagtcctgactccccaagcttttgagcccttctcccagccacatggtgggaaacggataggctgatggaaaggggaaaaaaaaaactgtttcttccttccctcctgattgttttaattactactgaaaagttacaactggaagaagtggtttccagctaccttgctattaattgattttctgtgcttccagcaagcacacatcccctaagacttggatgagactgatgggcagggggggtccttggctgggaccacatgtgtatgtccatcacaataccctctggtccccaacctaatctggaagtggcagcctgaagctagtagtcttggcagctcacaaagttgcaagtgaagagagaataaagagagtcggtagtgaaagtgaaagtgttagttgctcagtcatgtccaactctttgctactgcatggactgtagcccaccaggcttctctgtccatggaattctgcaggcaacaatatactggaatgggtggccattaccttctctaggggctcttcctgacccagggatcaaacccatgtctgctgcatcgcaggcagattctttactgtctgaacagtaaagtaaaaaagaaaatatagaaaggtcatccttagaatgagtttataaaggcctgtaatctacggactcttaattttgcagcccataaatgggcctcaagaattccacaagactcttgaaatcatatgcaaaacttggtgtgtatgggcatttttctagggaggggatccatggttttcattagaatctcaaaatgcttcatgatcccccaaagttaaagtgcagcagtgtaatctacttaccattctttacagaagaagaaaccaaggctaaagaggaggttgtaagatatccaaggtcatcctgtaaattattggtggatcaaatttggactaatacctccatatacttgatcctatacatttcccacctgccacacatcctctttgccccaggcttaagtttagaacttgagtggtatgtttgatggaggtttgaggacatagttagtcccaaaaatacagtccatttgttattattagtctgtgagacctgactgtgtttcctctccaccacccactgctttgagggtcttactttccattgggacccatttctgttagttcactttccaacaccttgtatctgtgaagaccccaccatatcaccgatttacctaaacatagtgtgtccatggcagtg

SEQ ID NO: 46716 - DNA, 922 bp, Bovine  19866881649882
  misc_feature (1)..(1): n is a, c, g, or t
nctcagtttctattcattcattcattagaacaatcatttgcttgatacctgtctttccctctgctctacaagcaccaagaagggggaccatccctcttggctctcgctacactcccagcagttagcacagggcttgggctccccaggaccttcaacaacagctcggaaaaagtaaacaggacatgactgagtggcatctgatctgtcagtgcctcctcctccatacagtgcagctccttcaacttgaagacacccatgttcatcccgaggccacatttctataaacatctgcctttagttctgtgtgtgtgtgtgtgtgtgtgtggcactgccctggatcccactgaggtcaagtaccttgggcctcctccctgcccatcagctcttacttctgacgctgctctctttacagtcttcacactcttgaaacaaacattcacattaatattaattctgcatcccaggcagcaaatcacttagatacgtgttttactaaacgaggttctggccacatctcccaatcacacatgccttctccaacaggcacttgtagagagcacaactgcaggcagtgtgatgaatccttaatggcagcattccaggccggatgagagggccagtcaagggagcttctctgtttgcctggagttctaaaatggaggcaaagacctaaaccttaagagacactgcttctaagacctcatcttgcttcagctaaaacagccatagctacaggaataagaatccaaaccaagagaaccacaatctggacagcaccagcaacttgctgtatgtctcagctaaggtcacctcccctccctgcatcttgctttcccaccagtaagatgagattggtctaatagtctctaaacccccaactgagacatttcacaaatctgcagaatgctcacatttttcacat

SEQ ID NO: 46717 - DNA, 701 bp, Bovine  19866881656664
  misc_feature (1)..(1): n is a, c, g, or t
ncacagaaaacaaattatggttaccaaaggcagggaagggatacattaggagtctgagattaacatatatgcactactataaataaaatatataactaacaaggacatactgcataacacaggaaactactaaatattatgcaataacctctaagagaaaagaatctgaaaaaattatatgtatatgtatataactgaatcacttagctatatatctgacacatgttactataaatcaactatacttcaacaaaaaaaatttttaagctgacataaatattatggatccatgctctgatatctaatagcctcaattaaaatatggttgtgtacatcactaagtgcagatcttaatccttctgcaaaagcctttatggccacaagtgttttcaaacactatttgaggtctggggagacagaattggataaataatacacaaatattatacaatatacctctatcctgagaaatgtctggagtagtactcaataattaaacacagaaatatttttgcagcaaaacatattaatattaacattaagagagataaataattatagtctgatgtcaggtcatgtcaggctttatcacaagatcagtttaagtcacatcaggttttgctgacaaataagcttttttaaaaattaactttccatttcaaagtatttgactgaacctgtagctattaatcacagaaaat

SEQ ID NO: 46718 - DNA, 825 bp, Bovine  19866881738471
  misc_feature (1)..(1): n is a, c, g, or t
nactatagctgccaggttcctgtgtccatgcaattctccagcaagaagacgggagtgggttgccatttccttctccaagggatcttcccgactcagggatcgaacccaggtcttctgcactgaaggcagattctttaccatctgagccaccagggaattaaaatctctagaactccaataagtcatgtggcttgaactataaatgttagagtttttcagggaaagaagatcaatagtattgaaactggatggttttagagaacttgaaatgcttgacctaagctttggaggaggataaaggcaattgagttgatgcagaagtatgaacagagggacaggaatccttcaactgaaggtgagctcaagagatggaaaacttggaatgttttgctaagctgttcacatcttattctataggcaatggggagctactgaaggatgctgagccagggtgtagcaggataacaacatctttatggaaagaagaattgttaactggcctttgtgatgcctttaaagatagcaaatcctgtaaagagtttgtaacctaaactctgcccttaatgtgcagatttatcctggataaatgctttattggatgggtttgatttgccctgcatatcaaaggagaagcaatgaaggtagttagtgtgtctcattgcaagtgccaactccatacactcagcagtggatctctaaagcaccatgtttagaagtattctgagatcttatcagggcttaaaagaaaagtgctgccttcagctagtaatgtctgccgcaggtgcaggaatgaggggtagagggagccatgccacatgtttgaca

SEQ ID NO: 46719 - DNA, 810 bp, Bovine  19866882065552
  misc_feature (1)..(1): n is a, c, g, or t
ncattaaatgcatggataatgctctgtaacataacttctgaggtttcctaacttttcttgagcattttggggacaagaacacacttcctcttgagagaacccacttcattatggaaattaacccaaatgttaatttccccctcattacctgcctccctatcacttctccagcaatcaaattccacctgctcagcactctgtgtgctgtaaggaagaccatcagcagtgaccaggtcttcctcctgacacttctctcctcccatgtgatagtgccagggtcaccatgggcatagtttatcttccttaccttgcaaggaagtacaaatgtctgcccaggctttatacaggtgaactccttctttgttcctctccctctttggggaagctgtggtccagccacgagttagtggaatttctaaacccatcacatctgatttctctgaatctcatctcacagccaggatagcacaaaggcagttcctccctgggaccatgggagctgttatctgccgctccttggatgatgctattagcattactcatagctcctgttcctccttcacagcctgaaatcacaagcatgggagaggctgataaagaaactggcttatatatgcctttcctttcactgctgatatgcttgtcccttgtgggttcttgcagaataatggaatcacaaagagaagagaaaagttatcattgggttaggaagtatggagctccagtgtgcaggactgtctgggggtcactgattcaggggctggaggtgagcagcatttacagacagaataaaactttgctcagaaaagg

SEQ ID NO: 46720 - DNA, 920 bp, Bovine  19866880361279
  misc_feature (1)..(1): n is a, c, g, or t
naattccctggtggtccgtgcttatgctccattcttgcactgctgggggcccaggttcaatccttggtcggggagctaagatctcacaaatcaagtggcagggccaaaactaaattaattaattaaaaatacacagacttgtgtaaatgtaagagttccaatttaaatgcaaatagccctgcagccataacacattacatcattgtcattcattaacacctttcaagcgtaacagcaactgggaagtctaagaaatcctggaaagggagagaacgtaaaagtgcttccagaaagaacaaggccagctggcagcctcagcaggaatatgggaaaggggttgccaagcgattgaagaaaggtgaactgagcacacacttccacttggagagactgaaggactttgttgaaggacaacaggacaatcagtaacaaactgaatgatgtctggtattagactatgtaattagctactcatttatattctcacgtatatctgaacctcttaatggttcacaatcatttttggaagaagatgtggtatattttatgtaacaatatggagaaaaatctacttaccaggagaacccacccactaccaaaatcgtttacttggatgaataactaaattataagctttgatgaggaagaaggccttcaagaggcagttgatgatcactctggggctaattccagggtttggctttgctgacaaggatctataaattggggacaaaagctgaataggctggataataaaagagtcttcagaggctgtttggagtaagagaggaagaatgacaagatcactggcagaggacagaagaatgaggaccttattagttctctaatgtgtgggctctgatgcaaatcaactttcctatttcctcatgaaatcttcagaaaaagtccattcttgttag

SEQ ID NO: 46721 - DNA, 1160 bp, Bovine  19866880373482
  misc_feature (1)..(1): n is a, c, g, or t
ntggagtctagctttagcaccattccttccaagaaatcccagggctgatctccttcagaatggactggttggatctccttgcagtccaagggactctcaagagtcttcagggcacaataaatgcaatgtgcttgaatcaacccaaaaccatgcctcccaccaacccccagtctatggaaaaaattgtcttccatgaaactggtctctggtgccaaaaaggttggggacttttgttttcaaggaaagataagtgtgatagttcttgagcatatgagattgagaactgctacaatttccgagtgtcccagaaagttacaaacatacccacccaaattctttcatcccttggttttgccctgtttttttttttttcccatacatctggctgggtttctcagatggcctcttcctagagctcctctagccttggcctacaaatacttgggttttataatgccattagccccaagatgtttggaagtttctgttgctctgacctgaacactgtgatcctgagattgagcagcaatttccagattcctcacatactagaagattccaaatgcatagttttttacctaacaataaagttcagctcaggccagtctgaagaatggggtgataagacactcctgtggtctctataaaactgagaagaaaagtggagccctctctggttgtacaggaggcaataattccacagggtcagtttcctggtggctcgggtggtaaagaatccatctgcaatgctggatacccgggttcagtccctgggttgggaagatccctggagaagaaaatggcagcccactccagtattcctacctggaagtcccgtgggcagtggagcctcatggctacagtccatggagtcgcaaagagtcagacacgactgagcgagtaacacttccctttaagagcatcagctttaaagtcagagaaaccaaattcaaatcatggctctgtcactcaccagcttttttgtttttcctttaagttcaagttcagtcgctcagtgtgtccaactcttcacgaccccatgaatcgcagcatgccaggcctccctgtccatcaccaactcccagagttcactcagactcacgtccatcaagtcagtgatgccatccagccatctcatcctctgtcgtccccttctcctc

SEQ ID NO: 46722 - DNA, 1185 bp, Bovine  19866880391859
  misc_feature (1)..(1): n is a, c, g, or t
nacctagtacagtcaaagtaaattaataaaaatttttagataaattaaaatgtttaaaaaaacaaaagatttagagtgcacaggaagcagggatacctaaccaagatctggggaaagcttcctaagtgacaatttctaatgtgaaacctaaaggaagaggagaaatgtgataagaaaagagaggaaagaagagtgttaacagagggaatggctgttcaaaggcccagagaccgcctggatccagattaatatcatttccaatgcactgcaccttctcttctccaggccaaatattctatagatcactgcttataaaaccattagacattctttatttggtatgaaacatctctgaaaccacccacagatattaaggacttgggaaagagtactatgttcatatttcctgtatcttaaagctaaatatagattctactctcgcataggctcctgattcattcaaaacgtgcagcaattttttatgtgtgcaaatgaatattctttaaggagacagcttacagcaaagcaaacatcatgttactcccaataagtgtaaggacaattggctgtggtgaggacaggtaggtggtcgggtgcaggggcaggagaggagctcagaggcaaaggatgggcacaaagggggatgttaggaggccatctagcacagtggtgagcactcaggccctggcagctccactacttaccagctgtgtgacgccggacaatcacataaccactgagtctcagtttcctcattggtaaatgagggaaggagcagcacctatgatagaatgtcccagctgcaacactgcagacatgcaggccagacaattctctgttgggagggtctgctttgtgcactgcaggagcagcatctcaagtctttactgatcagatgccaggagcacccctcacccgggctgtgacaaccacgaatgtctccagacatcaccaaatgtctcccgggggtgcaaaatcactgcccacttcgaaccactgatccactgaatgagtcattgtgaggattaaatagaatcctgcgtgagaagtggaggcacagtgctcgataaacgtttgctaaataaatacctaaaacaaagggatgaaaagctcctatagggatgaaaatggcactgagaagacctgccattttgtgaatttaaccagccatcactttagcccagg

SEQ ID NO: 46723 - DNA, 822 bp, Bovine  19866880420296
  misc_feature (1)..(1): n is a, c, g, or t
natagcagacatcactaattgagcacagccttgttccttcaggacttagactagacctcaggattaggtcacctgataatttctgcccccctcctgtgggcagttagtctctgaaaagcatttgctgtgagaagctgctaatgtacagaaacaaccttgtggacttcccagcagcaggagcgatcttgaggaagagcttttcttatttaggatcccagtgggatgttatcaagcaggtctttgaaaagttttctctagggatttttggggctatggcaacaacaatgaggataatgcctcacattttgatttgtgctttatagttttcaaagcactttcatgcacattttctaacttcatcttcatagaaaccctgcctggcaaagcagagaaggcattagaatcagaaaaatagcaatctttttttaaaatgaaaaggaccctagagactttgtccaaccttctcattttatagactaagactaaggaaggaaataccaccattaaaaaaaaaagtgtaggtagagagtcctaaaactccataatgttttgagtccaggatggaaaaggagcatttgttggcaatgattttgaaatgttaggttccttaagatttaataatcccacgatacatattatttgctttacagaactttgtagcaatactgggccttcctgtatgatgctcaggtcttcttctacctctagatccaaggagactccaccccatcatcttgggtgtttttgttagtcttcctttgtgaggaaggggaccaatatatggctgatcttgcaggaaaatctaatttgggtcaactctat

SEQ ID NO: 46724 - DNA, 3069 bp, Bovine  19866880491750
  misc_feature (1)..(1): n is a, c, g, or t
ncctgcccaggtcctcagagactccatacttggcattgtctgtggggagaggtttctagaaagcagaatattacaggaatcaagtcctttagatgctaatggcaagagaaaatgtctgtgcttctaaactctgaaaatcagagtcaatttggtaaaccatcaagagttttcaacaacatatccaactttcagtaaaaaaaaacatatcctatataaccgtgctgggattctccacttcttctcttccaactggaaagctgtgctcctggcacaggggagccaaacatagatactttcaaatgatgacttttcattttgtggcctctgagttataaatcctttgcctagaaatttgaatttgatctttttcctctgctggaaggtcttcaccctacatctaacacatctctttcccttcctttaaattgcttcagaaatcccaaatccttctaaagggttttggttcactcactgggtctttcacccaccctgctgcacaaggggccaggggctgggaaggcagcagcaggcagaacaatcacgcagaacaatcacggtggtttggttcttaccacgttttgactcacaaggaaagaggatataagacaatcaagtaaactgttactttcttgcaactggagaatgttttaaacatgtaacagaagggcctgacctagtctctgaggcctggtggggttgggggtaagggtttcctgaggtgcggctcagataatacctcaaggatgaactgaacagagagcagcagcgagagcatttacgggggagccaccggcctgcaaaggtgctgaggcagcgaagaacaaagcgactgccaggaactgaaaacaaggaggtaggtcactgtggctggagtagaatgaaccatagaggcagaagacggaaggtaggaagacacatgtgcaaggctggtggccataacatggatcgtgcattttattctaggtacagtgggaagatgttaaataagactagaagtgaagatatagtaaagacagtcttataggcaagtggctgacatgatcccatatacatttaaaaaaaaaaattactctggctatgtgtggaagtcagattggagaggactaatgttgatatccagattgattattttggaaatgcagttatccatgaatgcagatgatgacctggacttgggtgagggggttgcttagaggtggggaggagtgtctgaggttaacagcagctcatcggccgctgcaggctcttgcttaccatgcccacgtgacagcaagaattccagtccactgactcataaggcagatacaggccttaccaataaataaatacaaattggcatgcctgggaattgtatatagcctgaaagaccaagagaaaagattcttttacattagccagctgcacgtcggaataatacacagacctctgtgaatcatttcatggtttattaaacaaaattctgtttgcaattggcaagttaggaaaataaatgtccacgtttgttttcactttctatttccttgtttttttcagagacttacagcccaaatcttagggctgtccttggagacccaggaaacagacccgaatccccagttctgaatgtcccagtgaaacacagatcatcattaactcctgtgagaacaaagaggattcactgatgttgttctgtcatcttcttattgtgcattactgctctagaccccttggaccatctcctcttcccaaccaagagaatgctgtgaagaatccacgggcagaggagctttgccttttttgagaagtgatactctacaagctcaatcaagatttgtttgtaggcgggtggtgaggatttagttggcttagtcttatttgagtacgtggtttctaaagaggacaaaaaacctgcactaaaattacttggaggacctgtcaaaacagggagtgctggtctcccagaatttctgagtcaggtctgggatggagtctggaatctgcatttcaaatgtgcttctggatgatgctgtagctgttaggctggggaccacactttgagaaccactggtctatataacacagccccacagaccaactgtactcaatggacacatgaactattaaatgcctcctgtgcttggccctgtacctgcctccaggtctttgaccatccagtttccttggctgggaaattttctggagctttccttacttctaaggatgagttaatctgagctcctgggacctcactggtgctttctcaccattaggttatttatcactttgccctcccttggcggcaggaacagtctcattcttctttgttcagtacttggcacatagcagaggttgatttaagcaaaatcatcagcttttggtaaatgaatggatgagtggttcagaatggatctttgacccaggacatcttggcagcatctagaatatttacctggaacggaatcatatttctattgacttcatcatttaatacccatatttagggcctctaatacgtgctctgttttatactaggtaaggcattatctctgcgggcaaggattttaaaatccaattatagcaaaggaaacagtcaaatataaaattacaatacgaggataacctttactgttgattggcatatctaaagtcactaagcactttaggcatcaggaagaaaaggtcatttttgctgtgtgcaggtaagtctttgatctcatatgtttacaaaatctgtggactcagttattcatttaccaaaattcttattaaaagactacaatgtgttagggcaaatccagaagaacacttttcagcgttgtaagaagaattagggttaatttagtgtaacctatctccagatactaagatacccgcagagcttgcccatctcaagtgactgtccgataactccttgaatgcttctagtaacaaagactcaccacctcacgtggcagccaatccttgaattactgctgactgttaacctttctcagattgagatgaaatctctttccctgaactttctactactggtcttttgggctcctggagtaataagggatatttaatttctcttcctccaacaaccca

SEQ ID NO: 46725 - DNA, 954 bp, Bovine  19866880506536
  misc_feature (1)..(1): n is a, c, g, or t
ngggacaccctccctcctcatcccccagggaatgacatctcctggagctggctgcttctcacctcaggcccgaggactgaagtggaggcgcccaaatcgccgctccagtcctcagtgctcagctctcacgctaatacaggacacaggcagagccatggtttttcgtagcaattgctggttgttatggtgggccagtttttcattttatattttggaagtgaaagcaagggggacaaagagtgaaaaactgaaaattcccactcctttgcaagcgacggggctctaactttcccagcagtattcaaactctgacttgccagttacgtcttaaaattgaaatcagatttggagggacgtttaggatcatctgttaaagacacatatactcactgataacactacattcttaataaagtacatgtatattttgtaattacaaattccttccggggaagatgagaaagctcatttgtggctaatgttcaacgaacatagtggggtgtgggtgttttttccccccatcttttttctcttttagtaggaagtttggacacaaaagccactgactcttgtcttctctttccacagcaatatctggcatgattgttcctcccatgtgaaagaattgccttgaagaattttattaatgaagaggttggattctgctacagagagtaatctgatacaagtcccagagtggaacttttaactcaggcctttttaagaggaatcacaataactgcagatttttaaacaaacaatatcgccgaccttgcaaatactgaaattggaagggatctgctaacgcagggtgttggttacagttgtacctcccgcgtccttcgggggatatatttattctgtgttgataaaagcaaatccactttttctttctctctctcttttttttttttaagcttaactgcaatcacttgtcttttataaaccataaag

SEQ ID NO: 46726 - DNA, 866 bp, Bovine  19866880523725
  misc_feature (1)..(1): n is a, c, g, or t
ntccctgggattctccaggcaagaacactggagcgggttgccatttccttctccaatgcatgaaagtgaaaagtgaaagtgaagtcgctcagtcgtgtctgactcttagcaaccctatggactgcagccccaccagggctcctctgtccatgggattctccaggcaagagtactggagtggggtgccaccgccttctccgcaaagaagcttaagtcagtaaaaacatatgtgaaaggatctcatccaatttcattgaaggaaatttgctaaaactttttccctctaacctccttgctatcaggacccatttataaagcagagggctatagctacaaaggaattagtcaggtttcctcttttcttgagaggataaaaatttagtttctgaatagagtaagctatatgatgttttcactgcctattctgggaaggacaagtctataccacctaatgactagcatttcctctaggttttattttcttggagcctttcacagcagctggcaacagctgtagggagaggactagcaggttagctgcctccagacacagtggagagagaaggaaccacagaaatagagcacaggagtcacttttaggggatcattctccaattttctgccaaagtgtttttggtcaagacaattaatggtaactggctcataacaacactagaaaagagtgaaggtagttattgtgaggataaagaaatgcattatgggaaggcaggagactgtaaacagccaggactcagaaaagtaagaaacaaggtacctttggggtttgacctcttaacacacactatccgcctctctctctttttctcttctttctccataaccccctctctagaaaatagcttgtg

SEQ ID NO: 46727 - DNA, 1890 bp, Bovine  19866880542869
  misc_feature (1)..(1): n is a, c, g, or t
ntggttgtgtgaatgctatgctcttgggaagggtgtcgcagcctttgtggtcttgggacatagggagagggagcagctttttatcatggcacacaaaaggcatagtagtgagagtgaccagaagggactgcccagagcttttacattcccccctggaacgcaccccacccatgctctgatgcaaaccaaggcagaggagagaagccacaaaaatgactgatgatgggtgtcatcttctcactgacctcgttgtctgggacatgaaggtggattttgtgtggtttataaacataaaaatatgtgacactgctcatatctggagtatcaagtcacaatttctactcattaaaataactttcatacagacttcaattcatagcaagtattggcaagtgtcaactcatatgccaaagaaaactggcataggagtcatcttccccaccctaccgccccagctaaagcacctggttatggggattattgactttcttacttccttctctactctctttcccgagcgcccacggcaccctgtataggagggacagtctccgagagtggaagtgcgtacattgaagtcttgaatgggtgcttttgaaagactgcagaccctggctgattgtatttcctgctggcagtgaggacgtttatgacgatccagattttggactgttatcagctctgctgctgctgctatcacaactgtcttggcaagagaatgtcacacaacctctgccaccacccacctcccatgcccctttctccttgtaaatctcaaaggactcccaaggaaggagtaagttaccagcggttgcactgccccccaccagtttgactggtttttcctgctgcagcagaccagtctctgaggccttggtgacccatggagacctatgtggttagcagccataggacaaaaatactcaggtttggcaggcaaacactaaaattggtcttttcaagtgattctgaaaacctgaagagcgactttgttgtaaaacctgtgattttcctttttcctttccaatgagttggatttttgaactatacttagtattcagaactcaaagtcctctctgtgcccatggcttgagaacatattacaaagtgaaccctttctctcagtaaggggcagagggtttttgaagaaccctgctgttgtccttcagatggtaatcgtatctgacatacttcaactggccgtcctcacaccaggttcttagtacatttctgaacaaggaaaaggggaaaaccattctcctactcttaaagagaaatgtgaaaaaattactgatttaattcaaaccttaccttgatagaaactgattaccacagaaaatgaggcaagaaactcacatctactgtaacacctactgtgtgctagggactcaggacatagtctcttgtttagttttccacagggactcagtacatgttctcttgtttaatcctgcaattggctaacttggcaggctctctggcaggctcccatgaattaacgtggcagcagatccaagagagccacaccagaagctgcaaggtcagttgagacgccagggccacttatgccatattctgttggttcaagtgagtgatgaggccaaatcagattcaagagctggggaaacagcttctatttcctggtgggaattcctgaaaaaggatatgtgatataaagggtgggcagagaaggcaatggcaccccactccagtactcttgcctggaaaatcccatggatggaggagcctggaaggctgcagtccacggggtcgctgagggttggacacaactgagcgacttcactttcacttatcactttcatgaattggagaaggaaatggcaacccactccagtgttcctgccggagaatcccagagacggggggagc

SEQ ID NO: 46728 - DNA, 1413 bp, Bovine  19866880599116
  misc_feature (1)..(1): n is a, c, g, or t
ncaaagaaactactttaggaaactttcccaggatttgtttgaggtttactgagaaacttaggcatcttcactatagatttgttattcatctgagcacattttactgtatttaagagcttcattttgtcaatatttacagaactggatggacaaatgaaagtcaaaggctctaaaatatggctggagtcttgaagtcccagagtcagggctagaacacatggtggcaaacattggtaaatttgctaaattatgcatagaattcgcaaggcacccaacactggccagctccaataaagtcctccatgaaataccaaagggcttggtggatgagggtcagagggtggtgaatagtctgtgaacaggtgttaaaccacttattcaagcactcctccaaatggcctaaaagattttcccaccatcctcctgctctcgatgagtcactgtgggaatagcagtgaggtttggagttgagttataaccattcagtgaagcatttcccttcagatgaactcatactataggtcaggcactgagctcctggaaggatgcagtgatgtgtaatatcagacatggtccatgacttcatgccacttacaaactgattccagtagaccaaagtttgaacacaccagtttcctagtaaaggacattcacctccaatgtaggacaaaaaaagcaaagtggagagtcagcagcagctctgcatcccttctctgttctttcttgaaagtgcaccctcttttcatattcttatttgccgctaagataccttttttgttaaaatgttcaaatatcttgcctattatttttcaataaatatttaattaatttataaataaactgatttagagatatttagaaaaataaatatataaagagcttccccagtggctcagtggtaaagaatccacctgcaatgcaggaggtgctggagatgcggattcaatccgtgggtggggaaaatgccctggaggagggcatggcaacccactccagtatgcttgcctgaagaatcccatggacagaggagtctgtcaggctacagtccatagatttgcaaagagtccatcgggttgcgaagagttggacacgactgaaatgattaagcacagaaaaataaaataacctccacctggtataacatgacattgctaataagatagaaagacttctcaggtgtcacttgcaggttaatgaaaccacctgccaatgcaggtgacttaagagatgggggctcaatccctgggccaagaagatcccctggaggagggcatggcaacccactccagtattcttgcctggagaatcccatggacagaagagcctggcaggctacaatccatatagtctcaaagaggcagacacaactgaaatgacagcacacagttagacagaaaggaggcattgaggatg

SEQ ID NO: 46729 - DNA, 1206 bp, Bovine  19866880666793
  misc_feature (1)..(1): n is a, c, g, or t
ngaatcagcctgataggattaaacctttatactgaattctgctccatctgttctccaaggtttgcctttccttatctgaatatgaatttttagtctccttgtgtctgggagtcagactaaattcagcattcaaagcagagatgtgtgcagataatttaacatttcactagttaatctcagttgatatcagcttggtctttttctagtaaacatttttgtaaagaattttcctaagaaggaatttaaaagtatggagaatccacgctctttgttagagggcttttctcctcccactgaattctaggactcactccattcactgttctaacaagggtttacattgacgtttgcacataaagacagaaaaggaagacctgtgtcctctctctagatctgactataagaagagatgacataattctgactggatgaatgatccaaggagactatattcatgtatgttttgttctttttctccctttcaagtattagtcgatacttgataaaatcatgtacagcagctgtctctatcatgtttattaggttttctgtttttatggagactttctcggggtggaggttataattcagcttcatcttcagtgaaacgtgttgatgtttgttttgccctcctgtacctctatccctagaagcagttaaagcagtgaagttactcatttctcagctggaaaagctggttccgggcaagttggaagacagagaccagtaagttgccactgggccagagcctggtggatggtttgggggtttccgacgctgtaacaaaggacaggggaggcctatgactgctgggctcagagaagcaaaccaagatacaaacgaataaataagttgcatgaaagaaggatcttctggaattctactttgtgtctggtttatggccatgtgatcattagatgtgttggatttacacttgtgatggaacacaagagccagcagcctgtggaaccccaggcctaagaagagaggatccctctagcagggctccagtggttgtccacagtctccttggtaaccctagtttctggctctgcgccatcacgaatggcagcagcaagcagctcatcaaaaatttaggcttttccacacatatgtctagttattatatttacacagtacccttaactgaacagtcagggggcagagagcagcaaaacttcccattcaagcttaagtagatttata

SEQ ID NO: 46730 - DNA, 2357 bp, Bovine  19866880703433
  misc_feature (1)..(1): n is a, c, g, or t
ncaaagtgggatgatgtccacaaattaattggttcagaaaaaaaaaaaaactatctttctctctatatcaatctgtgtatgtatgtctgtgttgagagagagggaaaacacatatgaaaaaatgttaatctttgttgaaatcaagtgacggcaatacaggtgtttattgtactctcctttcaacttttgtatgtttaaaaatgatcaaaattcaaattaggaaaagagaaaagatgacctttatctgaatgggcactcatgcttgtgttgcctttaagaaatgtccaattccccaattacaggacaagtgtaccagagaaagaccatttgcattacaaaataacttttaattttccagggggaaaaaatcccctcaagtcttattcaaatcatagcaattaaaatgatccaatgaagagctcagctgtgggggaaactggaattagcactagagggcagtcttccctcccttcttccctccttttgtctctcctttccctctccctttcttttctctttttatttccccctttcttccttcagttattttgctaaaataaaaaaaattttttttccctttttttcttttttaacaaactaggaagttattataaaaaaaatttcagacaataaggaaggagtaaaggggacagcaaaaattatccttgatgttactacctacagataatagtaaaaacagtgcaaggtattattctaagcattttacacatattgacatgcttaaacttcactcataacctgagaaggtagttcctactctcatgcacattttacagaagagaaagttgagtagagggtgttaagtttctgaggatcaaatcctacatggccttgctgagaaagagacactctggactctttggtaaaagtcctttgctacatacatacttgcccacattcatgtgtgtatacaaatgtgtgcacatgataatcacccacatgtatatggatttgcacatatatgtatgccacaattacatgtgtaaacacacacattttacaaaacaatcattttattcatgggactttatgacttggttaaaaaaatatatatcacaacattgttaatcctctgaataacaggaaactgtggtgagagagtttaacttgtcctaggctgagtggagctgtgaacctggctggttgactccagagcctgtgttcttagtcatgtactgctcctttttttttttttaatccagttctctaatttttgtgttttagttatttcttagtcttaatgttttataaataatgctgtcatgaatatctcagaataaacacttttaagaatcctcaaaatcttagctcttagacccctagactttatttctttattcacaaagcagatattaaataaactagaaaatatgctcagcaataggtcttcctgtaaagctgtgtcaactgagagttggaagggagacttctgatcgatttttctgttctgggtaagaatcttttctaacaatgacctagtagctgatatgattacaatagtagtaccaccccttgaacacgtcgctatatttcaaccactgggtcacacctttttcctttatcatttccttaatctttacaataactctgtgagggaggtgttatccctgtgtgttcagatgagagcaaacatcctgtgacatctctgagaagatgggcaaagcctctgtttacacacatctatgaatggggagctctgttgtgcaaagcagaccagaccacttatggagccctgtaattgcttacttactattgtaagaattcacttacaatcactgtagaattcaccaactctcttttcacacaatagagcttgtttagataataacaatgaaaatagctgccattttttgggcatttgcaagaggccagcattagttcttagtgtacttttcacaggtatttttaatacctcacttatacataatgaccttatatggggggtatattatttttttccattttatatatgaggtgactgaggcctgtggctattaactagtgaggccaagacagtcccatctcacctgaatgtacttacctgatggctttagaacctgacctctctagaaagatgcctgagggcggggaaagttaagatgattagttcagtcaacatagaacaatgtcagtttagagagatggaaagccgctggccaagttccttcctaaaactttccaaagttttcagaatttcatatagtgtggatgtaggttggaacaaggaaaatttagatggaagtctagcaaacattaattatcacatcaacaaacatatccgtaacatttattgatgtagtaggggtttgctataaaacctaatattgtgctgtgtg

SEQ ID NO: 46731 - DNA, 974 bp, Bovine  19866880712615
  misc_feature (1)..(1): n is a, c, g, or t
nagaacataggatgcatgccttgtgaagctctaggtgccactgcggttttccaattctgtgagcaggtgtgtggccttgccatctgtaccatgccaacatctgggtcagagctgagcaaagcattgctccagactaaccaggagaagataagcctctggctcagcccatggaggaggaggatggggtatctgggaagaagagctcactttattttcttttttgagcatctgggtcaaaagtcatcatttttacagaaaagtcccaccaactgttttgtttttatgtccagaacctcaacatcaaggccacaggaattagtgataaatgcccacattttaagtctgtggcagaattcgctaagaatttgagtgttcaaacaatgtcacatgcataaatttcactcccctctgcttattttcttatttgcatttggctccttcatgacttagttcattcgttcctcattttatttaccaaatatttattggggaatgaaaaaatatactgctggaaggataagagtttgcattttgatcacctcaagcataatgcctggtggggcgtaaaaagtttagtaatggctgttgaatggacagattgatggatatgtgaataaaaaaattagaaaaccataatttttatacttagagattatttttaattaggaatgggttcaagcaaagtattcagagtagctcttaaaaaacaaatgtcattcaatttttaaaaaaggtgcaaataaaagtaaaaccaaatcaaatttgtcccaatagagttgagtgatttttacaaaacaaatccattgatttagatctcccagttttgtctgcctgtgcctggggtcaccagtcaagatgactgattatcctgggaaaggctctgtagcctatctcataaacagagggaaaaaaaaaaaaaaaaaaccctatctcacacttggtcagaaggcagcccaaatgcttgtctccagagg

SEQ ID NO: 46732 - DNA, 1552 bp, Bovine  19866880726228
  misc_feature (1)..(1): n is a, c, g, or t
nttgttggtgaaatgagctcactctggctattagacccttgagtcccaaggggaacaccatggaggggagtataaaatctggcttatgcttatatttaagataggcagtatgacctatattgggcccataagagtgatgctacatgagaaaataaacagggagggagctgttagagatcctgctcttctagccagcatcctcttagagcagggatctgctgtggcccttggaccaaacgctacctctttttgtatattctatgggctgaaaatggtttttgcatttgtaaattggttgaaaaaatcaaaataagaatattttgtggcatggaaaattatatgaaattaaaatcttattgtccataaaattttgggggaggacacagctatgcccatttgcttccatatcatttcttgcagtttttgctttctacatacaaattgagtggttgcaacagacactgtagctgcaaagctgaaaatactctctggccatttgaaggaaaagtatatagactcctgtcctgaaggaatttggacttggactctgaaaaggataaaattgctggtacaagagttcaaagtcctttatactgttagcacatttggatattgactttcgatgctcattaacatattttctgaaatggacagataagcaagttaagggaagaagatagggatttaaaaagtagtttttggatcccataacagtattccctaaaagcagctcccagggtgacatactaggtgacatcctttccctccctttccagtgcttccttatgtcttctgcttatcatttccagtgctgcagccttatcaaagccatgaccatcctccttggtctttgaccccttaaatggtctatttccatacttgttcaataacagttcactctccacataacagctgtagtgatttttaaaagacaaaaatcagattatttaacttctttcaggtttttgtatgaatattccttccttaattcaagtctctattccagtgataatctctgagaaaggctttccttatctgttctttctagagtagtcgccatctcactccactatcatttattttattaccccttttattactctcttagcattcgtcactgtcttacattatctgggttggcttactgaattatgtgtggtttctcccatcagaattgaagcttcatgagggtaggtatgttgactatcttattcattagagtatttctaatactcatacatttttcacataagtactcaagaaaagtttcttgtgtgaataaatgggttggtccttctggtagatgctccatgcagcattggtatcacaccctgcctgtttgcttctccaggggcatgacgattttcttaatttcatcttcatctcttgcctatcagtatatcaggaagcaacatattgactagagaattgcaccgagggtcaatttatgagttttcctgtggtttgtaccttagatcacctgaacaatctgatttctttctggatccttttcatcatcagggacattatgaaggtggttggaatgtccaga

SEQ ID NO: 46733 - DNA, 905 bp, Bovine  19866880743826
  misc_feature (1)..(1): n is a, c, g, or t
ncgtgtatagcaccgggcacaatacctcacataagaagcactcaaaaacttgcaatgagaattatactactgcctagtttccagagcttgcatatgtttatttttgccaagctcatacttgtatttaatttttttcttgtcaccatctcatcagcaggagattatcaagttttagcagcatcatcttgctgcctagagtagatagagagagtcagtttgaagagagacatattattcccagaaacacagactcttttatactcaatacaaagaaccttcaaaagtaagagctgtgacttcctccctccagaactggttaacctgttgggatatttggtagatgaattctgtgccacgcactcttgtatactgtgcaccaggccgggagacagcagctgctctccatgctgtccttccaacacagaaaaccaatctcacagcaccaggggagactgtaaaaaacgaaaaaaaaatgcaaatgtccagcattgattagttttgccagctgcttttctttagaatcaacggatgggccactttagctttaagtccattggacacacttaggggttctttttgttattgtttgtttcctttgttgttgttttttttttttttttagaaattgtattaaagaataaataatcctttgcaggacaaacctgtcaaagaagttgacaaatggaaggagggcttaaatagaagaactagataataagcctctattgaactgtttctgaaaatatctttgacccaggggatgatctggttctttcaaacgtgggattgaagagtcaaatgctttcagaggctaggctacttatgtaaataaatgaggaagcaggaagagtctgggtgtaaggcaatagggagtggtggtgggtttgggtgtatttttttgtttt

SEQ ID NO: 46734 - DNA, 1930 bp, Bovine  19866880782442
  misc_feature (1)..(1): n is a, c, g, or t
ncccaaggactaaataactgaaagcatcagaaaagcaataacaactctttctctgcccttccctcttcagctgaatccagcagactcagaatgctgaaaagaattacaaaagcaggaaagccacagccactgcccttcagctcaaaatgcagacacactggagagacactctgtgcaaatcacaaagagtaaggccactgttctctgattccccagcaaacctgggacactctgagatgcagattgctgaattgttgcattcctggagaatctttgagggcctgtcctttgatatttgataataacaatagacttataaagagcaaataagtttatagatataagcttacatcacagggtccctgtgctgtgttcagtcactcagtcatgtctgactcttcgccactccatggtctgtagcccaccaggctcctctgtccatgaggattctccatgcaagaatactggagtgggttgtcatgccttcctccaggggatctttccaacccagggatcgaatccaggtctcctgcattgcaggtggattctttaccaactgagcccaccagggaagctgtgactagcttttttttttttttttaagctaggtatggcaactgtttttcagacttgtgatgccaattcactgtcaaagacaggtatatgtttagtccccgacttcacaatgaatttgaattgctttccaggggttaatatgttttttttctttcatgcatactaggaattggtcaccctgcttatttaacttatgcagagtatattatgagaaatgctgggctggatgaagaacaagctggaatcaagattgctgagggaaatatcaataacctcagatatgcagatgacaacacccttatggtagaaagcaaagaggaactaaagggcctcttgatgaaagtgaaagaggagagtgaaaaagttggcttaaagctcaacattcacaaaactaagatcatggcatccagtcccatcactgcatggcaaatagatggagaaaaaatagaaacagagacagactttattttggggggctccaaaatcactgcagatggtgactgcattcatgaaattaaaagacgcttgctccttggaagaaaagttatgactgacctagtcagcatattaaaaagcagagacattactttgcagacaaaggttggtctagtcaaggctatggtttttctagtagtcatgtatggatgtgagagttggactgtaaagaaagctgagtgccgaagaattgatgcttttgaactgtggtgttggagaagactcttgagagtgccttggactgcaaggagatccaatcagtccatcctaaagaaaatcagtcctgaatattcattggaaggactactgttgaagctgaaactccaatactttggccacctgaagcaaagaactgactcactgggaaagacctaatgctgggaaagattgagggcaggaggagaagggaacaacagaggatgagatggttggatggcattaccaacttaatggacatgagtttgagtaaactctgggagtttgtgatggacaggaaggcctggcgtgctgcagtccatggggtcacaaagagtcagacacgactgagagactgaactaaacagaactgaactaaaaagcaaaggccactgaccttttctatttcctagcaccagactagatgcgtctgcaaggaaagaatagccatcgtgtagacctttatagttgtgagtatgcttttatgtatgttacctcactttgtcataatgatcctatgaaactggcattattttacagggctgagaaggtatttaatatcatcaccattatccccatcattatcactgtattttgaggctgaagaagatttgtataagtgaagaagacttcagggagatagagcagagaaaataaagactta

SEQ ID NO: 46735 - DNA, 3533 bp, Bovine  19866880837811
  misc_feature (1)..(1): n is a, c, g, or t
natcctttttgttgatctgcttttaaaaagggggtacaaatttatatgcccatataatatgtaaatgcattatcactattctcttatcgactttttaaggaaatggtgaacatgcagtaaaatggtccaaagaaactggtgaaacagaaaagaaaaggacccaaatatattactgcttagacaattagaatctgaacaactaagagctgtttatactgacaaggtatgaatgaaatcaggcaaaatgaaaaagaagcctggatcttgtctctgagcaagggctatgaccttccagaatcaggcagcaatgtaaactagaagttttcttcatgccagccaactgagcacttagaaggagctggccaggcacagcttactttcccaggcttcacccatgggaaagccagatgaacgcctggcagtatgccatgggattacatttctcaaggatcatggctcttagagccatggaggcatacctgtcaaaggcagacactctggcccataattgccccaacacactgtggctaattgccattgctgaaaataatctctgaagattatagccggcatcataaataactgggagttctgcaccgacacactatgacaaggtctaagtccctcttatcttttactagagtgaagcttgtgcattcgtgttactaatgaatctttttcatttgtgcaagtgatgtttccatttgacaatgacatgaacataaagtggaagttaattcactccattgtgagaggttcattatttaacttgatgttgaagacaaaacaatgtagcttaatagatgacaaatagaaattagttgtgatgaattttgccatttaattctagcaggctcattgaatgtttgccataaacatggcaagaaagccatcgctgacctctctatgggtgggatttgttcattctgctatttccaaggtatcacccaaggattgggaaactcattgggaagttacactgggaaatgagcaattcccagttacacaaacgacttgagactaatggtgatacactgacaccgggtcagatttttctttttattggatcacttttctttatcactggataaacaattaacttacacagctgaacactagaagttgtattgaattttgatagctgttaccattagcatctaaaacctacacttgtgcctttttattcttccatatggagatagctaagtaataaaagaaagagctataattctagaattaaatagagcttatgttggaatcccagaccagttagttactaagtaggtgcttttaggttagttattcaacttctcctatcctcaatttcctcattcatagagtaggaatattattagtatttacctcatactatagatgggattctgtaaagggagtgatatgtataacttagaatttttataaagtcaatttccttgaaaaatggttagcaattcagtcattaattctgatgcttttcccctccatcaagacatacaatctgtaagaaaagcaggatatgtcatttacaccttcatcccttcaatagactccttctcccaaagctatttgcattcacagtcagttcagctgctcagtcatgtctgactctttgcgaccccatggactgcagcatgccaggcttccctttccatcaccaatttccggagcttactcaaacccatgtctatcaaagttgccatccaaccatctcatcttctgttgtccctttctcctcctgccttcaatctttcccagcgtcagggtcttttcaaatgagtcagttctttgcatcagatggccaaagtattggagtttcagcttcagcatcagtttcttcaatgagtattcaggactgatttcctttaggatggactggttggatctccttgcagtccaagggactctcaagagtcttctccacctccacagttcaaaagcatcaattcttcagtgctctgctttctttatagtccaactctcatatccacacatgactactggaaaaaccatagctttgcttagatggacctttgttggccaagtaatgtctctgcttttgaatattcagtctaggttggtcctagcttttcttccaaggagcaaatgtctaaatttcatggctgctgtcaccatctgcagtgattttgcagccccccaaaataaaatctctcactgtttccatttttttcccatctatttgccatgaaatgatgggatcggatgccgtgatcttagttttctgaatgttgagttttaagccaactttttcactcttctctttcactttcatcaagaggctctttaattcttctttgctttctgtcataagtgtggtgtcagttgcatatctgaggttattgatatttctcctggcaatcttgattccagcttgtgcttcatccagcccagcatttcttatgatgtactctgcatataagttaaataagcagggtgacaatatacagccttgatgtaatgctttccatatttggaacagtctgttgttccatgtccagttctaactgttgcttcttgacctgtatacagatttcgtcaggtggtccggtatgcccatctctttcagaattttccacagtttcttgtgatccacacagataaaggcattggcatagtcaataaagcagaagtagatgtttttctggaactttcttgcttttttgatgatccagcggatgttggcaatttgatctctgattcctctgccttttctaaatccagcttgaacatctggaagttcacggttcacatactgttgaagcctggcttggagaattttgagcattattttgctagtgtgtgagatgagtgcaattgtgtagtagtttgaacattctttggcattgcctttctttgggattggaatgaaaactgaccttttccagtccttgtccactactgagttttccaaatttgctggcatactgagtgcagcactttcacagcatcatctttgtattagtccatgccttttcactgaggaaagactttgtccccaatttaggtccaactgagaatgtaatgagagaaaagaaagaaggccattttaggaaaaatgtgcaaagctttgcaaaggctctgtgttagtgaggagtatggaaagtacaaggcctgaaagaaatccagcttgtcttgagcatagaaattcagaagattatggtaagataataggcagagtcaagattttgcagacctcagaaggccatggtgaagagttttgtctttatctgaagagcaatgagggaaggccaagtgttccaaccaggaccataatacatttagattatttcaaagagataactctgaaagtagtatggaaatgagatttggaagtgggcaagagtagctacagcctgaccaggctggaagctactgcagtggcccagatcaagatggcagtagcttagatgaggcagaggtagataaagtatggaaaggtttggtaaatatctaggaggtgaaattcattagactggtaatagattcgataggatatgggataaagaagaaggagg

SEQ ID NO: 46736 - DNA, 1570 bp, Bovine  19866880998332
  misc_feature (1)..(1): n is a, c, g, or t
nttgtgtttctctttgtcttttggctgtggcttccctttccctagggtgagagagaataaatatctagtttgagagtaagaggaccattgagtaaacaaagagattcattttatgtacgtcggcgtatgtctgtgtatgtgtgtctggcgtgtgtgtatacaaatgtatgtgtatatttatatttttggacaagtaccgtgtagttcaacttgagtaagtgatgcatgcaggctggaactacgctgaactttaaagatatctaagggaggcaaaaatagagttggttttggcttcttaaattgttgaacatcattggttattgcatgtacctccagacgaatggtatctgtaaatgatgattcccaaagctttacagatggtcctgactataactgcaattaaaattcactgcctcaagactgctggggctctgttggttcttattactccagtgtttaattgaagtgttactcaaggctgaaaacagcaagcatggccggaaacctcctagtgtctctgtttctttggtctttaagagaagggtgttgggtagaaatgagccccttgtgcctcccctgtgacttctccttgaactaatgagtaattatattcaaagcctctgtacacagggtgtgatatgaaggttaaagttacccacacacatgcgtgcgcacccacccatcaagagctccatgctaaaaaaggacttgaaggaggctcaagaatacaggctattggagtagctgttattacaagtccctgccgtgatgactcgggggctaaagagaaagagaattatctcctggtactgtatttttaattcctgctgcctctttcccctgactcagccatctgtgagctaccctcagaccctgctaccaccttcctcctccccctagctgaacttgcgaaattctaaaaatctggtttataaaactgccttttttcttacaattcccatttcttaattctaggaggcagtgctttagagattcgggctctggaatccaaaagcattgactcaaaacctgctcggccactttcagcattgcaaacgcaaccctcggtttcctccgtttcctcatcggtggactcagaccagcttcaagctcagcagacagccagtgaggcttacggagcaggaggcagagatagcagtgataacccttccttattttccagagaatttgggcaaactatgtgcattcttagagccaatgtggattatgtgcctgcaaaaccctgtgaaagactctgaacagactaatggtgaggaaatctggaaatggaaaatctctatcgacagctgcacgagctgtcctgagcctcagtttcctcatctctaaattgggcatgattcaatagtgacagaataacttattgcagagttggttagttaaagataacatacataaagtaacacagtgaaaattaaaacttctgtgggagtcatggcctttttaatgaatctacaatctccctccccagaaaaataatgtgtgatgcaggtgtgtgcatactcatctcacacacacacacacttgtgtatcaattttaagggcacacaaa

SEQ ID NO: 46737 - DNA, 1941 bp, Bovine  19866881024878
  misc_feature (1)..(1): n is a, c, g, or t
ntagcactcctaatatgtttctttattctttgcatcaacaaatactgtaactggggatgtttaccgtgtcagcacatgatagcttcagtaataatctcagctacagaccaagatacttctgtttcttcacaccccaggtaagattttgaatcttgggggaaagctaaaaacagctggtgtctggttattcatttgtgttctttatctttgaataaagaaaaggaagatacactgcaaagatatgacttatttaaataagagaatttacttctgtattgaaaaaaaaatcgcaaagtaagatgccacatcaaacactgagacacatgatgattattacaggagtaaatgataattgagtgaggaggcagaacaaaaagatccagaaatttacccacctcaactgaatttttatcattaaaaactaaacgcgcttgcagaatgagtcctttagtataaacacacagttaattaattaaaagtataataaacaatagtaacagttcagggacccaagagtatatacttcacccaatcaaataagtagattctaggtcataagaggagattctaagatacagaaaaaaataacctaaagtctgaagctgagaaactctctaacattattttgagttctctggcactagctagaggacaggatttctgtctttttcattaaattatacaagtgcctaccataggatcttaatatgcaagagctttttgctcacatgctcatgaggatgatctacatggtttaagcaaagagctttggtttgactttttcctcctattataatccatcctacccaagaattcaaatatgcaaacaattattgtgtacctactaagggcaaatgacagtgttggatatacacaaaaagaccccaggcaccttaaagtaataaaactgtcctccactccttatgttaactgaagacatattatcagcagaaaaagcagcacagttatcaaatccaccctgtgtaaatatagtcaggaaaaacatctttttcttttttccatcatgcctaatcatctttaacactactgtttaagggtttgctcctattcgtggagacttacagactgagagagatacaaagcatagtcccagactttgaggactgtctaataccccaactctgaacctcttcaaatatctagccaagggcaatgcaaatgatgtaatgctgaataataaaaatggaaggagcaatggaataattaaaaagggaaaaatgtagagaagactagcaacattcaccaagagataaagaacactttctagaaaactggtcagatatcgtatcataaagttaaaaacaatagtgaagcaaccatgcctatgaaggagtattataaagcagagatacggagcctcaaataattgatggtgagatgaaaaacacaggcgataaaaaatggcagaactcactaagaaatacaaaaacaatttaaagccaaatcatccaatattgaatgaacatatgagataatagacactgttgaaaattcagtaagacaaatagtagacagcaatttaaaaaggcaaaaaatacggaataaagagtttaaaaggatcaatgactaaaagatatatatagaagatgcagcaatcatgtaattggagtctgtgctaaataaaacaaaaaataatggatcaaaatacatatggaaaatacaatttaagaaataatttatttttaaaaagaagatttgaatttgcccactgaaagatgacaccatgttccaagaaaaaaaaattgatataggaaggtaaatagtaattgtatctgggaaactcttgaattttaaagacaaagaatcctctggagtcaataaaaaagattaagtcactcataagatgaaggaaaatgatcccagatttttccacttcaatattcagcagcagggagacattgagcaataccagcaaaatat

SEQ ID NO: 46738 - DNA, 1218 bp, Bovine  19866881029558
  misc_feature (1)..(1): n is a, c, g, or t
nggattttaaattcacaacatctaatttgctcacaaatctgcagtcttagggcttggtggagaatgctcatttccgctctgcttgctgatgtgcactggggcagcttggagactggagaagggaatcatctgaaagctgctcctagcctgggctagaagtcttaaatagttgaagactggccaaccagtcctcctcagatacctttctctagccctttgtggtctttctatgtaacctcttcagcatggtgccttcagggtaacttgactttgtatatgatggctcagggcttcctgggtggaacagtggtaaagaatctgtctgccaatgtaggagatgcaagagactgggtcaggaagatcctctggagaaggaaatggcaacccactccagtattcttgcctgggaaatcccatggacagaggagcctggtgggctacagtccatggggtcgcaaagagtcagacacaattgaccacacacacacacacacacacacacgcacatacacacatgacagctcagaggtctagagatgcatgtactagggacagagggaaaaccaagtagatggtgtattgttttttttgtgatctggttatgagtctcatggtgtcatgtccactgcattctatccctttgaagaagtcattaaggccagcctgtgatcaaggggagtttgaatttagactccacatttcctgggagaagtgtcaacaaacttgcaaagatatttcaaagccattactcaaccaatcactttactggaagttttgcaacatcaattaagtccagacttaacacttactctgagtgagacagaaactcctgcagagaagtaaaactagaatatcatcatcacttcttacataaaaggataaagatgaggagtttgaatgtggacccttcttactccaatataaagtaaactgttgtaactcctccaaaggctagacttttgggatgcatttctgttctttgaatgggtgcaagtgggactcttataaagggagagggagaggaggggcagcagtcaatgtcaatgtcaatatagacgttagtagacacaagcttttctgtaccctcattgcttcccgactgtcctggcttgtcccccgaggctaggcttcaggaaggctgcttagtgactttcccttcatcttccagttgccttttccagaacttttctttcccagctactcccacaattgtgcaaa

SEQ ID NO: 46739 - DNA, 1944 bp, Bovine  19866881053874
  misc_feature (1)..(1): n is a, c, g, or t
ntgtctcccttgcctcactcaacctataaagatccatgagggcaggatcagtgttgctgtgcttgttatagaatccaccaggcctcacctggtgccagatgaaaccctcaaggtctatgtgaataagtaggccttccaggaaataggccttaaggaaagtagaagccagtacgtagaggtgtggatgtccgtcttattctgtggagcattatgagtgtcttgtccttaacactctaaactactctgagtatagattcctcgtctgagattatgcgtggcctaagggcaggggactcttgttccctttttatcttccgtatgtgatacagaattccagaaatgtatattgaatgaccaaattaatcagcatggatttaagatgaggatggtggcttctctgcttattaacttattcattacactctttcatcacctcaggattgggctctattccagagcaaaagtgtatcagcaatgcccaccacaaatgattctgatggtcgttgcaagatgacccagcagctctggtcatcaagtttctgttggtgcatggcctatttgctgagttttcgaggcattttataagcatcattaagcttatcatgtccaataattgtaaaagtagggaaagcattgaatgtgcaattggagagacttatgatgatgatggaaattaaagtgaaacagttttacaggagtaggtgcctattgggtgtttgtggaatgtttgaccctaggtaaatttgtttttttccaacaggaaaaaatgtcttatcgacatgggatttaaaactatagatcatggaaagttctgtgttcacacatgcctcctcctcagtaaaccagggcacatagttgaccagaaagctcactgggattaattagcagtggtatgtgaagagcttggttcagacttggaacatggaggatgactttccagcgaggccagatcctaggtacataattcagtcacttaggggatctcatggcttgcctagtgtaatcggggctcttggctcagaccaggatgggcattgtgtgtccagctgctgccagcagagggcagcagcacgctgtgtgagttcaatttgcattcccgattagcaaatacccatgcactgacaaagagggaaagtgggtgtcccaggactactcactcttgctgcttttctctgggtgataacactggccccacgccattgcacacacagacctttttacattatgttggacttgggctcatccaaaatagagaaatgaacacacaactaggagctgccatcacagacaagaagtaactttaattaaatattgtgaaagttgaaaagtttttacagcttgaatgtttgcaaaaaaaaaaaaattataacaatctctacagtagttaggttctctaacgattgaactgtacagtgtgtgtctattccaaaagtctgataggaaggtgaaaggttagatttagagatgacttcgttaagctgcatcctagtacaatgtgaggccagggtgtgttatgcaatccagtcatccagaagctgtatttttccccccaaactgaaatcttagttgaattctctattttgttttcttcttaaagccatattctgtatttaggggaacatcttttatttgtaaaagttccatgtagaagagagagggtcagagggccagaatgtcttttcgtctaatcaatgtaaatagaggcaacaaaacacaaattatacacattttaaaggctctttggactttcaagaaaagttctaaccactacaatggctgacaatgggtggcgtctgtcaccagggtctgagccggacacctcaccggctgacctggggtccttcacaaacagttaaggggctcaccagacaaaatatggctttaaattgtacacatcttcaggccagcgcttaccacacaaatccaggacaacctttctgagta

SEQ ID NO: 46740 - DNA, 981 bp, Bovine  19866881068726
  misc_feature (1)..(1): n is a, c, g, or t
ngaactttctgcatgacttttttttttaatgtttcagtgagagactgaattcttgcattgagacaaataaaaatgtaaaaccctaattctgttttgtaggatttaagttataattcactccaatttattaaaaggatgctttggggctttttaccaacaacttggcatttttaatatgttctcatcataaattttttaaaacattgtgtttttaaggaacaaattttcaaactggcttttgaaagtgtccccagagaactgctgtggattgctactgacgtgaagaaaaccaaacatttaccatgtggaattgtcatctgcatatccacaggagcccttcccggaggctgtctggggaccagagcccccaaattgcatttgtgctatgtgatgaacagcagggaaaatgtctagtttcgtgtcttgctcgtctgatgtgggtgccagtaagtgacaaaacagcacaaatggtctgtttgtgttaagtgaaaattgatatgggctatcacttattaaagtacttattaaatgtgcacttttttgtatgtgtgttatttaataatgagggtaacagaatttcaaaggcttgcacccatgtaaaactgcatgtaatatcagtcaatgatggctatgaagaggcaaaaaatatcatagttcagtaatttgtgaacttggaggatgagagcaaattctccatatttgagaatgaagaaactagcaacaattgtttgggtgtataaaaactcaaacatatggggttgtataagagttcaaacatatgatgaacattcattgatcaaaacgaacctgagtggcttagagcattttttcaaaccttttgactgcaacgcacaataagaaatacattttatatcactacttcatgcagacacatatgtacatgccacacacgtgaaaaatgcaagtttaatcaaataatacccttactacatggtattttccatcttattccattccatt

SEQ ID NO: 46741 - DNA, 2055 bp, Bovine  19866881153654
  misc_feature (1)..(1): n is a, c, g, or t
naatgcatgaaagtgaaaagtgaaagtgaagtcgctcagtcgtgtccgactcttagcaacccccatggactgcagccctaccaggctcctccgtccatgggattttccagcaagagtactggagtggggtgctattgccttctctgggaatgcttcttaatgccttttaattttatgtacttcagcccagtgcgtctcctatctttattaaaggctctgaattaacgcaaacatagaataagctaaacgcagaggtaaggaagctatgaaatagaccaactttagcactaatttccttacactgagttatcatatgtaagccttaaaaaccaagatttataatttttaaattgttatttaaaattaagttgctgaagatgttatgttttagagagaggtacttcttaccaagatattctaaatttaaacactgaaaatatttttatgacttaatcatccccctagaaatgtttaaagatatagatttcaacttttggtggcctatgttctaaccccttcttccacatgagctgctgcttttgttaatgtgatctgccactcatcactgaatttagctgcctgtgtctttttgaaaatctgctcatgagacagattatgcttcatcaatttgagagaatatagttgggacatacagcgtctcctgcttgatcggaatgggagagggacagtctaaagaatgatagcaaggaaatgataaccaataacaaaattcctagagaatccttcattaaaatgatgtattaggaaaaatatactggcattgataaaatgcagaaaaatttacaagctaatttcagagcaataaggtttcatttcatttcaagtttagaatgtaaaaggctaatagtcagaaagtttataaaaagcaaaagtacagaaaccatgaaatttgcaattcacaagaggtctaaattatataattaaatgtcgtgagcatgaaggtctttaagtttgtaagatttcattgttaaactaataaaaagtgaatgtagaagaaataatttctgtatccttgtattgaaaataacaatttatgctgggtcctctttatagcaaataagatgcttcagattatcagcccaacacaggttcttgaacttgttgatgaaatcaccaacaaagcaacaactctgctagcactgctaacatttgctctatgagaactggaaaccatactaaccactttaaataatgtaagcctcacagtaaccttatgagttaggtactattaacatttccatttgagagtcagggacacaggggcttagagaggttaagttacttggccaaagtcacatcagctaggaaagcttgagagtcaaaagtcataagttttgttttgaattttagttctaaatagattggggagatagtaaaaatagttaacatttaggtctacttagatctaggatataagatagcaaattgtgaaccattgtaatgagccaagaaattgaaaacttcattgcaaaatcttcaaagtctgtgtatagttgtggcctctttattccctcacattgaatattgtcacttggagaattggacacaaacagaaaataccatggaacacactgagtattcatcagcatgtctgtggattgctatactgaaaagccatgctccttccccagatagttttacttccccccaaatacaatgataatacgtatatataaccctaaacatgcctaagcttaatacttatttcaggagaaataaattgggcatcctcacaaataaattggaacaatttatttcaaaatcattctacagcagccctgtccaatagaacattcttcagtgaagacagtgttctgtaactgccttgtctagtatagtagcctccagccacatgtgactagtgaccacttgaaatatggctatggaaactcaggaacaatggaattttaaattttatttaattagtttaaatttaaatagccaaatgtgtggttactgtattagtataattctagactatgttaattataacagatatcataaaattctaaatatacctgttcctcattttat

SEQ ID NO: 46742 - DNA, 1599 bp, Bovine  19866881201746
  misc_feature (1)..(1): n is a, c, g, or t
nctccatgggaagcgggtgcttggggatcagtgaagttgactactgaggacaggcctagaaaagttaccttttctattgtgtctcattctggtatctgtttctatgtgagggaaatgaatagagaattctctccagatcatctggatctatggattatgtgatgatttgaaaaggaattttttactgaaatttcttcttttcagtcaaaaaagaccactcataggataaaaggccaggccttgcagtgatttgctgaccacactctacatattttggaagtttgatactttatgtgtaatttcttgcacatttgtaatgttaggtcacgtgacccattccgtgagttaacacacctgctactgttacacccatttgacaaggaagaaaagtagaggcaggacatggagatttgccaaagtcagacacttatttagtggtgctaagttagaaactgcatttcctcaccccaaactcgcctcactagagcatgtagcttctgtgagtattgagctgaaaggaggatacaggtgttttgcactcctgttccctttgtcaatgttacttatttgcaaaatcttgcctttttttctgttacttgacccaaggtctgtatctgccacaccacttacaaattgctccaatctctatttttgttgttatgcctgacatatagtcactttcttagcttgcagctcaattaatcatgctcgtgtaattttgaagggaacttttgtgttcgtttaaatttggaaggtgttgaagaatcacttacagctttcagcactactttctccagatatgacccagctgagaatgtctatttgatttactgtgttaagttgtgtctatttcgtttttcaagagggctagcattattaattttattctatttgggggaataattaattttattctattttatggaatctatattatttataatttatttatatttataattcatttatttataattttattctatttgggggaataattaattttactctattttgggcttcccttgtggctcagctggtaaagaatccacttgcaatgcaggagacctgggttcgatccctgggttgggaagatcccctggagaagagaaagggtactcactcctgtattcttacctggagaattccatggactgactcatgggttgcaaagagttggaaacaactgaatgactttcattttcaattttgggaaaaaagagaagaatatatttattcctatatcagaagatattcctatgctggtaattcaaggccaaattttttttgttaacctctgataaaataacatgtaaactgaatgcaaatcaagtgtgacctaagacttattatattattgacaattctggtcccatccaaagccacagaagataataaattaagtacttcttcacgtagtattggtgatgttcaatgcaaactcttttgaagatgaaatggaacatttttatgaagagggatgaatgaaatacaataagctactgtggagataattactagaatggaggtaaaataggtaccttggtgattcttctctagtgttgccataggtaggtcatttagatgcagcatatgcct

SEQ ID NO: 46743 - DNA, 1616 bp, Bovine  19866881269923
  misc_feature (1)..(1): n is a, c, g, or t
nctgtgtttgccctaggtgtatggagaaggggagaacaaacagaggggatctatcctgttttgggagtcactggaagggctgattgctttttgctctggcctagtgccaataggaactcattgcaaggtccagctgtttccagccatttccttggtccaggtattccttgggggctggactgtagcataaaatatcttttagctagctttttgtgggaatgggtatcctgggttgacctgcctgagtctgcttcaaatggaagcaggcaatggtgacagccactttgtgacagtatggcagggactgatactaaacatctgtggggtcagttaattactgagactaatgatgatgtaaactgcccagagtagacatgactagcctccttcctccttctactaaataagagaattttggagtgaatctgattgtcttctttcccctctgtttcttccctagaactccctgtcttggtgcttcactgacaagagttaatagtaaggaagacccccttaattaaatcatataaaggcattgagtggttctatgcctttcaagaacttcatctcaagacagttccctgtatcaggtggccaagtgaaaagatacatcagcactagacgattttcttaacttggaaaaatgttaattatctcagaggcatgattttcttttgtcttttcagatgactactgttcaatctgtcaccccaagagtctaaaaaaaactcatatcctgaacacacacacacacacgtgatgatgcatcattattaataaatgaatggagctatttgttatttattatttaaaccttcaatactggctggcctgagtgatacatgaaatataggcaagtaatttatttattagagaaaataatgatttttttccccacagcataaccccctgtgaccccagacagcaagagctttatcaaatacaaatacgatggcttgtaattttagagtcttccagaacattgtaactgacaacctttttaacataagtacattgaacaaataatttatagacatattctgggaatattttagggtattttattgctacttctgaaagctatggcatgttatcgattttggtatattaatataacctaaaagggagggcacactctcagcttctaatccacatcagctttgatggcaagcgatatattttactgaagggagccctgagccaaagcagcagaggttaacaattacacctcatagccaaaagtttaagataatgaatttcactcattacagaacttccactttggggactgaatcaaattttttctacttagtatttcatcccaatttctcacctaccatttgtcagcatgatttctctttccttcagccccttcctctcttgccacttccttggggttcagccttctgctgaaaggatcaccttttcccaaaacttattttcagatttatttttgagggtttgtttaaaagaggcgattatgatccttcttgcattacttgcttctcttaggtggtttctagataattaatgcttgtgacatcaatatcttgttaatagttgatattttaaaataactcttctctttggtatatttagacccagagctttaatta

SEQ ID NO: 46744 - DNA, 1162 bp, Bovine  19866881271825
  misc_feature (1)..(1): n is a, c, g, or t
natgatgacaatcttttagaaaaattagatgggaaagatgaattaggggtggaggacatttgtgttagggaagcaattcaggctgttgaaatagttaacgcatgtcatggtttggcccaggcttagatttagggcaaagaggaggaacaaagcaaatataagtttcctgagaactggtcccttacttgtctttatcactagtgtctgagagcctaacacagtgcctgacacataatgggcactcagtaacatttattgaaggagtattgaatacatgagtttgtaggtaagtgaatacgaaagatagaaatggggtgccccagaaactttgtttccacttttctttaaaaaggaaaactctccaaagattctataggtaatgtctggagtagatctcagtgacctcaaactccattttctatttctgtgatcctgattggggccagcctgttttcaaagcccattcccattctgaggttgattttaaaacgttccttttcttttcatatcattcgtgccacaaacatttattgggcatctataatatgcttggcatcatgatgggccccggggggagaggatgagtgaaggttggtcctgcggtgcttcagtatttctttctctgctttcatctctagtcatctcagaagtttatttttgaaataaagattcattttcttagtggaattcttaagtggggagtgatgagatgaattcgggcttttaggaactgcttttagaacttgtggatgacttctactgtttgctgctcacccttgctgatatgccctattaatattcaaaagctgtcactttattttatctttgttctttcgtagactagactgctggctgggagaacctggtttgtctggtttagtcttgtcacactgtggagcaggacaaaaagaaacatggcccaaggttgttagtttaaaacaggaagtttctgcatatttctcttggtatcacactctatttaattgacttctgtccctttgccttgtaaataaatttcaacaatgttaggagcaatcccaggctattgacatttgctagaggacacacagtctgggatataaggctaaggaaaaggcctagagatggcacttgtatattaagggcattgtccttttaaacagtagtggctgtcagcaagctg

SEQ ID NO: 46745 - DNA, 1361 bp, Bovine  19866881291486
  misc_feature (1)..(1): n is a, c, g, or t
nactgtagcctgccggctcccctgtcctggaattctttaggcagaatactggagtgagttgctatttattagtgtgtaagctttcaggcattctcacaacattggtttatataaatatagattatatacatattcatatccatctcattctttttaatggttgtagcatattatattatatggatgtccataaaatttatgcaataaatcccctgttagtggggatgcattttttccccaaattttcactgtttaagtgttggaatgaacaacattcaggagaaattcttggataaaataatatatacatttcaagacttttgattcatatatttcctaaaaatcctcataaaatatataccaatttacatatcgatgggttacttttgaaggaatctgcaaaagaaaactaatttttaagattagttcattcctgaactcaattattctctaagttataaggacctctgaatatttttaatagatgttaaagatcacaatgattccttggagaagtgtcatttcaaacataccccgaggtcatataaaacccttttcccagtaatatcctagcgctttatagaccttatctcactgattcctttaatatgcccttgacataaatgttaaaatttattactctcaatttgaaggtgagaaactgaggcactggaagagctggctacaggaatcagaacaaaagcctcagtgctctacttactaggccaagatgactattttaatattgataaatctcaattagcagcatattgacaagtccagctaccaaatcaatcaaatggcacctttttttaaaactaagtatctgtgcaacagaaatgcagcactaggaggaatccttgtgccggactcctgacttttacaggtgaacacgcacttggcctgattttttaaagctcactgtcaacaggcacaaacctattggagaagcccccctggcattttaaacttgcctcccaaatgatcaagaaactgtactttctgtctcatcaagttcttcttataggtctgagctgtggtctcaaaagttgatttgtcttttgagaaaaagagatacataatgctgttgagatccattaaactgacttatttcctaccacaaccaattggtattttccagaagatctttgatgagaggcaaaagtggagcatttcttaaacatacccccttcttgccctggagggttatactcttatctaaaatgggaagtaggtgaatgtagaatcattagggaaaattctactgctgtctaattgtggtgaagttgatgacgttgccccggttcctacgtatgatgtgctcttaacagttggccttccaggatccttagttttccaaa

SEQ ID NO: 46746 - DNA, 1206 bp, Bovine  19866881330179
  misc_feature (1)..(1): n is a, c, g, or t
ncacacaacacagacctggctcctgggtacacccctttcttttctagctatagtgactgattcagggatgtacatgggattgatatctagtgcatgggatctttgaagggccaatgagaaccctttgcctggaaccatcatgcctggcaaatacatagggcatttgccagaactaatgggagagaggggctcttgttttctggggagattgctaacctaggaggctaaaatcctagagcaactgataccacctttgctaccatttggtgaagtcttatctgaaagaaaagccaaaggcgaagaaaacagagctaaaacctataaagaaatagattctgggtcttacgtgaatgcatgggtctgaccaagatgaacttttcatctatgtgcagataatcaccttctatacttacctagtttgaagttttcttttttctcttttctttttccttcccccatttccttttcctctcctccttattcctccctttcctcttcttcctcctttttcattagcaacttaacaataaagaagctgagcctagaccagtggttgattaatttgaacaaagagctgttgaatatgcttcatgagcaacaaataagaaagttatgcacagaataatcacaatcactttcaggattgtgcttaaacaatgtactcctaggtctgatgaatacctgatggtcaacatattcattatgccatggggtaattagtcatgggttctaagtagtttgtataatctgttgtaagtacttcatatacattatgaagaaccttacatatggctggcattccacttgtgaatgaaataaacaggacttcctatgtttgctttgacgtgttcaaatttacctatactaagatcctaggaatgttgctgatagtttattatttctcaagcaggaagacagagatcagcagaaacacagtttgatatatatgttggaaagcaaagagttaatatccttgaaacagataaagacaaaagagactaaggaattagtaatcgacctggaatgctgatacccaaaattttatttcaggtatgttacataaaacattaaatcttcagagagaactacttccttgacttttagggtctgctaaaaccttatcttaaaatttcacttcctcagtccctgaaaaaaagcaaattcaatatgccagccctagaaagaattgttcagtaagtgaagaga

SEQ ID NO: 46747 - DNA, 781 bp, Bovine  19866881412007
  misc_feature (1)..(1): n is a, c, g, or t
ntgtgctttattgtgaggtggggaagcaacaagttaacagatatgttgagagggtgagaaatgacttgaaagaaataaatacagtgatgtgttagtgctactgggtgggacatcactttagatgagtactaatgtttcacatgagatttccttgacaggaagggagcctgataagcaaagatctaggaaaatgactctccaagcagagggtaccacaagggcgaaggctctgaagtgtaaacaagcttggtatgattgaactgcaaaaagtcaatcagtgtgacacacagagtgagcgggcagaagtgtgatggaaggcgagtggagacaggcaggcaggaatagagacgcagaattcagcttttctggtcgattctgtcctgatatattttgcatttcatttggcatgattctgaggccctggtagctgtgtttcttcagcataacatgtgctgctgcagaagagaatgtttcagaaatcacttctctcttcttgtctgcctctgctccagtcaacatctgtcccttagaaagccagttctgaaggaaatctggccctttgctgcagccctcgatttcatttctggtggttacagcctccgtgtttccagggacctggttgtgattcgctgatttgagcaggggttgaagagcccgctcctggaccattcctgcttcgtgctctgccctgacctctggtggacttggcctgttaaggcataaaccaagctagaagctggaaagcctttgccttctatctctacctgcctgatttggtttg

SEQ ID NO: 46748 - DNA, 711 bp, Bovine  19866881644771
  misc_feature (1)..(1): n is a, c, g, or t
ngattttaacctgatatattaaacctcacggcttattgggcaaatatgtatcttggcatgagccttatgctgggccttggcagaaaatatgcatcactgaaaaggaatccttatgaccaggatttgatgagtggtagctctgcacttagaggaaataaattcctacattaagtacagttgctattgaagaaaatgtaaaatatattaaaggatagacatagaagtgtttggtttgatcagtgttgcccagtggatattggatctgaggatgcatggtgcttactgagacttgccaacccagaggtattcttatattcttccactttttaggttgtaacttacagagctcttactatgtgtgagaccttgtactaagtgttttacatgtataattttatttgtttttccaccctctttcccttgtttactttgctccaaatgagaacattgaccttccttctcttccgtcatttttcttcaccaaatgtactaaactcattccttcctcaggatttttgcacttgctatcctatgcccctggaaattcttctgccacatcattgaatggctggttacttcttaatagtcagatttcagctaaaatgtcacctccttagagaggccttcctaatcatctgcttaaaagtagttcctgcctgggcttcgcccccttcctcattttattttcttcttggaactttttaccatctg

SEQ ID NO: 46749 - DNA, 673 bp, Bovine  19866881751483
  misc_feature (1)..(1): n is a, c, g, or t
ntcctgctctctcttcccaacttactgacttagcttgtcaaggcagggcaagggcaagggcaatatgacgtgcagatcctggtgtttcctggaattttgaacaggagcagactcgttctccctgtgcgtggtgtgctctccaaagctgccagtggatcacagagcatcacagatccgtgctgggaactcctgctggcctgccctactggagaacaccccacagtttctctgttaccttgatgtagaattgaactgtggaggagttagacaacataagctaaaagtattctcaacttgcctttgatttaggtagggaaaagaaatttttttttaagataaaataaaacatactcccagaccatcaagaccacagttcttagaagatgtgggcaaactttcagctctgtcaagaaatagataagtgctctagtcgacaaaccattaaaggaaaatgaggacatatcaaaactcattccacgacatctgtcttagtccttctgggctgctataacggaatgctgcagattgagtggcttataaaaaatggaaatttatttctcatagttctggaggcactggcagagttagtgtctggtgaggaccagactcctggttcatagacaactgtcttcttgctgtgtccttacaaagggcaagggagctctccagggta

SEQ ID NO: 46750 - DNA, 745 bp, Bovine  19866881755412
  misc_feature (1)..(1): n is a, c, g, or t
nacttttcagcatgctgaactgtatctttaggtattaaaataatacgtttaattgcctaaagctgtttttatggttaaacatctttgttggcaattggcattatgggtgggagatatgtaatatacaggttaacctaggtgctcattcctgttgctcttgtgcatttcttgattaaatactggggattttatgagtcacagcccccctgcataaagaattctatggctttttctctacaagtctaatttgaaaaaagaattcttctcaagggtttagaaagtaattcataaaatgggaggaataataaatattatgccttaactcatatactagtatagagaggtttggttcacttgggtgtaattttagttaatttccacaagagacagattgaaagtttaccatttggaagtggtaagtgggagaaatggctaaatctcatatttgtaaaaatgattacattatcttaaatgaaaatgctactatattaacaacttcaacaagtactgcatttgggtaaaagaaatcttcttaataaaaagttgcctgaagttcactccaacttaaaatacacaagtgaggaaaaagtacttactctgatttatatgtcttttggaggtgtaattattggctttttactcacctatgtaaaacaatgtacttttgtaaatggatttctggccactttatgcagcctttttccttcattttttttttcttacataaaaagtaagcactgtcaat

SEQ ID NO: 46751 - DNA, 752 bp, Bovine  19866881758129
  misc_feature (1)..(1): n is a, c, g, or t
naagagatcgcatatactatcaatttgattttaaaaggcatatatcttttatactacctgtcatttttataatgccttttacaaatttaatcaatacattttaacattctatatactttaagtgcaatatacaataaatattcaagtttcatcttaaacatgctttagcctttaaattgttaaaactgcagtgccctttcaatctacttacataatgtcataaaatatacatttcaaggtaaatgaagtcagctacttcaatttagtccctcaaactggtagtaaatgagaggttaacactatggtgccaaacccattattgagtaaatttagcaccttggacagctctgtaaaatctttattgctttcctgacctgctcgtcatgttctgtctgtgtgttcagtggttctcagctctgattgaaaggcaatatattagatccccaacacaaacacgcttgggggctagttcactgggagcctaatgacatggaggtgagagcaattttctggtcaccgaaatccaagcaccttgcaggttcgctgcactaactcatagaggacccagacatttcctttctccttcccatttgtagaaataactaatagaagctgaatcacattggccaagctgagccaaaagctgtctcccccttaatccccaagttgataccacaatgaaggacactttaaaataggcaagatgctatttaagagagtcactttcaggacatgacattgggttcactgtc

SEQ ID NO: 46752 - DNA, 782 bp, Bovine  19866881934759
  misc_feature (1)..(1): n is a, c, g, or t
natgtgagtgatcacattttccccttctactcaaaaatccagtgcctctagacagatgttaaaactgcatatttaaacctgatagcactctctctcttgcttatgtcaacttcttctgaagccgatggcctctcgagagcttgtaggcacacacactgtgtgagaatctcctttgagactgcgtggaacagggtcaggcacagaattccaaactatcccctccagttacttatctagtcaaaatcccagtaacacgccgccatttacaaggttaaagtttactcatcctaaatgctgacttcatcccaatcctccaacacagcaggtctttgagatttcccattcgagattagcgcctctgttagtcgacccttactatttgtaacatagtagattgaaacaacgggttaagtgctttggaatcaagaataaaaggaaactgggagaaaggaaaagaaggttgagacctcaaaacacagttttctgttcgatgggaatttttgctctcattatctgggaagtgttcttacaatagaagttaatggcgaagatgcagcaaagctccgaggatgcatttgcctgatatttttttctttgctgttgtgtttttgtatgtagttataaatactgtagattttttgtgattttttgccaaagttgttgttctatttatacattttaatgtcttaagacggtttttcaatatcataaaaagattttactgcatattttgcaaaggaaaaaaaaagctcactacctttagcttgcacatacttgcaaaa

SEQ ID NO: 46753 - DNA, 780 bp, Bovine  19866881963161
  misc_feature (1)..(1): n is a, c, g, or t
nccttgaaaaacttatgtatgaaggatctttgacttcatcctaagcagaagaggaagcttttgaaaggttttaagtgtaaacacaatctgccttacctttctttttgtaaaaaattaccatatcaccatccctgctaacctcttagatccttgaaatgacacaataaatcaaaaaaaaaaaaaagtcatccctgcttcttttctaattagtcatcttgaaagcccacgtttcatttctgaactcccttcctggccaatggagcttctgccccctgactcatccttgcaaaacaaaactttgctcactctttacctgtccatcacttgggagagggagacccagagatgcttcctaaggcaaagcatgacatgtatgtatgagaacacttctcagagagtgaagaaaagaaaaatcgggtttcctctttttgctttaggctttttccatactgaaactcagcatcaaaaccatttcaaactgggatgaaaccatatggtttccagaatcacacattgttttacaaggttcagtgactaaaaccaccttactctgttagtagaaatgaaccagacttttcccatttgttacttggggtctttacatggaggctaattaattcatttgtaacctgcatggacaacatgtaaggtgtcacagatgatctggaacatatataacatcaaagacaacattctttctttctgcctgaaatcattctgagtcctgtttttctcaaaaaggagcgtttataaatctccaggcagtaggaatttgtgttg

SEQ ID NO: 46754 - DNA, 1023 bp, Bovine  19866881998475
  misc_feature (1)..(1): n is a, c, g, or t
ntccacaagtgtgtcctctactatctgcatctctgttcctgccctggaactaggttcatccactgtttttctatttatagattccacatacatgtgttagtatatgatatttgtttttctgtttctgacttacttcactctgtatgacagattctaggtccaaattatttaacttctctgagcccagttcttcctctgcaaaatagtatataataaagagttgcctcaaatgaaacaatgcatgtaaaatatttatcacagagtatgctgctacaaatgagctctcacagagggcaagcaagtaaatgggaaattagaattaggtgtgatacatagctggggatggtagaattcacacggaactttgcagtccaaaggaggaacatgaaacacagattggtcagagaaggcaatttggaagagacaaaacaacaaagcagtgctaggttgagatctaaagtctgtctccaagagagacatgttcagggggatttgggaaggaaggaatgtggtggttgggtctttttcaggaaaaaggaacagaatatgtgaaggcccctagagaggcaggagagcatgccttgcttgagaaactgagacaaatttattgtgactgtagtggaaagggtaagaaagggattaggtagggtgtaggtagactggatagtaaacagagtggaaagcagcctggagtggtttagaattcattgacctttcccatgaaaaccactcatctggggaacgcctaattttgcaccctcaagccatccttctgcgagtatacgtaaattcaatccaaccaaactacacatttctggaggatagggaattatctcatacctctcaagggcactgtcttgcctatgtagcttctccacaaatatttatcaattgcacttggtgttaagtaaagtttaatggagcatgcacttttatctggagtacgttgtgaagtagcaaatagctttccatttgggtaaggacccttaggccccacccaacacgtgtatggaaagttgttcc

SEQ ID NO: 46755 - DNA, 1622 bp, Bovine  19866882081422
  misc_feature (1)..(1): n is a, c, g, or t
nctcccatagagtccataagactgttctatacatcaggtgtctcttactttatttagaagaaaatgcaatatataatttttggcttcattttgtatacatatcaatttttatgcatatttaatttatatttacattacttctacatgacatttggaatttttgacaatatatttcttttgaaaattcccctctcctttgttttacatgaacttattttcctttcttaggcttttttcttctggatcatcatcttttataaagtttatttattttaattggaggataattgttttacaatattgtgttggtatctgccacattaacatgaatcagccataggtatatatatgtcccctccctcctgaacttctctcccacctgccacccaatcccatccctctagcctgtcacaaagcactgggtatggattccctgtgtcatacagggaattcccactggctataaagctgaaaccccagtactttggccacctcatgcgaagagttgactcattggaaaagactctgatgctgggagggattgggggcaggaggagaaggggacgatagagaatgagatggctggatggcatcactgactcaatggacgtgggtctgagtaaactccgggagttggagatggacagggaggcctggcgtgctgcgattcatggggtcgcaaagagtcgacacgactgagcgactgatctgatctgatctgatctctgtgcttagaattgggtcagatctgagaatgatattgatggaaacacagaacacaccagagcaattaaagaacagaggacagtgtgtggtcaggtatcacacaggagagtacagatgacagaccaagtcaggcaaggttaaatgaactagaatcatgataatgagatcagtgataaagagaggattaaatctgagctagcctttaggagccagccataatggccattaaaaattctccaaaggatttccctgtctcccccctcaaaaataagctaaatattaatagtatataaataattcaatttttaaaataaacatatgacacacctgttacttttaaaagggtggggggagaggtgttagcaaatcaaaccattaggtgtcacaaatccaagaaggttggaaatcaccacattcaagtcccccttggatttggagagatttatgcttcttaagggcgtccagacattagcagttcaaacccctacactgtatcctggcttcatttaaaagacccaaaggtcagaccaaaacacaacagggctttatatgccaattttccttgactctctgtgggtcaggggaagttaagctcatgtaattaggggataaagacggaggctgtgaggggggatggaagcatgatgaaagttccagagtttaaagtctcagtaggaagccagaggaaaagtctgataaagtcatgtctttatgaaacatgtgttttccatggtagagtaaacgtattttccatttcactcagggaatctctctgcaacttggcactcacacctacctctgggacaaggacaattcaaattcatcacgatgggggccttcccaggggcacagaggtaaagaacctgcctgcaatgcaggagacagggctgatccct

SEQ ID NO: 46756 - DNA, 742 bp, Bovine  19866880507774
  misc_feature (1)..(1): n is a, c, g, or t
ntttgtgtctgaataaagatccattttagtaatgacaaaggaaaaagataaaaacttctccagatgaaacataaaaaagaaaaatctctataggatccattccagaataaatcttattttacatttgagataaatggttaagagagaaacaccacattaatatctccaagttagcaaatcatactaagcttttactaaaaatagtagtgaaatactaaatcaatatgcacaaactataggaaaaactcaagaacctagagcttggcaggaaaatgtcataggatgttcaaatgagcaagcttaagataatgcatttagagataaattattttggacaggaggctggactctactcttattattcaattggttcacacaggtgttatcatattcctgtctttattctaaatggtttgttgagactacaatcagaacagatgattctctgaggacatcaacccaatatgctgcagtggcccaaacaggcagggcataatctgagtattaaaaaaaaaaagaaacaaacaaacaaaatggaaaatactacccttcctacataactcttacatggaaaaatttaagtggaattctataattagttctagttacagtgcttctggaaagttacagtaaatctcagtgaaacttttaacataatccatgattgggatgtgacaatagtgataagagtaccgggtagtactgggctaccctgatggctcaatggtaaagaatccacctg

SEQ ID NO: 46757 - DNA, 2923 bp, Bovine  19866880523597
  misc_feature (1)..(1): n is a, c, g, or t
ntgtgtttttcctcatgtcatttcttctgtacctcattacccagaaaactattattcagatgttaagacccatgctttcctcctccaggaagacttctcaattatcctattttaaatcaccatcctccttgttgcttacctccatagctgggcttaattaacgcatagcttactcgtatgcattttcctttcctgtagattgaaactgatttttgctcatcgtggattcacaatgcttatctctagctttccataaatggtaattgaatacattaagtctcctagatacgaaccttcaagttatgaattttcaaaggtgtgaacatgcccagctattgtactgcactactgtactttttaaggtactgtaagattaaaattttttctttattttttgtatttgttttttgcttttaatgtattatttgtgtggaaactattgcaaacctattacagtatagtaccaaatagacaattttgttagctggtccctagcctaactttgttggacttacaaaggaattggacttatgaacatactctcagaactgacctcattcatgtgtaggggacttactgtacatgttgtattcaattaataacaatgcaaatagaataaagtaaatggtttaaaaagaagttaaaagcagagaatcatctagagtaaaggagggtaagagaagacataatttacttagatgataatttcctgaggtagtaatattttagctgagtgttgaattcagaagattttatgataataaaatatatcacaaggctttaatctttaacacaatttaattggatgacacaatcgtctattcatttaggaaactaagaatctgcagaaatttcagcaacattttaccagaattattaaccatgaattttgcattttaggaataaagaaatagttaaaaaaacaaaacctctaagcaaacaaagtatttatatgaactaggctttcacgggtgcattttagaaatagtcttattcttggtcttagcagaatgaggaacaagtttactaaaaatagtcttgaagcagcttgggcaagggaatgatttttcacctcaattaaaccaagctcatgctgatgagaagttaaagattatattagaaaactaactctgatgaaacagaaaaaaacattaaaaagatccccatatcagcttgcattatcaagtaaatgaagaaagatgtaatttaataagaaacaataataaggtagtctcagacattctaaaaaaattaatatgtcctagggagataaagaaaacaagactctttaagacattttgattcagtgagaatacaaatgaaatagttttagaaagttgtgacagaacatcttaagagggtagatcaaggacaaagactttttctgaagtagcaaattttaaatatttcccattatcaaagaagagctataataattctctatatatgtatgttacgtgtgtgtgtgtgtgtatcctttccttctgctatactaccttgagcttaagtcttagatcttaaaagaaaaactgtgaccgactagtagataattggataggcgtctacaaaaggaaactctagtgctttaggaaatgtagtgagtgactaagtggatctgccttctttccttggatgtcaaattgaatgaatgcatgccatgacaaagtctttatttaagacatgtatgaagaatgtcttcctataaattctacactatacattgtattttatttctattttcccaatgtacgaaatatgatgattagatcataaagttcaatagtaaaatatccataaaaagctttgtacaagaaagtccaaagctttatccatacaatccacaaactagaaacatacaagacattcctcgatggaagaatagataaacagaatacagtgtattcacacaatggaaaaggaactcattactaagacatgcatggatatgatggcctgaagtgaaagaaagacacagaagaatatatagtgtgtgattctacttaaataaaattctaaaagtggcaaaactaaactgtggtgataaaaattagattgcttctgaggatagtgcattaagaattaaaagatgaaacaaatactctcaatgaccccctggaggactttgtgttttcctttcctgcaactctggattctgtagggttggagctcctggttgcaaagggctacacttttgttaaacgacccctgcaagggtctcattgaactacaagctacaccagctgccaagagactctgcacttcttgtgtctagaggatgaccagatgaaaagctaagtctccaaaccagcatggacttttgaccctgagcagcatgaggaagtacaactgttctcgtaccatgcagccaggaaggagtatgtgtgaaacctgggtctttcactcaggagccttctagtactctcccgaaaaagacacatccagcaaccccagtctgagaactatgaccaaggattcagacccttcagaaactaagcttcggttcacaccatcagataagcccccgaccctatctggattgcaaagataatcaaagattggattattgctgccaggtcactcatatggccaagaagtagaaggaggcaagttctacccaaatctcaaggaatttacttctctgtcagtttggctcacagggctgcagcccactgaccttactagttcaactcactagttcaacactagttcaacacacttctatcttaaggcttactgtactctgctttccagtgaatctgcacaggattctcatttctttcactcaggctaaaactcacctctccacgtttttcctgaacacatgatctaaaatagcagctgctttgaatcttccactctttaaagatgcttttcctccttagtgctcatcactgtctgacatcaaattatattggggagggga

SEQ ID NO: 46758 - DNA, 1689 bp, Bovine  19866880645701
  misc_feature (1)..(1): n is a, c, g, or t
ntacttacttctgtagtactcaccatatcaccctttctctcactttcccaacccctggactcataggtagtatcggatttaatcaggtgggatgttgtcaatcatagtagttcagcaacccctcacaccgctgttcagagtgtttccaacatgcacagtgggattacacattttaaaatcattttgatgagtgaaaaattttcacttcatttctgcgatactgtaaccaccctacgtatatttgtgtggtggggttgttactttctttttagtatcttccgcgaccctgtactccccttgaaggcttttagattgcccattacagatactctgtaaatggctgctgtgatcctaaataactactgaccagaaggtcagtaaacacctattagtcctacagataggatattaacccttaggtcaggtaaaaatagtatggatatagctgaatgaagctaggggatcagaggaacagctttggaggccagacaatttactaagtttctgactctaggtcacttcaagaaattttcagggaattactcagtagtaaaaatttagataaattcctttgtgtgatcaagagaatgaagggcctggatgtttgaatgcagatcccaaggtcaccacataggggatatgttgagcagagcaacgtattagaaagagtgctatggactctgcttattaaaatgaagtctgctggtcatctctcagatgacctaccttcaggtctttaaaactgtatttgaagctgtaatgtaataatatgtatatatgggtgcatgcatatggggtatagttaaagctgaaaaggaaaaggaagactttgaggcaggcttaaatgtgcacagaactcatactattgtagaataaatcactttgatcttcaaattgatatgtgtctgtaaaggtcaatggggccactgagggctacataataaaggattaggcatcaattcaaggatccatatagtccttgtatactgttgctattgtagcaagttaatactctgggaggcatattaacacttttgggccacatgggtgttattaactaaattatgttaaaatataacaaattgtactcaagtgacctgaaagcattaatgccaaataagtctctgttgcttagcattttaaagaataattcatatattagaattggcataattcacttgagttatataagctgtcacacagttcaaagttacaatagtggttagtaaatgagttttactttgattataatgagcagtttttaactctgcttttatgtggcttctgtaccatttttgaaaatacgtttgttgaaaatgttatacttgattaaattcaaataattctttttatttcacctgctaatatctctttttcagtcattactgagttttgaaagcagagaggttttccttttttcatgtagtctgggccagatttgggatcgggagttgataagcatataaaagaataattataataccttaagtgtcagaatgacacatacaaaagatactagatcatcacaaataaatattgtgtaaaaaaccctagaagtcttgtagaaggatttcaaagaaaagcaataacattatctgaattgtgaagaacatagagaagaacgaggagtgttgaaggtagaggaaagtgccagttaagacatgaaggggacagattggaaggcctcta

SEQ ID NO: 46759 - DNA, 1274 bp, Bovine  19866880685222
  misc_feature (1)..(1): n is a, c, g, or t
ntgacattacagagcattttacatcaatgctttgaggaacctgaattgtccaggatattttctcaattgttcccttcatgtcttgtttgtagacttagactagatctagcataatatctgaaaacaaatccccatcatagatagccccaagggactgccattgagctccattgtccttaatgctaatccccattgacaggccatctgccctctcaccacttgtctcagccattttgctggacttggcaaacttctcttacaaaccagctctgaaagaagtgaagctgcacagacagccaggcctccaatcaaatcagtgcagtctagtgaacattcggtacttgccagagtcgcagtgccacttgctgctaatgcatcttccacttttgcatataaactgagttagtggttcacaagttgggaattctgtgaaagatataaaaacatccaataggaaagatgttactgattatgtttgacatctcttcatttttcttgcagtataatgaatctaaacagtccttcatcaagtgattttcctttattttagtcccagaaatatactcctacaaaagttatttaaagtatgcataccctgtgtccaaaaaatgctgaactttgcaaacttctgacttcactcagttctatcattatattaatatgttattgtgtttgacttcatttgtttcctatttgctaatgtaatcagagctctgcccctctcttccacacagtccatagaggaaacattagataagcaaataaagtgacagtaactatttgaggacacaggatatgcataattttagtatcttttataggaatacatttcagtgactaaaagccaaagaaaatcacatgatgaacgactgtttagattcattatgcggcaagaaaaatgaaaagatgtcaattcccccacatcaaggaactcaaccttctctcagtgaagaacaactgcatagagctctatactattgcactgaaaagtgacatatgtgttttaaagcaggcttccctggtagctcagctggtaaagaatctgcccgcaatgcaggagactctggtttgatttttgggttgggaagatcctctggaaaagggataagttacaagtctttttctgaacatagggagctgaagcagaaaagttaaatccaactttgcctgaatgatgtcaatatcttaagctgagagtaaggaaacaaacacaaacaaaaaactcagtttagttgctatcatacatgttaggtagttagaataggaataaggag

SEQ ID NO: 46760 - DNA, 1925 bp, Bovine  19866880725702
  misc_feature (1)..(1): n is a, c, g, or t
ntttgcagtaattttggagtacaagaaaagaaatactgtcactgtttccattttatccccatctgtttgccatgaagtgatgggaccagatgccatgatcttagttttttgaatgttgagttttaagccagcttttacactcttcactttcactttcatcaagaggctctttagttcctctttgctttctgccattagggtggtgtcatctgcatatctgaggttattgatatttctcctggcaatcttcattccagcttgagcttcatccagtctggcatctctcatgacatattctacatataattaaataagcagggtgatagtagatagccttgatgtactcctttcccaatttggaaccagtccattgttcatgttcagttctaactgttgcttcttgacttgcatacaggtttctcaggaggcaggtaaggcggtctggtattcccatctctttaagaattttccagtttgttgtgatccacacagtcaagggctttagcatagtcaatgaagcttaaatagatgttcttctggaatccctttgctttttctatgatccaatgtgtgtgcttagttgctcagtcatgtccagctctttttgacctcatagagtatacagtccatggagttctccaggccagaatactggagtgggtagcctttcccttctccaggttatcttcctaactgagggattgaacccgggtctcccacattgcaggcaaattctttaccaattgagccacaagggaagccctctatgatccaatggatgttggcaatttgatctctggttctgccttttctatctccagctgtacatctggaaattctcagttcatgtactcccaagcctagcttgaaggattttgagcattaccttgatagcatgtgaaatgagtgtaactgtgcagtggtttgaacactctttggcactgcctttctttgggattggaatgaaaactgaccttttccagtcctgtggccactgctgagttccaaacttggtggcatattgagtgcagcactttcacagcatcatctcttaggatttgaaaatgctcaactggaattctttctctccactagctttgttcatagtgatgcttcctaaggcccacttaacttcacactccaggatttctggctctaggtgagtgatatagtaaatcaactatttgtcaataaaaaaggcaaaatgtaaaataaaaataaatcaaagttactactctaacatttctgttgtaaatacctttgcaaactaaagtatttgctgttacgtttctgaaattattagcgtttagcaattttctctccatgccagggtttgcattaattttctatcagtgtgtgtgtttaatcactaagtcatgtccaattcttatggacaccccatggactgtaacccatcaggcttctctgtctatgtgtattttttcagggaacaatactggagtgagttgccatttcctcctccagagcttcttcttgacccagggattgaacctgtgactcctgttcagtttcctgcattggtaggagtattctttatcgcagagccaccagggaagttcttttttatctttatatgtgcacaattttctaaatttctcccagcagaaatggagttacctctgagaattgatattttagacctatgtctatgtttcacaagttttactttaaaacagacattccctgacaagataaaaatattttgctatagggaatattgtacaattttcagaatctttcctttctgagtcttctatttgtatctattccagtgcaaaagatattattctaaaattctgtttttattaatatcaacagagaattagataagttctaagactttttccaatacctcaaattcactcttgttctctatcatttataaaaattcattttcttctaat

SEQ ID NO: 46761 - DNA, 3180 bp, Bovine  19866880831913
  misc_feature (1)..(1): n is a, c, g, or t
ngtttctgctgcattttgtgctgtctgcttgcgtatactcgtctattgggcttcccaggtggtgctggtggtaaagaacccgtctgccaatgcagaagatgtaagagacgcaggttagatccctggatcgggaagatcccctggaggagagcacagccacccattccagtatttttgcctggagaatcccatagacagaggagcctggtgggctaccacagtccttagggttgcaaagagtctgacacaactgaagcaacttagcacagcacagcacccaatctactgcttgtagaaaaaccatacagggaaagtaagtcatattaattatgttggaggtaattagaattcatttatctctactaatgcaggaaatatagtttaactttataatttgctatcagtttttaggatttatttcaggaatattcgattaaacagacactaatactctttgaagttcccagtgttttgtttctttattattcctagaatgtaaccatttttacagaatatttatattttctctatctacctattaatgacttttaatttaactttttaaatgatagcagccttctccaaagttaactttgtttttcttgggtgcagtctaatttcactagtcagtagctaaggtagaatgccatgttagaggaaataacaagaaaataagagtctaaaaataccactcagtttaaagaattattatctttaagaagagtgctgacttactgcccacaatcaccttagattatgaactgaataaaattcatccatttactgagagtccattggcattcctaacttgttttgtctattttaaacacatactgtttaatttctcatttccagtgaaaaataattgctatgatagaaaatgtcatattttgattttataatcatcatacctttgaggaaaagttgataatatttatagtaaatatggtttattatgcaaaaaaacaaatagtgtatgagcacaattcttatttaggtatgttcatttgaagaaatagtagtgagtattttctgcctctctctagaaacaaaaactgtggttcagctgtcttccattctcttacaaggtaattgctttatctaattatatttgctattcttatttctgttatgggtgttaataaggttagcaatgtcatgtaaaatgaaattgcctaatcttttttctcaagagttatgataacaaatggttttctctcctttgccctcaagtagatgttagtaaataacctttcacccttgttgccattaacattcataaactgctctgggtgaactaattcagatgtggaccccgatattccagaaacatcatcatttcccaaagatagatttgacaagaagaagccaagagttacttttcaatctctctgctggaccacagaatttcaatatgaatgcacaatggatacaagatacttctgtaaagatttgtcagctctgaagaatccagtatcactctgcagttccacgtgaatacaactgtgcttgttttaacactacagttttctgtctgattcatcccctctcatcaatagtgagacgcaggtggcttagtagggacagatgtatttaatctattttgctgcaaggacaggaatctactgtctacaaataagccttgctgttttgactagaggcattggtttactattggcctgtagtgacctgtgaaagcaacatgagtgattctaatgcatggctaacactccaggcttacagatggcgtcggatccagacaattacagctgaaaccacaaaggcaaactgaaatggagagtttaagcaattgcttgagaaattccgggaaatgttaggtaatgaaaaaacattggaatttgtggcccaaattattgaaattaactgtctactggccaattacatcactcccttgtttgcctcagcacattcttaaagtcttttactattttgctaagaaatgcccttttggattatgtgccaacacacaaagtgagaaaatatgtatatgttcttgcattaggtgtagtagttctcctggttaaaaaaattatgtcaaagtgtttgtattagaaaaaagtttccaagtgtacatgaatccaagaatcacacttgtttgtattaaaataagaacaggcaaaagagaagatccttctggtatacaaagactgaaagaagacaaaagatgtaactgaaaaatactttcagcttatgattcttatttttataatgtagacatatccaactctactgattttctaagatgaaagatatgagatgaatatacagatgaggagaaaaaaaaactgaacacatcgtaagagtttaccaatttttagttttccaaaatgcttctctcctgtctttcttactcacaactagtcttgatgttaaagagaaattaaccctttttatgttgctggataattttcatgacaatattagaaaacttgaaccgttatttacagtagaaacagtttgggaaacttagctgttaataagtatatactgtaatggtactaattaaagattgtaatgcctttgggaggtataaacatcacacaaggctgcaatgttacatttttaattaacagttcagaaatgactacaaataaattgtgtgagacattctttctcatttacatactctgaccaactgtgagtgggttcactactaagctactgtctgtacactggtttattttggctttaattaattttgctattgattgaattcttaaaatcataactcctaagttttcagatatcattgtgtataggtatttctccagtttacccaacatcttccagccataatcagaggatacaacatttatcactcttcgggttattattacctatcacatggtgctataggtagaatggtaaacagctcttcttagaatagagagataagccaacagggtctctaataatggagaagagtacaacgtcaaacatatgctaaaacaattccaaagtccatgtgtgccattttgaacagttatgtgtcccatcacatcttaattctctttacttactcacacatctgttgtcttccagcaatattcgatcccctctgcaggaacaattcactctgccattaggagttaaaaggcacaagtcatggcaacctccattcaataatgcacatggagaaagttcacctgcaatgaagag

SEQ ID NO: 46762 - DNA, 1174 bp, Bovine  19866880837346
  misc_feature (1)..(1): n is a, c, g, or t
nttgtacatattgaatggtttatttgttatgtatataaaatatatattgagtgaatcagtaacatgtctcccaaatctaacttctcctttaatttcactttcatgtgaccaaatcgaaaaggttcaaaaaaataagttgtaagaattattttaaaaactactagtatctccaggaagaaaatatgactgcctagattggtgaaagacagttgtttctaaacatttaaagctacttcatttggattatcaattaccatcttatttctcagtcatagagttgttatgagaagaaactgctttcaatgcaatgttttcaatatgggaagacagcagggtgacaaattgaaaccccctgctgatctttgcaacataaacatgcccattcctgatatacatttaaattaggaagacaggatggcaagtgaatgttgaaaagtcccccaggtaattcagatttgcttatctgattgaggatcagtgctaacagagtgagatttagtatgatatctattactggaagaaattataaagaaaatctattaaacagatgtagttttaatttaaaaatgaatttacctgctacctattatatctttagtgctttctataataaaattctttccttacaaagttattttcacatcattcctcctttttatctattttttaagctagtcataaatacagtgtcactttcagtattagattctcaattagtgctttaatttccataatatttttattatttagctagagatgtaaaaaaaaattcattctttctgctaaggaagttttgatgcatttaaaactccttttctgctttcttattatcacttcaatttattttcaatgtacgtataacaaatatagcattgatttaagtgttgagaactttaattctgtatgaccttgaagactagtgtctgagtttcactctaaattgaggggtatgactagataattactaagatatctaaaactataaaatggcacaaagctatttgcagctaattttctggctcccttgaaagtggttcaacagattctgtgttaagagcattccaaaatatcatggtcaattagaaagaaaatgagccaaagaaaaaactcatggcttccttccatagttacattttcatctggagacacattgccattcacaggggaaatgaat

SEQ ID NO: 46763 - DNA, 2229 bp, Bovine  19866880855240
  misc_feature (1)..(1): n is a, c, g, or t
ncaagcaagaacactggagtgggttgccatttccttctccaatgcatgaaagtgaaaagtgaaagtggttgctcagtcgtgtccgactcttagtgaccccatggactgcagcctaccaggctcctctgcccatgggattttccaggcaagagtactggagtggggtgccattgctttctctgaagtatggtatagaggggtaaattaaactgtgttcaaaaagtcctagcatgtgcttccacttagtttgtcataatttgaaaagaatatatactcagattatatttgtttagaaaatatttatttatagaatatgcattttaataaattaaaattagaggaaatattttaaacacagtttaaaaaatgttttagtattctccaaggttttataagcaacacctacaaaaaaatagtgtgtgtaaagtaagtcttaaggaaatagctcaaatatctctgctagtattgtgttagattaatgttgagttattgattagatataaaaatattatatggtaccacctttttaagactttctcatttactctgactatacgctcagaatattttcttacgtttacctatcaaatattcattgaaggcataatatgcttatgattctgtgataagtctgaattaaaaattcctgaaggaatttgatttactaacataaacattttttttttaatggcagtaacaaatagtacactatatgccattaaaaatcatacaaatactacaatgataattgggataatcaagagatatttatttaatatatttgaactgggttttggagaataaattaatatttgggcagaagtgggtggtgagtcctgggtgatgagtcctggcttactgaagagacagacacatatgtcatatctgggaaaaagcaacaagtctaaaacttgaacaaagcagttataggatataaggcttaaagatgctttggcatagattgtggaggactctaaatctgggttaaatatttgaacttctttttttatttagaacatttaaaaaagttatgctaggaattgagataatcagctctgcaccaggaagattaagctgctggtagtatctattaaagtattgacatttcccacaagcctttattttgaatggatgagtcaacacttccattagaaacatgccaaaatgaaacacataattactttttttctcctctgttaatatcaggggatgctttaaaagattcactgtggctttctgtctaatggcacactggatggatcttaacccattgcacaattatgtgaatgtgccaaaatcttttgtgaacccaaaggaagagtagcccaacttgttaaggcagaatttgcaatattattgtttgtgaaaatacggctgaattttgaaccaaatgtcacatgcaaattttgacttggccaaaaatgtcagtagtacaaattccagctgatgcgataagcatcctaccatatgccaagtggcaaagttttactgctggtttagtcactcagtgctcacatggaattacctttcttctgctgtgtccaactgctgattacctcgtggtcctctcccactgctgtgtccatctgttggcacatacagatgccttcctaatgccccatgcacctgtttataccattcctcccagaatgcaatgcatctcatcattaccaaccaaactgtaaattaaatatgcatgttcatcttttggggaagcggtagaggtttgtttgttttttttttttttttttctccttttagtggaaccaaaataagtttaaatattgatcaagtagatcttgcaaacaattctcttaaagaagggtttttcacagcgtgattataaaatgctcaacaaagaactcatgaaaagttagagaaggtccatattcagttaaaaggttacacttctttgttcttagattataaaaaggtactttaagcaccctacacacaatttacagaatagatttggctccttgaagccattaaatcttcatctcaatatgtttcagtttggtaggatgagtaaatatgtctgaaaaaataccccttcccaggtcagacacttttgtgaagatgtgagggtggcagaataagtgaaaggataaagtgcttgggttctgtccttgtttttactgacctaaaagggacaactgagtaatgtagtggaatgaaatgaaaccctgtatacaggacagcaaaagagacactgatgtatagaacagt

SEQ ID NO: 46764 - DNA, 1998 bp, Bovine  19866880918169
  misc_feature (1)..(1): n is a, c, g, or t
ntctatatccctattagtaaacgtatttgtttgctagggctgccctaacaaagtctcatagactggatttcttgacagaaattcattgtctcactgttctggaatcttgaagtctgaaaaccaggagtcaacatagttgatttcttctgaggcttctctccatggcttgtggatggctatcctttcctcattgagtcttccatctgtgtgtttctgtggcctaattttctttttataagaacatgtgtcatgtaggattaagatccaccctattatgtgaaagtgttcattgctcaatcctgtctgactctttgtgacccccatggactgtagcacaccagactcttctcttctgttcatgggattccccaagcaagaatactggagtgggtagccatttccttttccaggggatcttcccaacccagggattgcacccaggtctctgtcactacaggcagacttttaccatctgagccaccagggaagcctaattacttctttaatgattttatgttcaaatacagtcccagtctgagatactgacagttagaattttaacatatgaattttgtggtgcagagttcagcttataatagtgaaatagagatattcataattgcttccaacataagaaagtagtttttgaattttggtaatttctgaagattctagtatatttatatgaataacagtgtaaggaaaaaaaagtgatagaaatatgattctaaataattacagagtcaaaaccaaagttctttatattagaggagttgtcaaaaaaagaaaaatatttaaaaagagaacattttaagaggaggaagtggaggagatggctttatttaaatgttttctaagaagtaaattattctgggagatatttttagggatattatttccccagccatttcacagatatttagggaatttctacatcacactcagttcaaaagaatacaaagcgctgtgaagaatacaaagaaatacaagacaggatccttattctcagattttcatctctggataaagagtcaaaattagtacaagtgaaaagaaaagaaaaagcagcaatttcatacaaaaccatatgatgctgtctgcagaggctttggaatcaatgagaaagaagagtcaatgtgggatgtgctagtctgaattattgcactgagcgtaggtttagacttgtgcaatgaagggtaagtagagtggagtgatgtgcagacaaaaataggaaaaccagaaagtgaaactatgcctattttctttataggactcatgacagcctttagttatttcttatcttttttactgtggtaagaacccttaccataagatctaccctcttaacaaatttttaagtgcacaataaagtattgttagctgtaggcacaatattgtataaaagatctttagaacctattcatcttgtgtaactgaaacattttatacctgctggacagcaactctctcatcccccagccccatccccagtcctggcaaccactagtctactctgttactatgagtttggctgttttagataccgcatatgagtggaatcatacaatatttatccttctgtgactggctaatcttatttactataatgtcctcaaatttcatccatcttgttgcatggggtgaaattctatttttaaaaagactttattttgttagaacagttttaggttcacagcaaaattgacaagaaaatacagagatttcctatattctccttatccctacccacatgtagccttgcctgttatcagcatcccccatgagattattatcctttttaaaagccgaataatattccattgtatatgcacaccagatgttatcaatccattcatcttttggtggactttaaggttgtttccatacatttatgcttgcttttatgaataaggccgcagtgaacattgggagtgttaatatctcttcaagattttgacttcagttattttgtatatatacccagaaatggtattgcta

SEQ ID NO: 46765 - DNA, 1836 bp, Bovine  19866880952210
  misc_feature (1)..(1): n is a, c, g, or t
nctgttgctctgagatgcagtcactaaaatgcagtctaaaaatgcagtctaaaaatctaagctttactcagttgatagaccactaagggtcagatgagaaattgctacactataagggggcttcccaggtggttcagccagtaaagaatttgtctgcaatgcaggtgactggggtttgatccctgggttgggaagataccctggcaaagggaatggcaacccacgccagtattcttgcctggagaatttcatggacagaggagcctggtgggctacagtgcatggagttagttgcaaagcgttggacatgattgagcaactaacactttgacatacacacttttatcccccttataacttctacttatttggaaaagcaggtgaaggggccatagtggaccatgatcacttagaaccaactattcattaacttcactgctgaagtctccagaactgatttgtaccagtttgaccttccaagccagtctgtatgacaggcattctatcaatccaggatattttgttaaatttttttgtttcatttggaatacatgtatttttgtaatagatatttcttccctcttgagacagaattaaaatctgtttctggtaactagattctatgtagaatagggcccaggaagtattaatctcagtagacattgtcacaaatatatccttattattatgctcatgtcttggttttcagttttgtcaaaaaaaatctatcattttaaatatgtaaatatatagtatataaataatttataaagtgtataaacattaaaatgatattatagggacttccctggtggttcagtggctaaacctcctgctctcaattcaggaagaccaagctcaatccctggtcatgggactcgaacccacatgactcaactaagacctggtgcagccaaatacataaactactaaaaattgatattttattgacctagaaatcaatgtttatgacaaattaaaactgaaaaaagtttatatataatttgtaaaaaagatcataaattttaacttttctaaataaagttttaaaatacagtttgctaacaaatattactgatatctttaaatgatcctattctgctcatttttaaattattcagcattaatgttaaatttttacttcaattaatttaaatcatttttacagtgtgcttcttgagcaatgttttcttcttttaatatcatttgagattcagtgaactagtatttcattctggtttgaacacactgtatattaaaaggttccaatatttcaaaaattgcttcaaatggttgttctatcctggataatttattgctctgtctttattattaaaatatgaatgttgttgttgtagttactatgcaactcttgacactgccaaataattaatattgtaaaatttactgactagaaatatatatatgtgggtgtaaacataaatatattactgggaaaaggttaaaaaataaatactgtcaaaaataaatgatctttggtgctcccatttgccatgatcctgtctttcccaaataatttaatatgatatatctatttatttgaaaataaaagcacataaaacctctacattatagcacatttcagagggaagcattgcccatttaaataacgttaccaaaatattatatcattgcaactcaagactttcaattgaattggatgggatagctgccagttggagcaatactcttgaatcagaaaggtaaaaataaaattgtggtttgtaagagagaagcatcatcttagtactcctttactttgtaactcattaaattttgtaacattaaatcatagtttcaactgtattcataaaa

SEQ ID NO: 46766 - DNA, 589 bp, Bovine  19866880965481
  misc_feature (1)..(1): n is a, c, g, or t
nccttcagaatagactggttggatctcctgcagtccaagggactctcaagagtcttctccaacaccacagtttaaaagcatcaaatttcctccagctattcattacatattcactataaggcactgtagttgtgataagagacaatatggtccatgaagctccaaatatttactatccggcccttcaagaaaaagcaaagagcctcaggatcattgtcattcaagcatgcactggtgcatggtgcagagatgctgtggtagattcctccaggtacacccagatctacccttctgaactcattttttcagttgccaagggctactgtcttcataacataaggtaatggtgctgaactttcaccatcctacacgctctaaatatcttctgtaaatgttctccagtggcagcataaagattctcccattaatatttacttggatttcagaaaaatgtgactgagaatgagcctgacaatgaagagaactccattcttctctcttcaaagcttctgaggttggtttgagggcccaaatacagaagataatctcattattttgcaatgttcttttatcctaggacaactaatca

SEQ ID NO: 46767 - DNA, 1906 bp, Bovine  19866881025029
  misc_feature (1)..(1): n is a, c, g, or t
nttgacatgattcatgtctttcctgacagaggacagcccaagaagctataatgaaaacagaaaatgactaagaaaatttttgtaacagtatcttatcaaatttaacatgaacatatttgaatttaattttgcttcaaaatcgagaggaaggataaatctctctccacacccacccccccatctctatctcattcttgtctctttttcctctctcacttcagttggtccactggtacatatgaactagaactttttgcttttaactaatctagagtggaaaaagaaaaggtatacaaaagatatttttcctctttttctttgtatatttgagacattcatctgtggcgtggttaacatttcattactaaattggactttgaatgcatactacattttccctcacctcacagatgtctctttaggctcctcatgagttatacatctgtggcctgctggcactgccccatgatgtgctgtgaaagaaattgccatgatgttaatttgctttcatctcagaagtgagatctcatccctcttttctgtgtgtatgtatctctaagttaaaatgatcattgcacgttaaaacattttggagagattgctttaattttatgagtatccaaagcgagtggtacagtcccttataggctctctagacagttatttgggtttggattatagaatcagtgcctagttaatgttaatgacctttatctttaggtcattttgctaatatattattgtaaaggaaatactgtcaacgtgaataccatgcgtttcttatatgattaaagtaatgcactaaggaaatgattcagataatccacatgattcttggccatgtttcaaggaaagaatgagaagaacttcctgaactaatttacatttaactgattgtaaattgtactaagattctcttgtcaaaaattctacttggtgaatacaggttgtaggcattgaagacaggcagcattctggaatgactttcatgtaagacaatctagagtattgcaaagggcatttaaatatttttatccatcattattttatgtattttgatatggaagttgtaaaatagccatgacatatagaattgttagcattgatcaggaaggccattttgcacatggaaggatttgtgaggccattgccaagctaaaatagaaatttgatgcagttagtcatataattcagtcccagaacctgctgggaagaaaagagcaggggattctggcttgagtttcagtactggctgtcaaaactgatcaaatccaccatataattgctgagcacttcactttacactgcctgtgtaagcagagcaattggtacagtttctctcaactcaaactgttttcaaaaggacagaaaatactcttgaattagactttaatagtgaaggagcaggagataccaagagatgaacatttcatatataatctctatttcagcaaattcctgagtttaaattaaattcatattctctctgataccactttcaagaaaataatttctatagtgatggttattttttatcattagtatgattaatatatggaaaagtgttaatgtctggtcctctctgagattaatgttcactcatctctttctttcttcatattgtgctgctcttttcctctcttccaaactccctggggggcttcatagatagtgctagtggtaaagaatttgcctgccaatgcaggagacatgggtccaatccctaggttggaagatcccttggagaaggaaatggcagcccactccagtattcttgcctggaaaaattccatggacaacctgatgggctatgatccatggagttgcaaagagtcagacatgactgaatgagcacacaggaaagaaaacacacatctttacaaatcactacctaggaatatacaca

SEQ ID NO: 46768 - DNA, 1146 bp, Bovine  19866881032789
  misc_feature (1)..(1): n is a, c, g, or t
nccagagaaaccagatgaccacaaggatccatgataaagcttagtttcaaccatgaaagtaaagagagaatttacacctcagcaaaaattctaagtttgagaaaataattggactcactcacaagagaataaatgctttccttttcaaagtagctgtatagcagcctattaggtaattactttgattttaatgtctgtaattccaatttccatgatagctcataattgcttagagaaagaataaggaattgaagatgaagtttgtcactgtatatttaccatcaaaaaaaaaaaaatcctacagcttgatttcagaaaacctggctcacatgagttcatatttttttaaaaatctttttgtttaaacagccttttgaggggaactagaaataagagcactgggacttcttaatttaaaagctactacttcaaaagtctatagggaaagctgcttcagaaacatctccctgcatttgtcattggttttctttcttactttccaaactaagcacttgaaaaatgaagaaaaagaaagaaaatatcatgaagtccagctatctatgggacacatgtctatgtcagtcatcactctcatgatctattgcagtaattaatcaaaagaaacacaccacttgtgtaatttattgcagcaatatatcggcaggttaaggcctccaggagttgagttatggacatgaaccttgcagtgctgcttttatttacttcccctatttaaatttgatataagaacacagagtaggaggaccagaagtcagaattgaaaaaatatttgcctaattttctgaatggcttcagacatgtaaaccaaggtaacattcttatattcttaatattcttatgacttgctttttataatggtggcatgatgtggctcagttgttcagtagtgtctgactctttgcaaccccatgaactgtagcccaccaggctcctctgtccatgggattctccaggcaagcatactggagtgggctgccacttcctactccaagggatcttcccaacccagggattgaacccatctcttatatctcctgcattggcaggtggattctttactgctgggtacctgggaagcccttttctatggtaattattataattaaatgtcttcctttcattcaa

SEQ ID NO: 46769 - DNA, 2294 bp, Bovine  19866881112959
  misc_feature (1)..(1): n is a, c, g, or t
naatgaggaaactgagcctcaggaaaattaagtaatgtacccaaggtcaacacttgttaagggtttaaactggttatagaatccaggttgtctgttgctaaaatctggcctcttcccaccataggttttattggtccctatgtctgaccatctttgatttcaaagcaagttctatctctctgttttctaattaacagaaattttaatagactattcagcattctaatttcacatgactattccaaatgcttgcaatccttttacatttagaataaaatgattttctaaagagccttcctttctaagaatgcaattttaaaatatggacaggtacaatatgaagaacacaaagttttaacaaataactaggaattgttctattgaaaaactattttgatacaaagtatgtttattacaaaatatcagtagttactatggatttggagcttcccagggtggcactaatggtaaagaatctgcacgccaatggaggagacataagagaaaggggttagatctgtgggttggaaagatcccctggaggagggcatgacaacccactctagtattcttgcctcgagaatcccatggacagaggagcctggtaggctatggtccatggggtcataaagagtcggacacgaagtgacttagcacagatgtagaaatagggagaatactattctttgcaaataaaattacctctctagtggcatattatttgaaacttcaacatctcagggtcattataaaaccctggaaagtaaattcaactcatacagatgatcagttttcccttaaggaacaagagactgctaatgatctaatcacagcatttgaccaaatggcttatttgacatttgatttggaaatttatcaaatactttcaaaaatcattatggagtttttaaaataatcaaatatgtgatgccagctaaaacatgagattatgcatatttagtaaaaattcatatatgaatatacttttcaagaagttcaagtttttcttagttttgcatctattaaatcctattaataaaattctaaagaaagatatgtttgtaaataaaggcagtgtagattacacatggtagggtaagggagtattccacaaataatgagattggatcaaagagccttgtttgatcaaaaaacacgctaattttggaaaaaattaacatatcaatcaataaaatatgctatatctgtctaaatatatttgggaaaaccatttaaccatttaaaaatcataggaaagttgcctttctgtgattcaaagtatttagtacaaataatcttcttaagaaaacccatctttcaatcatctgtgaaaatccccagtaatttttttaatttatagccatgcattgcattaacacatgattgaacaatgtgtaaaagctgagggggaaaaataggcttaatatcagaagctcatgtattgatgcttagttttttttaaagattacaggtcaaagaagaattattttaatattagataaaattgtctttacatacaaaaaaaaaataacttggaacatgaattatatcttcaaacctaaaacaagaagcacaagacttggttggatgagagatagaaaaatctgcttttataaatttaatccttcaagcatagaataataaatattaatattaacaaaagaagcatatccaatgcttatgctatatgtgaatttagcataattagaacaaaagacttatatcttacaatagatttaacagtttctaccatcaatgcccaatcacacaagtttttttttgtttatttgttttgttcatttgtttggctttgacactcagcttgtggtatctcagtttgccaaccaaggactgaagctgggccctggcagtaaaagtgctgaatcccacccactagaccaccagggaactggcccctccatcatatactgccggggtccagccccggctgatccagggtatgcgaagcgggaacggcgtcggcgaggatcaggatacaatagtttcaattagatattaattagagatgtaaagagtaatagaatgaggatagctcagtaggaaaattcagtggaaaaaagaggctgactggcttggtttatgcgggagaccaataaaacttcaagacaagaagtttgcaccacttacttaggccgcaggcgtccttccgttctcccaaaggacaggagacactgaggcctccccggttggatcttagaagcccaggcataattagtaagcatggcgggttccgcgctccagatggggactcagccagagtagagagcgagcga

SEQ ID NO: 46770 - DNA, 998 bp, Bovine  19866881118388
  misc_feature (1)..(1): n is a, c, g, or t
nctttaaacagaaaaacattagaaaacaattcaaatactgttattatgaatattctttctttaaaaagattaatctccctgatacagtaacatgaaataatgttttgttacttcatgctgctgtaatttccatacagcaaatgtatggaaaacttcaaaaataatcactgttaggtttaaacaaccaaatcaaagccaaccatttgataaaattcaatactttgcttctttgctatagagtaaaaagctttagaatctgaacatgattagtcatttcaactcctattgtagtatatgaaaacagcaagaaagtttgtttacatgtgttattctgagggaaggtcatactatgacataatctgataatgttgaaatgcaaatgcttcatttggacattattttaattcataggaaggtgaactaagttgtcaaatatttccttctctcttactcctaaaataacacaaaaaatgtggtaaccaaaaactcattcatatttaatcattccagaagtaactctatttcaagggaaaatagtttcagaattcacactgcaaaatagatccaaatttatacctggtccagcatttttttttccaactcagactctaaagaaataagcaagtaacagtaatatttataactgtgacagcattccttttccaccaagtcaaatttctgataaataattaaatactttcataagtgtaagtcttcattattttcccatgaatgactccagtggccacttgtgcacattttatttaatcagaatatttaaaatgtcctctattgcaaagtctcatgggaactaaacaaaaataaatttcaattttcaggccataacactgccttccctgagaaagcaacataataggtagtttgtatgtatatggtggcaaattccctgctaagcaaggacattctataccatgtaaacaacaagaagctaaaatgccagatattcacaaggaagaattatatttttattatttaaa

SEQ ID NO: 46771 - DNA, 765 bp, Bovine  19866881293519
  misc_feature (1)..(1): n is a, c, g, or t
ncctaattccaaaaccaggcaaagataccacaagaagataaaaatgataggccaatatcactgatgagtgtagatatgaaaatcctcactaaatgttaacaaattgaatttaacaatatgttgaaaggatcatacatcatgatcaggtgttaattatgcaagggattcaaggatagttcaatgtctataaatcaatcaatgtgacacatcatgttaacaaaataaagaataaaaaattatatggtaacctcaataaacaaagataaagctgactctggttgcctaaaaactgtatcgatgaaataaatgcactagagataagattttcaaaaccttataccttgacatgacatgcggttcttttggagataatatcccactgtacacatgcaagttcttgtagtttctgatgttggtaaacaaagctgagaacatccaccattatttagttggcaggaattgctgcctgaaaagtagaaaaacaaacaaaagaaacataaaaatcaagaaaagtttataaacatgattttactgatttataaatgctgctgcttcatattggttagtatcatgttttattccctcaaataatttgaagtagcagattatggttgaagtctgtctttccataaaaagcacagtatactgattacagaaaacaatactataatcaatttagagtgttgattctaaaggaaatcaacctgaatattaattgaaaggactaatgctgatgctgaagctctaatactttggccacttgat

SEQ ID NO: 46772 - DNA, 889 bp, Bovine  19866881346446
  misc_feature (1)..(1): n is a, c, g, or t
nacggcttctcacagtgaacggtctctgacttggtcatctgtggtaaaaactagagggccatctttttaaccctcccagggccatgtctcttaggtgcttagcccaatgttttatttcctctccattcccactaaaactccttagctcaggactccattacttctcattctcctgatgacctttgctgaggaaacactagagtgatctttccaaaatgcgaatctaagcatgtcacttcaccacttaaaattctacagtggcttgcattcccctgccaaaccacttagcatggcacaaacgccatttgtgatttgatgcctacttaactttccatcactagatctattactgcccactgtgtaccatgtttagaaatattgaacttcagtcaactttcaatttcccaaggatagattaactacattatgagggaaaatgggtgaaaatgggccaaagacagcttacttgtaaagaaaaagaactaaaagtgtagtggattagagaaatatctacatatcagaatgagtctattatttataattatataggaaccattccatttttacattgtacctattgcaaataaggaacgccccttccacctgggcagtcaaaactggctatgtgcatatgcaatctgttagctgcttttgggtgcaggaacagttttctgcagtttgcctgaagctctgggcaaaaatctatttcttaggacaatgatggtactagaagtctctatgctgtgctttgtcccaagacttgtttttatttatttttctcaaacagagaatctagaaagtggcattggaggtgagaggaagagcaacatagaacagaacccagaattttgttctgaagcctttggacctgaacgacagatacggtcta

SEQ ID NO: 46773 - DNA, 924 bp, Bovine  19866881357690
  misc_feature (1)..(1): n is a, c, g, or t
ntctgctctcagctggtgttctacatatacttctgtgtctgatggtgtattcctgatgtttccatggagagagatgtccttcccccaccacctattcctccaccatctttcatttataactcctattgtcatacttgcatcaatgaactttgatttttgataatttactgttcttatgtgtggccagaggagaacgacttatatagcctggtgtgctttagagatggaatattagtttatttagactcagtaaaatggggtcattgatgcatctgtttccattaatgaaagttagcaactgctgcgtgtatcttataattagatttatagaagtgctgagatgaaaaacccagtgatgcagcacagtgtattttcctcatccaaaagatgctttccattgtctgaagagacagatgcctgtgttctgataagaactgtgtatgtagcttgagttactaatataaattattcaatatgaaatgatgcctgtagaagtggtttacttttttttctatttatgaatctgaactgtttcttacaaatttaaaatatgtatctgtaagatctaaagagaagctttttttcataaagtaaatatatctactactaatttttaagataggctcagaagtcaaataaaataacaaaagtgtggtagattaaaataaaaaataaacctagggtaggaaggacttctggaaagaacttggcataccttatccccaggaaaacagcaatttaactgataaaaattatttttgaaagttcagtcataaaatgtttctgcaaattgtcttcagagaaattctgttgtatttctgtacactgctgctgctgctgctgctgctgctgccactgctgctaagtcacttcagtcgtgtccaagtctgtgcgaccccatagatggcagcccaccaggccccg

SEQ ID NO: 46774 - DNA, 859 bp, Bovine  19866881451905
  misc_feature (1)..(1): n is a, c, g, or t
ncacgattaaccaagctgaaccatcactgaaatgtatgtggatttaaatcaaagggagtatattaaaaaatgaacaccattaaccttactgcaataacattcttaccttaccaaacaggcatatcagttgtacagattccagaaaattactctggatggttgagcctttcaaaattgataagttttgattttcatctattttttaaagttgtttttcatttaattcagagaaacatttttataatttttctttcagtttatttatccatttcctcaatggatcaggaaatatttgctgaatacagcaatgtaccagacttcagggctacttacttttggagatacaaagatctccaaaacaaattctagtcttcagatgctagtaatcctataaaagaggcaatgaggcagttatgatttattgcaatttctgtaattaatgctcatataaatgcatatgtgtgtagtgacaatcattacacaattattgattttgtttatttttaaatttttattattcaaggggaattttataagatttaatatttgttgactatcatcaggtaacaagaaagaaaaataaaaagaaagaaaaatagctctaagtcgtgtccgactcttgcaatcccaaaaactgtagcctgttaggctcctctgtccatggaattctgctagcaagaatactggagtgggttgccatttccttctctaggttgcatacaataaaaagtagcccttcaaaaatacatcctatgaggcataaactattagtcttattttacagaaaaaactcaggcacaaaaagaacaagaagataccctaagtttattaaacatacccaatggtaggggtcgtaaaa

SEQ ID NO: 46775 - DNA, 1590 bp, Bovine  19866880470894
  misc_feature (1)..(1): n is a, c, g, or t
ntcatgtcccataccctgagtgcaggcttctcagggggcactggtgctgaagaacacggtgtcaggaagatcccctggaggaggcaatggcaactcactccagtctttttgcctggagaatcccacagacagaggagtctggcgggctacagtccatggggttgcacagagtcagacaggactgactcgacttagcacgcaccacacacatgccctgagcaaccgtggagacagggctagtggaggagagagcatcctggagaggcggaaggagaccggacgtagagagacgtgaaaagcccactcagagtgaagcgatggggccagagcagggtgtcagccctgggcagggggaagcagagaaacgagttagctgggggttctggagccctgggtacaaaacacaccaagtagaagagatgggattggaaagatgggtggaggtagagtggctaaagcactcacatgcctgacttaatggtttgggatccgtgtgaccccaaagcagagttgttcaaggttttgaacctggaagaccatgacccagaagggcgttggagtggcaagagtcgtcagcacaaaatggtccaaagctctagcagtgttccagttagggaacaacacatccttcaagtctccacttgagtgccctgaggatagtaaaatcccagactctggtcttgatggcaaatgccatctatcttctgaagtcatgaagaattaaataccaaacaggtacagactgcagacgtgtactccagtctcaaaagaacagactctgcggcactggtagaatggctgataagcagcttttgttttggaaaagggtatttttttcccactctgagtgtggaagagaatatgatgaaagccagtgagatgggaagatgtgttctccactcatttttggactgtgaagccaatattgatgactgtcattaattaatcaattaaaccattaatttattgagtcattggcaataaaaagcataatgatgtatatctgccaaagtgaaagtaaagtgttagtcgcttagtcgtctccagctctttgctaccccatggattgtagcccaccaggctcctctgaccatggaattctccaggccagaatactggagtgggtagacatttgcttttccaggggatgggtctcctgcattccaggcagattttttatcatttgagccaccagggaagcccaaatgatttgcagtctcactaaagacaataattcagcaattgaatacaaagaaactccattaatttgttttaacttaccaaagcagttaattagaaagtagaataattagtcagaaatcgatactaatcaaagcatgagttgcagcgagaaagatgcccaaggaagcacatgacaaagtcattgccaaaggacgaattgttgataaaactaagtaatctagtttctaatatattttatggcaaaagggggattttcactctttaatctcataaaataccagaaagaataataataattggaaagcacttttcaaaataaaatgcaaatttctttttaaatgctgaaaactaagacgtcagccacctatttaatagtaaaactttaaa

SEQ ID NO: 46776 - DNA, 1848 bp, Bovine  19866880490062
  misc_feature (1)..(1): n is a, c, g, or t
ntgataaatgcttgcaaaggtggtaaagaattgaatcagaaagactcggccaaaagaacaagaacagaaattcaggccatttttcaaggaaatcatcatgacttggggagcaaaaaagtagtgaagggctggttttctgaaaggagatgtagcagttgggaaactaaactaataaatcccaggagacaggacgagacctttggactgaagaaaaagctgggaggaggatccagaagggaagccccgtcgtgtgctggcagggtgagcgtgtcggagttctcggcaggtttctattcatgttttattctggtgcagaggctgccaacaccagcagaagcagcagctccagggtgtgaagcagccttcagatcccagggaggaatcacagaccctgcggagctgggcgtgtccacttagtgaatagaaatctcagcacaagaggaaatgagaagccagagtccttccagatttcccaggttgacatgacatcgtgtttgtcgggtgatggcacaagactccttaaagatcaggtattaacctgttaattgcaacagcagtcccctgctgcccgtgtttgagttcatgctctttctcttaacacactgtgctcacccttcagggcccgacggcctcattctcattctctctgatgatattcatttgtcaaaacacatcctgaagaaaatgtcagttcacaccatttgtactgacctgggcgttactattagtaaggtaaagtgtgaccttcttggatatcagcctcggagccccaagtgcaaggaaaaacctcaggcatcgatcagccactccaaagaagggaggcctgggtgtaacttgttcttaacagccagacaagccatgaagtccaccatgattcctgacctggttaggcgctggtcctaaaagctccctgggagcctgcattcggtgtcgtatgccctgaagacatctgagactctgaagacacctggcgtacctgtccactcacctgtccaggtaatcctctgcgctggggaacactgacagagcatgggctgattttcatgataaatatctgcatcttagagctcagtgcaaggcttggtgctcaataataggtgaatgagtgaacgaagacagggctacagggtccatccacaggctccaggcttggagccagagaccctgcagtctttgttgtctccatagaaagttgcgttttctttccaaacccttgggcctttgcatgctctctttctgtccttagctcacggcatttggctctgtttgactggttgtttgtttttaagcatctttcatccgtgtccatttttatggtcagctggtttttcttcccaactctcagctcctatcagctactatcgtggctttagaaacatttcctgtttctaatattcgtgcagttcagtcaacatggcagaagacagaaagcattaccttcaacaggcctcattttgatgttgatttatttggacgggatttcagtgtgtctcagtactgcctctaaaatctaataaaatccaagtcttggctctaagttgttttactaactgacccttggttagccgagccagactcttctgttttatgcaattaaagtaacttgattccaacacacaatgtgtgtgtgtgtgtgtgtgtgtgtgtgtgtgtgtgtgtatgtgtgtgcgcatgctcagtcacgtctgactctttgcaagtccagggactgtatccccaccagactcctctgtccatgggatttcccagacaagaatactggagtgggttgccatttcctagtccatgggatgttctcaacccagggatagaacctatgactcctgcattttcaggtgggttctttac

SEQ ID NO: 46777 - DNA, 1397 bp, Bovine  19866880918135
  misc_feature (1)..(1): n is a, c, g, or t
ngtcccttggactgaaaggagatcaaccgtcaatcctaagggaaatcaactgtgaatagtcattggaaggactgatgctgaagctggagctccagtcctttggccacctgatgcgaagagccgactcattggaaaagaccctgatgctggaaaagattgaaggcaggagaaggggatgacagaggatgagatggttggaaggtatcactaactcagtggatataaatctgagcaaactccaggagatggagcaggacagggaagcctggtgtgctgccatccatggggttgcaaagagtcacacatgccttagcgaccgaacaatacaagttattcgggataaggcgagataaattattcagcagttagtttgacatttagaaagctatttataaaaatgatcatttctcaagaaaataaaaatagtgagaaaactaaaaattggcagttctagcagcaggagataatgcgatgcagaaggcattttcagggtttccttaaaacatattttgggtttattcagggttctttctcctcgctgacattcagctattcctctggcaagattctccattcttccatttttttttttctttcaacattgattgttgtaccaacatccacatcatcggtgtcatcttccgggggtgggtcagctcctctcggtcctccccggcgctgggcagtgagggaggaagaactggaatctgtgttccatgagtgggtgtttggtggcatcacacaggaagttccgtgatgccacacacaggagaacgttttttaaactctcaattcaagtaggaggtgatgctcttccctgtgagaatttacatctcctctctctctccctccatcctgcccactcctggctgggatctatcaagggcacagctgatgaaatataccctgttcagagggaccacaccacaggagcgtgggacagactcggagtgctatgtgggtccctgttgggctccctaagtgaaggctgagagcagacatggccaactgtcatgggtccgccaagtaatagcaccactcaagcagcccagaccacatgtgggaagagtaacacgggtctcacaagtctggatccactggggtggtatccatcctgatttgcggctgaagttaattctctgaggagtcttatcagaatccaccaaatatcatgcccagttggctatgagctgtaagtatagtccactgatatgcttttcatggcatggggccaacattctcaacagatcccttgggtttataaagctccaagtccaggtgtctttttgggtgtcgttaaacacagctatgtacctgggggacccctgcagggctactatcattcgctgtgtgctgtgtgcgcgcagttgctcagtcgtgtctgactctttgcaacc

SEQ ID NO: 46778 - DNA, 908 bp, Bovine  19866881025104
  misc_feature (1)..(1): n is a, c, g, or t
ngaggtggcgggaggggcgcgcagtggactggccttaagagtccagcctcagagtctggggaagaaagccaccaggcctagtttaatttcagttcggcttgggagtcctcctataacaccgggctggtcccacagcctgcgtatgaaggtggggttgcaaacacggctgttatatttgaacctccgtaaagctgcaagcccttatccacagcatttgactccgcctttggtccatcccaggggcctagcaccagggcctgcacaaggctgttgccagaaaaactatttcataagcgttccgtggcccctctcagccccccagcacccaccgtcatgcgattcctccagtaacggtaaactgttatctggccctaatgacttctccaaatggggcctgaagggaaggtcccagtcagggcaaaacgggaaggaggcagccgcgagcacccctgcgcacagcctggaccaggagggacaggcccccgagcaagagaaggggccaggcagaggctcgcggccggacccggcttcccaccccggcccaggcagacaccgccccatgtgccactcacagcttctggttgagcccggcctggctgctgggctggaagtcgctgacgataatgccgagctgccggatgttctccacgaacttctccaggtgctcctccaggtggtcgaacttctccgccatcgccgcgcagcccgcacaccaacccgcggccctcgtcctgccccaccgcttcctgcttccgtccgggcccgccaccacttccgcttcctctgggggcccggatggggcggggccgccggggtggggaggggccgccggggtggggtatgggggccgtggttaggtcgcggggaggggcgttaggcggggccaccggggcgggggcgggagtcag

SEQ ID NO: 46779 - DNA, 709 bp, Bovine  19866881205169
  misc_feature (1)..(1): n is a, c, g, or t
ncatttatgtgtgtgtgcataaagagttggacgtgacttagtgactgaaaacattcagtccatagcaagggttattagagtgggttccaatccaatgtgactggagtcctcataaaggggggacattcaggtgctgagaagagcatacacagaggccactgtggccatttaccagtcctggggagaagcctggagcaggctagcacgttcggagcgaacgtggcgccgccataccttgatctaggacttctggcctccagccttgtgagcaatgtatttctgccgtttgagcctctgcagttgctggtactttgctacgacagccccaggaagctcatagacagcagttggggcaccacaaaagcaggaatcagtcctctgatctgccagatgttacccaaggtggggaccatttccactctaccagccacacgatgcccagggcaagatcagtgtcacctccataaatgccgtggcgctcagtcaccatgaggacccagacagtcccagcaaaaaggcccctttagcagctgctttgctatttctttctctgtttttattagtgagatctataaaaagatttgaacatcttgaagactgggaatgcgtttgggtgcagcacaggcatggaaaaatccccccaagaagagttctgagtgttggtgacatcacgtgctgtaacaatgtctaattagatgagaaattatta

SEQ ID NO: 46780 - DNA, 691 bp, Bovine  19866881283834
  misc_feature (1)..(1): n is a, c, g, or t
naactggccttgggtgagatgcagtctttgcacggatggctatagagtgtaactgacccgataaggtagggtcctggatggcccccactccagccaattaattagctggcatccagtctcgctttgtctcacaggctggaaaaggcgttataattagattttcccatccttgctgcaaaataagggtcgattgtctcacatgcccaatcacagctgcaccacgcttactgcaggttgaatccatgtgctgagaaattacacgggaatcaaatgcacactggcatcagaaaacaactccagattgccctcaatggtcaaatttcatctgaaattaagtgctgatttacatgaatttacatctaaaatgcaaatcacagtgttccccagagacagcagaaggaaagtttgaaggcagctagcttctcctttatctcaaaagcagaagtcctgttggtctttagattggaaacccccaaacaggtttccatcagcagccccacacgcaaaatataagcgccagattatgtgaacacaggcccctttatgctccctgtggcaactctgaagcatgagcttccatctgcgcttgatttgcatcaggctccactgcctgttagcaacatgggagaggcattgctgggggaatggggatgcttctgtttcaaagcaaaccgtggctagggggcaagtg

SEQ ID NO: 46781 - DNA, 1405 bp, Bovine  19866880662738
  misc_feature (1)..(1): n is a, c, g, or t
nacccgcgatttttgaggaaaagagggagatgcaggagaggttaagatttggaataaaatctcccttcagagacccttgggggagcagaagagttcgtccatgtgggcaggtttgggggaagtcggccctgctgggagccctgggttcaagaggagcttaatgtgtctttccctccctgttttggcccagagaagggcatggcccctgccttccaccgactgtacaaggagctcatgggcccgtggaacaaggatgagatcagcacagccgatgccatcttcgtgcagcgggacctagagctggtccatggtttcatgcccaacttcttcaggctgttccgtaccacggtcaagcaggttgacttctctgaagtggagagagccaggttcatcgtcaacgactgggtgaaaagacacacaaaaggtgagcaggcagagaaaggcgggcggtcccagggcctgcagagacgggggttcaagtctcaagcgtcctgacccctcccttccagcaccttctgctctgtggacagaaggtcaagtgccttaagaatcaaagcatcttgttttttccataattagacttgccctctgaaccacctctaaaggcatccctaaaaagtactgtgagatgttataagaacagtaataacccatggcaggaggcaaacacagcccttcaagattacagcttagggaacaaagtaaggggagacttacatttccaggtctgatcctagacaggatcccaggaccaaggcagtgtggtgagctggaaggctttctgagacacttaggaagatggaacgggttgacagcagctagactggttcactaaaccttacccagtccatcttctgatgggatcccttctgacacatgtccatttgaggactgggagctcaagggaaccatctaaaaagattaaaacaatatccagcctcctgatcacctggatttcccataggcatgatcagcgacttacttggtgaaggggctgtggaccagctgacacgcctggtcctggtaaatgccctctacttcaacggccagtggaagatgcccttcccagagtcaaacacccaccaccgcctcttccacaagtccgatggcagcaccatctctgtgcccatgatggctcagaccaacaagttcaactacagtaagtgcaagactctcccttctccaggtcccacaatgactgaacctcatccctggggtggtccactccaagggaggagaaaaccctagaacacaccccagctgcaacaaacactccccaagtaggagacacggggattatcggagcagcagaaagtagctgtatcttgtgcaagatgaagctgaaatccagaaattaccttaggatcccacttgaccacttgatacagtctctcatcttcatgtg

SEQ ID NO: 46782 - DNA, 1109 bp, Bovine  19866880682591
  misc_feature (1)..(1): n is a, c, g, or t
ngaaatggagaaatacgcagagagggaagatatggtcatcatgtttgtggacaggtaaaggggagggggcagacagaaggggagaggatagggagattcctagtggtcgtcctcctcatcgtcccccgcctccctcagctacgacgtagttctggctggcagcccctcagagctgctgaagaagttcgtccagagtggcagccgcctgctcttctctgcagaaagcttctgctggcccgagtgggggttagcagagcagtaccctgaggtgggcacggggaagcgcttcctcaactctggtggtgagtggcagagggtccagcagtggtggggaatggagtgtcccaggtgcttgagggcgggcaaaggaacggggaccggccctgggacactgaagaagtctgggagtcagtgcatcctctccccctgccaggattcatcggcttcgcccccaccatccaccaaatcgtccgccagtggaagtacaaagatgatgatgatgatcagctcttctacactcggctctacctggacccagggctgagggtagggagaggccaaggagggcccccatctccacagctctggggggtggcaggccctgaggaaaggagtgaagaggctttcagaaagacacggagaggaaagagtaggaagagatgtctcagcccctcgttaattcactgcccccacctcatcccatccaggagaagctcggccttagtctggatcataaatcacggatctttcagaacctcaacggggctttaggtgaggagacagcaatgagaaaaggggcgatgagagaggctgttgggggtcctgaatgtgggtgggtctcctagtagatcggggtgaacttcagctcacctctgtgttaactgcagcaaacgtctgaatggcccgtagaataaggtgcactctgctaccaggaatagcagcagcccctgttgtacatgtccattgctacgtgccaggctctgggtcagggttttcgttctttagtttcattgaacacagcaatcgtacgaaaggcggtctgtgattatccactggttacatatggggaaaccacctccctgcggggccagagacttccccggggggca

SEQ ID NO: 46783 - DNA, 3967 bp, Bovine  19866880734595
  misc_feature (1)..(1): n is a, c, g, or t
ngtgatattgtgaagacggagaaggagaattacagctcaaataaaaaactttatataaattttaagcagtctgataacactaaaaggaatacttgggggaggaggacatacagtggcagtgcgctgggaaggtcataccttcgggcatcattatggtaggaagaagggagggtgtgagtcatcctgatggctctaggggtagggggaggagaagtttcacatttaatggttgctttatcctcccgaccatcttcttctaccactgcaatctggaagcaaaaaaaaaaaaatacaccagattcactttttctaaattttaactgaaactgatgaaaatagagactcattaaagcaaggctatttgagtaattataatataaaagcaaaacaagaaatttagggcatataagtcttacacataaaaactcacattattaaagagcaggaatttcataactatttaaaagttaagacactccagttaaaagagacatacacacacataaatggacttactacataaaaatattagttaactgtaaataaacaccatacatcaatatctagggactatggaaaagctatcttggaatccattaaatatatcagaatgtaaaagctttacaaagttattgaacacatatttgaactaattcactaaaaatatgcatagtcatcttttaagtgggagacttttgaagtgagaatttgacaaaataaaatgttatcagatagggtgttttaaatcaggctaattaaatgtgttcccagatattaaaaaaaaaaagctgcagtttataagaaaaaaactttctttttaaagtgagaataataaaggtaagaatggaattttcgcaaactgtttaatttcactacttcttatgggaaaattgagaaggacatacagttcaccataagcagatgcgatgaaagggatttctttaaagaatttagttccaagtccagaacaattcatgataccataaattttgccagagatggatatacagaactgtattaaaataagacttttcaacaaccaactgaattgtatgataaagatttttaaaaacaatgctgcatttttcatagtaccactgtgcattatatatatatatagagagagagagattgaaagattgtggaaaccgtagctgaaagatgtatggttctagaagttctgatgaagaaatgtctcaatagggctataacaaaaggtttaaaactatgttctcgtcttctgtctataaatgtctcgctagtttctttacattaagctattatacttaaagtgtgtttatatgtgatacttcatgtattggagaaacaatacaagtgtctgtctgggctcttgtcattcaaacctaggttacttttaccagcacagtgcatgtgttctcagtcgcttcagtctttgcaacaccatgggctgtagcctgccaggcttcttccgttcatggtattctccaggcaaaaatactggagtgggttgtcatctgttgttccaggggctcttcctgacctgggatcaaacactcatctccttctcctgcactgcaggtggattctttaccactgagccacctgagaagcccttaacaggataggacatcttaataagatctcttttctccatttcaatgaatatagtgctattagaagaatctttttcaagaactgctttcagcataatgttgatactatggaaaaccctttctaaactcacatctcatctaaacttgtaaagcgtatttcaaaactcttcctaatacatatttatgttttctcagttccattattttaccaagattgttttccacaattgtttctgggaagcctgattatttctgttttcagacttttcctctgaaacaccctcttataaaacaccttcttctctccagatggcaggtcaaactaggccaactttcaaaatatcagctcttaaaaacattaaacacaaaccctttcgctgaataatacttaaatctcatgctatatgagtaaagtggaagagaaagacttcagattcagagatggatttgaatcttgacttctcttctttattgagtgacgaactaattacttatctactctaagattaaattttcttatcaataaaatagaagtgaatatactcagtttaatttcttttgaagtgcaaattaaatcacgcatataactccttaccctgatatacaataaatgttagtttgtggttttctttctgtaacctttcttttttctttctttcttttttacaattccacaacttgaatgacatgacatatggaagatggcaaaaaaaaaaaaaaaaaatcaccttgccttttcagctctttggagagatctggggcaaaggaatcagaattcaacagtaggattttctcagctgaactaaggatagagaatagaccgtagggagtcaactccctggctgactggtctttggggcaaataaagaaaatgccttcacagccaaagggaaatgagaaccttcttaggtggatggacttcaggctctgcactgatattaacttcatttgggatgtggatatctcctccgggtctctgctctcggacactaagttgattatgcttcttaaatactggatgaattccatcctgatctcttccgggtagtcctcaagattcgagtgcaccagcttcagcttgttcaagggtggtgccagagctgggttttctttgtcacttctggagcctggtgtgtggtgtgcaattaacagacacggagtattctgtaagaactgctgctgaacgaaacaggaataccacatctcaatttccttcaggtgacttaggatgctggcattgaagacgatcaccaccccatgagagtccttcatcagggctggccagtaagactcgaactctggatcaccaccacaatcccagagctcaaattcacacccgcgccttcgttgtttgctggtaacacgtggattctcaaattccaggatcctcactccttgggttgggttgtattcagtgatatcagaagcttgtgtcagaaagtaggccaaaatggtttttccactctcgcaggggcccccaaggaggactctggccttcagcaactcagtcccgggcccacgcaggcgccgcttgagtccgcgctgcagtctgcgcggagcggaagtcatcgcactataaccttcctttcttaccaatcatctttctatattccctaaattccctgaggctttatttctgcacaagatcttcctttacattttttccccctcttatgcacactgaaattatttcacatatcatatactcagatttcttcctgtatttccagtataatccttttaagtggtgaaggaagtcaaagacaagtggtaataacattatgcgtgataaatttggcagttgagaactaacggatagcgtcaaggagaagatactaaaagaagatagatgatggacaataaaaagaaaattcaatcaatttaggtcatgtaagcatactatgattcccttaattaaaaaaaaaaaaaagttccctagttgcagaagtatttgggcataggctgattatcacatcttgaagatgctgaaaaatagatttatttatgtattggatagtaggttgaatctttaaaatttgtcccatctgatttcctgaatctgagctcttccactctcaattatctaacacaatgttattttgtgaatctgaactttattccattttgtttctaacccagggatcaaacccaggtctcctgcattgtgggcagattatttaccagctgagccacaagggaagcttgtttcctatacccaagatttattctcttgacttcattctaaacaggaaagtagtatctggagccatgctgagaatgcccctccctgggctagctaattcctagagatagcaaactatgttcctggagtgtgccttccatatgcacaccaaacactctagatcagtatc

SEQ ID NO: 46784 - DNA, 1122 bp, Bovine  19866880941703
  misc_feature (1)..(1): n is a, c, g, or t
natcccagcaggtgcatccctgccccgtggggtcttccctgccagctcctctcacctgctcctccagcaaggcctgaaagttttttcggaagcggagtttaaaatgatcacctcgtgttttcttctttttctttcctagacgtcaagggcgatgagttacttggccctcacccagaagacaccagcttctctgccccactgttcccaatgcccctgtgtcccttccctgcccaggtgcctgccaggttctaagccggcctctctctaccatccttccctgcctccacttctccaacccgagccttcctccatctccacactcctgatacctagagctccatgtcagagctggaagcgatctcaagggctcacctgccctggcttctttattctatacacaggaaaggaaactgaggcagagactgggagagggcctggctcaagggagccagaggagctcgcaggccatccatcccccagcccgacatccttacacagccctgacccagccaggctcttccctcttcctgcagccttgcctcctggaccctcccttccactgccccccgcggcacccccttcctcctccacccgcctcaccagtgtctgcgtcgtcatcaaactgaggtagccgcttgcccagctgggggaggcctgcgtgggggtcgtcctggaagttgtcattctccaaggcctcaagctgcctgttgatgcggcgctgccgggctgcccggtccagcacccgccgctgtccagggtcctgggagcgaactagatgggatggggccacaacagttacaggagcaaagagacgctgggcagcctcggctctgagccgtgggtggaaggaagatgtccagggtgtgggagccacagttctctgatctcaccctagtccccaaacccttggcccctggatctcctcccaatatatcgcccattctggctgcttccttcttagccacctaagactgctgtttcactcattcatgcctggtttccatccttttggccccatcctttcctcccaatcccagacctgggcagtgaaatgtctcctggagacctctcgttgctggcagaaacacacaaccgtgccggtggagaccgcagtgcacttgg

SEQ ID NO: 46785 - DNA, 610 bp, Bovine  19866881028163
  misc_feature (1)..(1): n is a, c, g, or t
nttgtaacagacggggtttccgagtatgaatgcttgaaatgggactgggtgggctcatgaggaaggtcaaagctcgacgactcctgcactggatccagaggcaccatcccccttgcgagcatctcaggcccatgaacttgacctgggacctgaggacaaacaggttgggcttgtgggtaaattactttttaaacaggaatttagacaaacaaaaagacagtaagtatgccaggggctgggcgagggccagggccagaatacttttttaacagccaagcggagcaggatctaagtaccacaaagactataaatccaagctttaaatcagtaactctctctctgctccagtctcaaagtccacgtgctgctcacacatcacatgcgtcacctcgcctcacctgctgtcctgacaaatccagctccagatcctccagcaaggtcacggcctcctccccgctgtcaggacggtactcctgcagccaggcctggagctcccggggcagaatggagaggaactgctcgagcaccagcagctccaggatctgctccttggtgtggatctcgggccgcagccactggtggcaaagttccttcagtcgactcagggcct

SEQ ID NO: 46786 - DNA, 1668 bp, Bovine  19866880352929
  misc_feature (1)..(1): n is a, c, g, or t
ntaatttaggtttagggtaattttcatgacaaatctaaaagtgttttaaattttaagaagtgcataattggcctgcaaaggccacaaagccagaccctaattaggacaacttgggagagaattaccaaagagaaagacgaaatcctcactacttaaaacctacaaagtatgacttctcgacctccagatccataaggaaggaaagaaatccaagagagccaaattttggctgagcatggttagctgcgtggtaccctttattggtctggctgtactacagctaccatttaaaaatgtctagagcaggcatgagcaagaggcattcctcaagtggccactctgagcccaaagcagaaagtctagtcacaggcacataggtaactctgcctcaggtacgtttgattccatgtgctcatcatgagtcctggttttaccaaagggaaaactatttctgtacttgaactctttctggggtagagaggcaagggaaataccagaaagagcccaagtcagaaaaccagggttcaaatcccaacccttctactttctagatggtcaaatctaccttcatttatgcttcctcaggtaaaatggaaatagtacctacctcttcaggttatcataagacttagaaataatatatatataaataatttgcatataatagtactcaataaagttgggttaagtatttacttaacaccacatacaaaaaaacagaagctacaaaaatgatgaaaattacaggctaggcaaaaaaagttcaggattttcaagtagaaattaagcaatttactaaagaaaaacaaaaactaggagccagagatcccaggcctctgttttgtaactaactagttaaatgaccctggacaagccaacttgaacctacgtttcctctcttataaaatgaaagaataaaatgagcctgaaattattctgtcctttttggcagtgtcactcaactagcaatggatatgaatttagaacccagacctagttcaatactacctcaaaataatgtttctaaactgtatcacaaaagagactatcaaacaatatgtggctggcagaggcagttcggacaaataggtagaaagaaagatttcatactgggcctgaaacgagatgataataatttataaaattaacattaataaagagaatgttatattaatgtatagagtaagggatataaaaaaggtaaagcacagtaaggaaaaccagtttagaggcaggttatagacagaagggagcaggaatcaaagatagttttagctgtgacttttaaaattgaattagggaataaaatatgaagagaaaactacataaatccaaatagaagctgacaagacttgagttagaacaaagagcggagagaaagggggagatataactcattttcaggaagtggcaaaattcagcaataaaaatacagcaatatgctgtatataaaataaaaagacagcaatatgctaattaaacaaaaaaataatgtaaatcagtagagctgatttacaatgctgtgccaatcttacaccaaaatgactcagtgttacatacatatacattcttttttaaatattcttttccattatgattgttcccaggagactggatatagttatatagtacggccttgtagtttatccattctaaatataatagttt

SEQ ID NO: 46787 - DNA, 800 bp, Bovine  19866880356952
  misc_feature (1)..(1): n is a, c, g, or t
ncccgctcgggcctgagccgtagacattcagatgcttggcccagggcaagcatcagcgggggctgttttggcaggttctgagactctgtggagaagagacaagacctggtcactgccctaatcagggctgagcccaggtccaagttcctttgggagcagaaggctgtggggagtggacagaatctctcggaagagagagttcatatgcctccatgtgtgtccaaaccaccagactatggccctgtcaagagcttgtgaaccttagctttctttggagcaatgagctggcctgggcccaggtcatagtctagggcccattgtgatctagctggccaactcagttgggcagagggaggtcagggttctgtcatgggagcccaagagtcccgtgggccaccagacagcctctaggcagagttcgctgccctgatttggacaaacaggaaggggtgactgggccaccccaggcactcctggaacagcttattttcgttagaaccacttacctaaaatggcgctgttgagggcggcacacacaggctccctctggatggggtcaagctgctggccaactgggcagctccaggggtctgagtaggcaagcaggctaaaggcatcctaaggaacagggcacttctgagaagactgtggtatgcaccaacaccccccatggctccagggggatacggggccctgcgtggtgtcagggaggcacaaaataccccgatgtcccatttcccactgaggtcttatctagagctcactctctcctattgctgctgcccccagtgccctcccag

SEQ ID NO: 46788 - DNA, 1024 bp, Bovine  19866880397122
  misc_feature (1)..(1): n is a, c, g, or t
ntgaagagcaggagagggaggggatggatgcggcaccagaagctgctccaaacacaacccacgataaacccctttgttgaagagaccttggcagggggtgggaaacagcagtgatgaaagaaccttggggtaacaaggtgccgtaggtgggcagagtaaagtattttggctaaactggcttagtgcaacaatgtggggagatgggcatttgcttctgccagcacaggaggtgagtgtgtaaccaaggcaacagtagcagagaagacggcggggctccagggagccagtggtgggccagcggcgcacatgagcccctacccacatggacagtggggacacgaggcaattaaaggcgtctagtagaatccaagcacaagcctggaaatccaccacctgcctccttgcattctgctctgctgcctgtaacgtcaaatctccagctctcccatggcccctggccgccctccccacagctcccaggcaaggccctaccctgctcccctgccagctccctgttggagcacgtgaagcaggctgcacgagcagccccacaggctctggccccctttgcctggagagcaggacacaccacacgctccacacctcattttatcttcgacatcccaggggagaatggcacatgtctcagttgctacgagatgcggcggcgagctgggatggtctcgtaaacgtccactctggctctgggcagtcacgctactgcagggctctcagaacaaccacagggtgcaactcgctggccctgagcaggtgtcccttggcccaaatggatggatagtcagcctgcagcccagaaacgcccccctggagagccagcccctcaccaacacaatgccccggggagtggcaggtgggcttcctctcccactggagtccaggcccctgcctggcagcactcactctcctaagcaaggctctgggaggagctctgcccaagcccacctgttcctggtgccgtcacctgggcccacccacagctcacagactgcccaagcagaggagg

SEQ ID NO: 46789 - DNA, 1632 bp, Bovine  19866880458920
  misc_feature (1)..(1): n is a, c, g, or t
nctggggccgctcctctcgcttccttggagataagagatggggctgggggctaaatgccaaaggctgcgtcacaatgagccccagtgatgtgagccaggcccgacaatcctccctgctggcactcagaaaggctacgtggccagcagggacagggctccaggctacaaggcagggctctccctgaccccagctgcagaaggcaggggcagcatgggtacacaccgcatccagccctcagaggcccgcaggtgaggcgtggctatcgggagccgatgagggtggtcacacggccacccccaacttctcctcatctctgccagagatgagggacacagccctaagaatgctgcccctactgtcctggtcttgcccttcccgggggacagggaacagctgccgccactcagacgggccactcccacacagctgcctgtgctgaagtcaagctgggcagctgatcctggggagaggcagctggcacgggcaggccacagaccagggctgtcaccaagggtcacgggaaggcggggccacagcccgaggcccctgaatctaagatcagctgcaagaagttcctgtgtatgagtgaatgagtcttagggatgctaaggtaaaccccaacctgagctgtgctcacgggcgaaccagatggccgaccaaacagcccttgcccaggccctgtctatggtgtccctctgctatactcctcaaccaaagtgtcagggcccctggggcccaagaaagtcccatcaacccagcctccacctccaccttcccacacccctagcagcccaattctaacccatccttaacagctttgatagccagaaagtccctctttaaacttgcccaattctgtcttcctagtcttcccaattactgggaaaaaggaatagctttatttattcagggaacaccatctgccaggcactatgccaagactgtatattcacaatctcgtaaaagctttgcgacaaccctataaagcagaaactatcttaatttccaaatgaggactgtagttctcagagaggttaaataacttgtccaaggacacacagccaaccaacagcagaactgggatttgaagccaggcatctgagcccagagcctgctgcctctggaaggggtgtgtatgtacaggtgtgtggcttttcacctccccctgctggcttcaacacacacagctctgcttttctctgtttctatatgttgaagttctgggttcccttctctgaaaatgctgtaatagacacacctgcaagaaatgggctgttcctataagacccttgaactcacaaggaacatcattcagaagggaggtcactccagctgacatttgccaacctgggatttggtacacaagtacatcctggacatagggagcaagttcgactgggaaaccaaggatagccttcagcaacacctcagctctcaacagagaacacattcactacagacctaaggactgtttaaagcagtccctgtgacagctggtagtccaacgagggcagacaaaagaggtggtgcctataaaagaacagcggtctgcctggggtcattcgggagaaaagctagagctgaatgtagtggaaagaaaatgagattcagaagcagagttctagttccac

SEQ ID NO: 46790 - DNA, 1443 bp, Bovine  19866880499821
  misc_feature (1)..(1): n is a, c, g, or t
nctttgctcggcactggcgtcctggctgtcgtgttgctgcagcaggtgataaggtggtcggtggaaggccaggctcttgtgcttttcctggaggccattccgggggctggggagggccaagccaagtcagtggcggatgactctacctgaagcccctaccattggtacactccccccgcctaccctccaagctcctcacctctctgccaggctgctgcaggtctcgcgagtgatgtctggagctgtaggccagacctgactgtcaggggctgtggcctcctgggtcaaggctgcctccaggagggaaggggtactatgccgatccccatccccagggaccccatccaggctaagctgggggccgagctcgggccctggccggggccgtggagacaacaggtggagcgccgaggccgctgaggccatgctgtctggctccaggccctcaggagcagaggcgccaaagccacgggacagcgcctcagatgcaatctcagggatgtcctgggacaaggcagtggaggctgaggagataacatcgggggagcgggtgcggctgggggaagcctgaggcagccccaggggttccacttcctgcagctccagggcgagtgcagaggcagcagtaggcacctgaggggaccaagataagacttaaatggtgggaggtagggctaaaacaagtatggagatgatgcactggtgtgtgcagtgatgagagatgggacacgggggatggggacgcaagtcataaatggtcacagtcagaagaggagggggaaagagaggctggggggctgctctccagggacactgggggctaagataccctcaggggaaacacgggctatctgaggcagagtaggaccagcacacaggaaactgggagatcgcccccaacctccccaccctcacatgcctgccaccctgcacttcacacacccacacacgcacctgaccagaccctttaggagtcagtttgtcagccggacctgggagcaggctgggcaggagcccacgtgggcttgcctgcaggctgctgctgctcatggtcagaccaccatccagctgtagcttggggctcaaggtcagctcctcaggtggcctggtggcaggaggatgaggtataagtagacaaagcctggtgcctcctggcaccagcccctgcccctctctctgcccctcacttcacctgggcaaggaggggtccacggcccgaagtactgctcatggcagacacggctgtcagagaggagctgctgctgctgctactgctgctgctgctgctgctgctgctgggagatgcagcaatctggggaaacatggagaatgagggctgtggctgtggagagcatccccacgtaccaccttcctcgaagcccactccttccaagcacacctgctgcagggaggcgctaggcgtcatgaaggcgtcaggtgtca

SEQ ID NO: 46791 - DNA, 1965 bp, Bovine  19866880712593
  misc_feature (1)..(1): n is a, c, g, or t
ntgatatctatgcactgacaaagtttttgtttcttttttacgtcccatcgcctgcctgaattttttttttttttttttagtatttatttatttggctgtgttgggtcttagttgtgacatgcaggatctttcgttatggggcgctgactctctagttgtggtgcacaggctccagagagctcaggctcagtagttgtgacatgttcatgcttagtcgctctgcagcaggtgggatctcaggttccctcaccaggtatgaaacctgtatcccctgcattgcaaggtggtttcttaaccattggaccaccaggaagtccttgcactggtaagtttttaaaaatgttgcagtgttacatcaagtatgtattgcactcagaatgctgtccagtttgtcactgcagtttgttagtgcaccaagtaacagtgggaaacatctctcacagctccctcagctctaccgttgttctgtgagattaaccacaggctgtacagaagtgaacgagcatggttatattccaataaaactttatttgtggataccagaatttgaatttcatattattttgtgtcattaaacagtattattttgattttcttcttaccatttgaaagccattcttagcttgtagcccatgcagaaacaggtggtaggccaggtttggcctgtgggctgtattctgccagtacctgctttacagtttaaatacattggtaggcaacctgtgttgcctagattactgcatgcttgcctggggccccctggtggctgaagggagcaaataagtcttgagatggtcaaatttctgaagcaccatgaatctgagaattctagagttggaaatctagatgtaggactatttatcatagggagattgtagtggccactcatcatttccagaatgtgggctttggtgacacttagggaaaaagataaaacagcactccccgaaattttgtatgcaaatctcaacagtgctttaagacatcattctgatataaaatgtatctcttcatctgcaatttatttgtgtgaagggtgtgaatttcagcattattctacacaaaatggcactggtacaataattacatttgaatgaacctatatcttccaagggtaactttattctcttttcacccaccctttttttcccactcaaaggcttcaagtttaatatattgataatttttgctactttattaagtacatttctaagtaaaactgggttttaactatgagagtatggtagtaaagaagtcagtgactttgtatagttgggtgctgctatcttgctttgaactagggtaccagcagtttttgtatttttgttttttaaattttagtaaactatacatagcataaaatctaccatcttagccatttataaatatatagtttattagcattaagtatagtcccatttttgttcaactacaggggtgagtttttttaatctgccattttaaactcttgatccaaaaaaatgaaaccctcgtgttctggtcaatcctaggtttactgtagtaactaggaatgaaattatcctcaaatatagtagagatcgtgccattccctttttaaaactttgctggtttatattgtccttagaataatatttaaactctttaccatgatccttctaggttttgcctccttcagttttcccctttcagctgttagctagctctagcatagttgggcctttcatttcttcagagaagccaaggtcttatctgactcactgtttgctggtgctgtcccacggtgttggagctgccctggtgttgaagcttgtatacccatgcctctccaccatcacctcccttttctttgcttgctggttcttgtgctgtcttctcagaaaggccatcccagtactctgtaaaataggttccttccttagactgtttccccctacttagtaagacttaaaatttttgtttttgtcaatctccaacccatccaaa

SEQ ID NO: 46792 - DNA, 4564 bp, Bovine  19866880798015
  misc_feature (1)..(1): n is a, c, g, or t
ncgtggcatgaaaccagagatgcctttagattctggtttttatcaccaccagactctcagcagccgtgtgagtccttttcctcccagcccgccccctttcctccccagcgtccacccccccacctcccgctgtgcacagtcaaagcaagaagcctctgggttggccagagaggaagctctcacatgggggatctgagaacctaatttctaatgacttccctcgtcagccgcgtgttcagcagccaggtgaccaggttctcccccagtattgtgattctcctgtccctaatcctaaaacccctcaagtatggggaaggattggaggccctccaggagcagacagtgatagcagtcaggggcgactctctccgcagggcccctctccagctccagaccccagtacaagggcctgtccccttgcccaggccccctgctctgtgcacacggctccctgccttgggcgtgtggcacttggctagccgttctcctggtggtcctgccagtacctgttgtaaagcttttgttattatttggagaagaatgagagatttcaagagctttgtaaagtgaggagattgaattacgtcacaggcgcctgatctacatgtgctcctccttgccacagcactgggagttcacacccgagaattctgtctgggtagatggcgaaggccatgtggggttctcaagggtcagggtggcggagagagggcaggaagtgaggggagcttggaaggactggccaaaggcacgagattatccactgtgggctttgtcaggatgtgagcttctgaagggctgggctggacttagctctctgagaggcctggtacacagtacattgaataagaaacttgtctgtgttcatgttgatgtttaaatacctttttaaaaattaaaattccaaaatattgaacatcagtattattggcctagaaaatgtagcttctgtgtgagtcataaaatctaggtcacagtgggcccttttttcctgtatttatgacatctgctgagtctcccatggtgatggttataaactgtaccaatgacagagctgggctggccatttacatataccgcctcatttgacttactcttctctcctaccctgcatggtaaatgtgactctccttctacagcgtggtaaaccagaacccagagaggttcagaaatgtcccaggtcatgcagcaatcaagtgagagaaccagactttgaaccccagtgtctgggtccaaagcgtggactgccctttctggacagtcagctgtcctgggtccctattgtttcttctgcaaggtgaccagctgagttccccccgagcctgtgtgaatggaatccagattcatcagaagctacaccctgtagtgggccaccagaaattatctgtgtcccagccattccctctctgaaaacactgagaaaacttttcaggggaccaagggaatgaccccagagttactggagatacacatacctggagaaagcataatcttgatctggctgccccaagatacaagtgtccaggcttggagactgctctgccaaccggtaagtgcctatgcagtgggagagtggagcctggatggcactggaggagaagcctgaatgtgaacattgttccaggagagtaagcagcaagagagattccagcccaagactgtgtcctgagcacagtggctaggcctggccctgcctgtccatcgtctctgtttagcaatcagcgcctctccccagccaccaggtctttgtgtaagaagcagccctcttctcatattcagtggctcaagcagaatgaacaggagagggaccacgggaagcaaagggatcaaaaagaaaactttagaggggcgtacaaagcatatatgtatgaccttgtgggtaggcaactgtaagaactctggctcattctgaatgaggtgagaagccagcagagggtttgatgcagcacagagatatgatctgatccatctcaaatttcaacagtttccctggcttctgtgttaagaaaaaactgaggaaaaccagttacgttgccatggcaataatccaggtgaaaaagagtggtgacttggatgaggcaggtggcagtgctggtagtgagaactggtgagatcctggaagtagtttgaaagccaagccaacaggatttattgatgattgaaagtgggatgtgagagtgatttcagtgattttgtcttgaaaaactagagtggcatcgccattgtctgagatggagaaactcaaggacaagattccatccccactcctactcttgaccttcagtgtctttgtgagagatgctaccagctctctatcccatttcctccgttgcttatagaccccgtgtaatccctccagctggtttcctggtatgcactcagggctttaggaatcccagctcctgggcctttcctgcctcagtgcctttgcacatgcagttccctgcctggatgtcctttcccgcttaggggaacatctccctggaacatctgcatccttaaggataaccccttcccttatcctgccatttgtaccagacccttgagcttgttccctcaagaagcccatgacttcttggaggaattgaggaggtagggtttgagtcacaccccaaggacagtgtctgtggaatgagtaatggaataactggatatcttcacccttcccagcttgctgtaccccaaaactatgtgtgtgtctagtccataccacttcttgggcttttaaaattttctattgaagatacgagcgtaagactttcttctacttgaaccacaccaagttgacaggaatgctctaggaattggtgtcttgtggccgttcgtaccctatgagcttctcatgttgtgatgtggaagagtgttcatcctttccttttcctcatgtgggagctgctcaagtcctcttgctctctccagggctttgtctagctttgttttgctcgctgggtgccttccagctgcggtgcactcagaacaggcttgagacagaaaggatgttttctctccctttcccctcctactatagccaagcatcttctggccttttgactacactttggaccagtgttttttgagaacagtctgcagggaatcttagagtcctttctgcaattacaactgagagtgccaagcccatcccctagaatatagattttattttcttaccccaacctgatgatctaataaatgcatgaaccataagataagcatatccacctctccagcccacttgtattaggcagttttccagagaaacagaaccaacaggatgtatattgagagagagagtagagatttattttaaagaattggctcatctggttgtaggagctggtagatccaagatccacagagcaaatgtgaattctagcaagagttgatgctgcagacttgactctgaaggcaatatggaagcagaatttcttcctctatggggaactttagtctttttttttttaatccccccaaggccttcatctgatgagttgaggcccacccacattatggagggcaatctgctctattcaaagtctactgctttaaatgttaattagatctaaagggatcttctcagcaatgtttaggctagtatttgatgggcaccataacctaaccaggttgacacataatattaaccatggtaccacctctctgtacctcccactcctggttttcaccttctgcctctactcatttccctttaagaacttctctttctctaacccataactctttttccaggcacagcccctgggtaccattttcttccaggccaatcaccttcctcttgtcctaggccaccacctagcctcagagccgactttcctgagtcatctgccttccagaaatgggttttcttttcccagtgtgaaccccctggatctttgagatttcctgttgttttcttctcaggtattgggaagaatgtggtttgtgagaaggcggcaacctcagtggatgctttccggatggtgacagcctcacgctactaccctcagctgatgagccttgtggggaacgtgttgcgcttcctgccggcctttgtgcgcatgaagcagctgatagctgagcactacgtgggcgcagtgatgatctgtgacgcccgcgtctactcgggcagcctgctcagcccgaactatggctggatctgtgatgagctcatgggcggcgggggcctgcacaccatgggcacctacattgtggacctgctgacccacctgaccggccagagagccgagaaggtccacgggctgctcaagacctttgtgaggcagaatgcggccatccgtggcatccggcacgtcaccagtgatgacttctgtttcttccagatgctcatgggcgggggtgtgtgcagcacagtaactctcaacttcaacatgccaggcgcctttgtgcacgaagtcatggtggtgggctctgcgggacgcctggttgcccggggtgcggacctctatgggcagaaaaactctgccccgcaggaggagctgctgctgagggactcactggctgtgggtgcggggctgcctgagcagggcgcccaggacgtcccgctgctcta

SEQ ID NO: 46793 - DNA, 2867 bp, Bovine  19866880845549
  misc_feature (1)..(1): n is a, c, g, or t
ncactctccaacctcagagccacacaaagcaagatagaaaatattggccagtcaatcacaggcctaagagtccatcccaatgggaaaaaaaaaacatcactatgaatttttagaacactggttatttacaaaggaatgggaagaaaaatactaccagatacagataggtaataacctaatatgaaggtgaacccaattccagagtgttcttagtacaatacttacggtatctttccttcaaagatagaaaagtgtaccaaaatcagaaatctaatgtcccttaattaaacgagcctgtgtgactggtcacaaagttcacttacaaaggaaaaaggatcagaatgacagtggacttctagaacccactggtgcaaattttccaagattctgaaggaggataaactcaccctacacagaccctttaatgttaaactttatttatgtacctaaaattcatttgttttatacatacaaacattctacctacatagataggtatatatggaatatatatatatctatgggatatatatatatatcaaatggaaaactgctaaaataaagtaaatgataattaataaaaattaagcaatcatttgaagacaattattagctccaggtaaaaatatccaaaagggaaatgtaagatgatatagtgcttagaaattatttaaaataattaggaagacaaggagaaatgtgggggttggtcaaatacaaattagagaagattgatgactattaaagctgaatgaaaagtgcaaagatgaaaacttaaaattctaacaattatatagtaaacaatgatttccaatgtcattaaaaataaactaaataactatctcaagaaatataagtatgcacatattatttagaaatatgaacacaaattccaggaaagctacaggaaacagaagtattggggagagggaaagagaactttctcttaattaggaaaaaaaaaagtttagaagatatacaatgggatattactcagccataaaaaggaatgaacaatgccatttgcagcaacatggatggatctagagactgtcatacttaagtgaagctaattcatagaaagacaaatatcatacaatagcagtcagtgtgaaatctaaaaaagggaacaaatgaactcacctacaaaacagaaactgagttacagatgtagaaaataaacttatggtaccagggggtcaggcaggggggaggataaattgggagattgggactgacatacacacactatcatacgtaaaataaataactaataaggacctactgtacagcacaggggagaaggcaatggcaccccactccagtactgttgcctggaaaatcccatggatggagaagcctggtaggctgcagtccatggggtcgcacagagtcggacacgactgaagcgacttggcagcagcagcaagtgaagacagacctgttaaaaatactgagttccccatcagtggaaaggttcacacatggacatgtgtgatgtggtggggtggaaatgactgaccctttccaaatgatagtttatctctataatctcaatggagaaaactgccctgctttgcaacagaagatcaagaacatggatggtatcaagaactgtaagggaggaagtcaagttctgactcttacccggcgtgtaaatgttttcccacacttagaacagacaaaggccgcagggacaaagttggggtcatgatagcgtttgaagtgcatgtcaaggagctgtttctgacggaaggtcttgtcgcagtggctgcaggcataaggcttctccccagtgtgggtgcgcttgtgcatgatcatgtgcctctcctgcaagagaacgaggtgaaggaaagtctcagatcctgtcttagggctgctatcccccaccacctgcatgcgtaactctaaagacctttctcttccaagggtccaggcccagaaccgcttgctgagaggataacgtaaacctgatcggggtacaaaactgcttccccaaatcctagcaggtacactcacttctgctgcttctgtagatcactcccaagcatcaggccccagtaccaaattcttcccttctctcaagtcctggacttaatttcatataaggtatatataaaaaccctctgataaaacccaacactgatgagacatcaattgttttctaactatgaaggttcctacctgtctacaagcgtaatcacactgatcacacttaaagcgcttctcgttcttgtgtgacttctggtgctggatgagggcatagcgctcatgaaacacagcatcacagtaccggcatttcttgccctgctcaatgtaggaatgctgctttcgcaagtggacaccttaaagcaaaacacaaagcccaggccaacttgtgaaaacacaaacatctcaaagagttaagaacacatttctttctgcttctgaatatagttactctggctgctatatagaaaatggaaaaaaaggagtaaaaacagacatggagaccagttgagacgttaaaactcaacaggtgagggaaggtggtagtttggagatggcagtgggtatggagggaaggggacctgatgagagacctaagaagctgaatcaacaggacttagtgactgaccagagtgaggaagagaaaggtgggtatcaggaatgacctccaggttcctggcttggaaaactgagcagatggtggagccacttactgagacaaggagtaagtggaacagggctgaagcctgagctgtgtgtctgcaagggggcaaggacatttagagttgaggggaaagattaaggagaacttgaaaatgaaggtaaagaggcaatacttgatcatgtaaatgttgccaggacacaggagaatgggatca

SEQ ID NO: 46794 - DNA, 1375 bp, Bovine  19866880954043
  misc_feature (1)..(1): n is a, c, g, or t
ncctcttcccacagtccagactattctgggttctggtgtccctcccttccctcactgcacttgaggtggtaccagtaccagcaacaactggcccctgccagtcccccagtgcgccaccatcccttgcaggtttcccttacccctgtcaccaccgtaaataacccctcccttaaaggcatttcaataactctctgaacgtgctggctgtttcctgcctggaccctaacttataacagtgagcaatgagaaccactgaatttttttttaacttgaggtaagtggaatagagttcaggagacagacaccgagaaccagttaagataaaaataagagataaggagggtctgatggagggaatgaaatggagcagaaagctatcagtaggacttggggttatgaggggagaggaaaaagccaaaaatggcatcaaattatagaccaacacccctcatgaacacaggatcaaaatccttaataagctattagcatcatcaatatatgatgaccaagagaacgtaagcctggttcaatattctaaaatcaattagtatacttcaacatatcaagccattagattagttattaaactgcattaattaggaatgcaaattaaaacttatcacaactacacacctattggaatgggtgaaattcagaaaatctgatatcaactactgatgaggatataaagttcatgaaaatgagaaatggtatcacctcatccatcttctttcatctccctctgctccacaatgcctcaaagtttattgacaggatatggggctacagcaatggttacctgctagttttctccactccttgcgatgtcattcaaatggaccagaggtaaacactcacggagacagaggcagtctcccttccccgtgcctgctcttccagcgaggtatttggtgagaggagaattataacagaagaactgagtagtgttgttttctgtcatgttatcctttattccgaaacaactcgcaatatatccttaagcatgcttttgactgactgtagttttttttcaagggtcattacttgttctgggattgtgtcttcctgatgccattagaattatcaagccattgagaagcttacatatggtggagcctgggtggttccatccaagctatatggaaacctatctattatagttttccttgtaactacatatttttaaattacaaattgtgctttctctttttcagtgccaggtttcaaaaagagccattagagatttctagatagttactgccttgtaatagtatatttacactgcaagccacacaaatgcagtcaactgattttcagcctaggtattatatcaattcatggggaaagaaaactctttttaataaatggtgtaaca

SEQ ID NO: 46795 - DNA, 749 bp, Bovine  19866881026023
  misc_feature (1)..(1): n is a, c, g, or t
ngagggacactcaaccctgtcctgggctcaggccccagagccgggtgatacgagctggcgggcctcctggcaggcgtctggggggaggaccccgtgaagctaacagtggctctgaagatggcccggcaagacctgacccgcacacagatggaactcaacaccatgaaggccaactttggagatgtggtgcccaggagggactttgaaatgcaggagaaaaccctcaaggaactgcaggagcaggtgctggtgggcagacagggtagggcagggccacacaggtgggtagcaaggaccaatcaccctgcccacagctggagagcctgagagacgactacgaagaggtccgcaaggagcacgagatgctgctgcagttgcacatgagcacactgaaggagcgggaccagttctactctgagctgcaggagatccagcgcacctccacgccacggccggactggtccaagtgtgaaggtaacgctggccctcgggccctagggactgcacaagtgtgtggtctggactccagctccctctctgcaacccctgcagatatggtggctggaggacgagatcgctggcacatgctggctgagggcaagaacagtgaccagctggtggacgtgcttctggaggagattggcgaggggctgctccgggagaaagacttcttccctggtctggtagggtagtccctgggctcggggaatagccaggcctcactgctgagaaaacttcaggttactggg

SEQ ID NO: 46796 - DNA, 903 bp, Bovine  19866881028804
  misc_feature (1)..(1): n is a, c, g, or t
naaacaggcaaagagcagtttccaagtggccatagcatggcctgaagggaagttgcgaccttaccaggcctccttccttcctctcacgaccgccctgcatctgttccctttctagggtttaatccagccattagtggacatgtagggccccagcctggggcttttcctgtcatccctgtatccatgtacagatacctgtccttcggacatgggctggctttagtcactgttgaggatggggggctggggagggtaatgttcctgagtacctgtgaagtgccaggcacggtctgggctgccgtactctatcatctcactcactgttcctggccccacagcagggtgcgtgttgtgctctccagtctctgaagctgtcatagctgaagggcttggccaaagccacatacttaataagcagcagatccaggagttgcctgtttctgacaatgctggtacgaggctggggctaccttcaccaaccccctatctccgccggctgttgcttttcagtggaggatctcacgaccacatccaagggtatttggatatagaggacttccgacgagccacggcagcctcttcagtgatggtggcccgggcggccatgtggaacccgtccatcttcctcaaggagggtccacggcccttggaagaggtcatgcagaagtacatcagatatgtacgtctacacactttttcacaacaaacttttctgtctgtctgcccgctttctgcagaaagtgctttgggtgagcctccggtccccggaagcccatgtggttcctctctttttctttgttgtgttgcgaggcattgggttttcctggctgcagtgtgaagagtgggctgctggtggggagggggtcatggccctaccgtcaccctcttctaaagcctccaagg

SEQ ID NO: 46797 - DNA, 613 bp, Bovine  19866881053330
  misc_feature (1)..(1): n is a, c, g, or t
nggggcaaggaacttctaggccctgggagtgagacccccgacagcaacatccagggcacccctcgatgccccccttccctgccagccctgtcagctgctgggcctcacccaagggttgagcgagggaagaccttccttatggcagcagcgatgtgctgggccagctgttccagggcagccacaccagtaaactccaggaccagttcaggcagggactccagctcaaaggtgacctgggggtgggggtggggtgagggatgggttccagggtgagggatgggctccatgtggaggcgggggtggggaacagaaggacaagaccagactgcaggccccggtggggtactaggggtctcacctgagggggtgtctcctgcagcaccatggcctggacctccaggtagctgaatgtgcagtccacctatggagtgcctgggtgagcttggaccaaagcccaagacccaaagcgcaagacccaccctcttgggagcccagtcctttgtgcagcctggatctcagagccagacctgtctagactccagtcctgcctgatgttggcagcccagtgctgttgggagggcagagtccacaaggacaagaggacaacgtcaca

SEQ ID NO: 46798 - DNA, 1964 bp, Bovine  19866881069542
  misc_feature (1)..(1): n is a, c, g, or t
naccttgattctaaaggtaattagtagtttatcagagaagtaatttttgtggggaaaatttatctaaggtttgcgattagaattctaagaaactgaaaggtcatgtattcggctaacgtgttcgtttgccttttggggtgacctataaagatatagaagagcacagtagccaggttttgcccatgttgttttatttaatttttacaacagccagtgaagtgggtaccattattatctttgttttgtaggaaggaaaataaggcacagaagggtagcatgtttgactccaggtcacactcctagtaggtggaagaaccagaaatgggattcaggtctctggcaggaaagcctagctcttaatgactattccattctatttctctccccgccccccccttttttagtatggaacaagcattttcctcatatgaggattatattaaaacatgatttttaatatctgtgtgatactgttttatggatgtgtcatcatttaccaaattaaactttcccctgttgtaattttaggttgtttataattattcactctgattaacaatgtccttataatctctgattatttctgagcataaaatctgaagctaaattattggatcacaatttgaatattaaaaattcttgactcatatcaccagttaccttgctgatttttttttttttctagtttacttagaatattatattagtttcaggtgtgcagcatagtgattcgatatttttttagattgcacaccatacaaagttaatattttttgttctttgtaacatttattttataactggtggtttgtacctcttagtcttgttcacctgtgtcatccacccccagctcacctcctctctggcaaccactagattgttcgctgtatctgagttaccttgctgttttcactgggttgagagttatcctttaaaatagtcttaagaaaaaaaaaataaattaaaaataaaatagtcttaaggtttaatagaggtacagtgctgtcacattgttttaatttgtattcttcttaatgtttagacttagttgtttttttgttttttttattcatctaccatttgtatttctttgagtgatctacttgtgtccttttcccagccttcttttttggtatttgcctttttcttacaaaatttataactactaatataataagggtattattattaatcttttgtcatatatgctgtagatatgttctttttggtcattttattcaacatatttttgtttttacagttttgggggtgttttttaagcttcaaggtggtcaaaatttcagcagtttcctctatgctctcctattatttaggaatcttaaacataaagccttcctcattctgagatcagaagaccatttacctgtatctttttcaactttggttttcagatttggcttgtgggatcccagatccccagccagggatcaaacctgaggccttggcagtgagagcatggagtcctaaccactggaccaccagggaattcccatttcttttttgtttctgttaatgtctccttatctcttagaacagaatatattccaggtggatcaaaggtgtaacttattgtaacttaaatactctactcatttatagtttttctggcaccttttatcaaaataatcctctttccttcctgatttaatttttaagtatttatttggctctgctaggtcctagttgtggtactcaggatcttttttgtggtgaaactcttcagtgtggcacatggaatctagtgccacacagtttcctgaccagggatggaacctgggcccctgctttgggagttctgattcttaacctctggaccacaagggaagtcctccccaagtaattttaaactgacagctttatatatgctacgagttgtttctggattctctattctgtttatattggctggctgtgatagtgacagtactacactatattactta

SEQ ID NO: 46799 - DNA, 1021 bp, Bovine  19866881095812
  misc_feature (1)..(1): n is a, c, g, or t
ncccaggaaatgcatcaaaacacagcatattctgtttgtgacactttattgatgctgaggggtggggaggaaacctagaagtgtatgtggcgccaagcaaccccaggtgggacagggcaggtgttgagtcctggcccctactgggaggggaagacagagttgccactgaaggcacaagggatgagcagctgccggtactccaggggcaggtgccgctccacgagcacatgcagggagacttggtcagtgaccaggccctgcctgcagcagaggacagagaatgagagaatcagtgccagcattcccatacccagcacctccctgtttccatccgcttaccttcgcaacagcagctccaggtcctctggcctcacggtcttgcgcccagcatgagcagcaaatacctccaagtcgttacaaagatgctggaagtacttgtccaggctgccaggaaggttggggtaggaaagactgttcatgatctgaggggctcctctccccagcctacaaatgtcaaggactcaccacttctccaccatctcctcagccttcttctccatgggcatcttagcatagaagctaaagagttttgcgtagtggttcagtccagccttgttgggatcttgacggggtctggagccagggattcggggcctgggaggaatcctggccgagagatgctttgggagttctgaaggtaacctggagacaagaagtgaacagagttaagctaaatgctcccttaagaggcccctaatcaaagataaatcttgctggctcctgccaagattggggtccttgtgctccttggccagcctgggcctacagttccaaccaattctggtgggcaatgggagatgtggggctatgtagaagcctggtctttccctggggccctgatgcttcataaactggacacaatgtccctgtctcacctcatcatacaaaccactacttgctcaggcccatgatcctcaggctttagcatagacactcccccagctattgctgcctgtcccat

SEQ ID NO: 46800 - DNA, 1730 bp, Bovine  19866881106926
  misc_feature (1)..(1): n is a, c, g, or t
ncttttgcagcccccaactagaaggatcatacccactcaccagggtgcagaatgtcccccatactgcagacacagtcacgatctggctgaaagggaggaagaggaggtgggggggatagtgggaggagctggcccagcctggagggacctggcaggactcagccaatgtgagggagccagttccctatagtcccctgtgagaggccaaggcggagcctgaggctgggcttcgctctgcctacctgctggtccaggctgatcttagggatccagcccaacccagcctctggggagagagagcctccaagggctatcagaggagcaggggtggctgctggcttctgctctgtccactggtaccaggctggggcaggtgccagcaggggttgaggtgtgtacaccctcacaagctgtcaagcctgtttaaatttccatgatgtctagcagcccatgccactgcgctgtgccatctccacacacagcaatcaagtgacacacctacagccatcacccacatgaagcgtggatcacctcagtcaggcccccatcagagacagatccaagtcagatcaagataacatcacctgacacatgccaccaacatgcatgtcccctgcagatctccatcacggtcagtaacagaccaagcatttgtcatcagtcacatcaccatcctcatcaccgtagcccacaagaatgtgctatcatgaccccactctggctctgcgataccccacagctgtacacttgcacaagcacaactacacatgcatgtgctgctgcacacacagacaaaagttcttggaatgttcacacaagagtgagccctgcaagaacagggccctgggggcctcctggggaaagagatggtgaaagtcaagagcaggcacctaggagggggaagccgggtttaccttcaggcccagtttaacagctaagagggctctggagtctcccaccctcgatctgaatcccctagagcaagttacataactactccatgcctcacttcactcattcctaatagagagtaacactacctatcccagggcgggaaattagggggattaaacgagttaattcaggtaaagtgcctagacaagcctggtcccgtgtgagtgctccacacgggtggagtgtccactgtacctacagatgtaagctgggatccatgtagcactcaggcagtggcccacagaccccttcaggcttccctccgaggggactggagtgctgggctgcacacaggaggaaggagaaggggaggggagcggaggagacagagtggttttagggaaagagatgctgaagcacaaaagtgtaggcgagacgagaagaggttaggggcggttggcaggaggtgagagggcgggggtcccgcctggatgtcgctcccaggcgggaagagccagagatggaggttcagcgctcttggcgccccaggcggccccgctggcctggccacgtctgcagcccccgcccgcggccctcaagggaggagctggggtgaggagggaggcccgaccgcgacagcaggcgccgggggcccaggaaaattgtgtctgagcgcgaggagttggggactgtttagcggcgaaggagtcttaagaaaagttgggccctcatcgacgtgtgtgcgcacggcccggcgtctgtgcgccagccggtcccgcatggcccgctctccgccccggcccgggaccccaccgggccgcccctcaccgtccgcg

SEQ ID NO: 46801 - DNA, 1808 bp, Bovine  19866881151860
  misc_feature (1)..(1): n is a, c, g, or t
ncccagtgtgctgtccccagtccctgccagctgactatctgctgtcttctcgtggttcaaaaatagaagtcatattaaaaaataaattgaatagttttctctccttctaagcagggagagttcttactcttcatccttttgaacctttaagatttttaatatgttgcctattcaaaaaagcaaattaagaagttaaatagaaaggaaagaaggaagggagggaaggagagaggaaggaaagaaatgccagttagaaaagccattgctggagatggagcagagagaccagagtttagattatgcgattccataaggaagggctggattgcgcgtgaggtgagggacagcggagccaggtgagtggccagagcttcctcaaggcctctaaggttgtgtctgaggtagtccagggctagaagccctgctcttcctgttctcctctgaaatgcagactcagtctgtactggttcagtgttctctctggttctaatgtgtatttctgaaacatgacattaaactgtaataagtaaatttaaacctcctgagcacattccgtgagcattcattagtttgtagtttatatactgacaacatatatttattggatttgtctttcttcccttcacctcattctgaatgggttcagatttttaacattccctcctcttccgattgttagagtaattcataccattgtccagaacttggataatatagaaaaggacaaaaaaaaaaaaaaaaaaaaacccagaacacaaaaagcaaaaacaggaaaatcatcagtaatctcaccatcaagagacaacggctgttattcatgttgacatttaagtggctctggggattgttggtttccattagttggggattttgttagagtttgacattgggctgagtgctcaggactgggaggccgttgttgctggcaggggagcagggcctggacattattgcagatcgtgtgcctctgtgtggctttgctggcagtggtggcgagtgacggtaggacaggaagaaggtggattcgatctcatttcaaaggaagaccaatccatttattttttttaagaggcttggcagcttgtggggtttagtttgttaaggcactgaaacccttggtaggaaatgggcagtgctgaaaaatgatttttttagaacctgtttccaggtagacctgcgggtcttgctaaggggatcagagtgacggcttttagaattcgtcaaactgatccctggtgttgtgggcacggatgctgctgctttcttgcttgcccaggagaaatgctgatcaccagtggaccttggtttctgggaggcaggtgctgaggtgctgccaggttgccatcccacagggaggagcagccctccttcagctgtaagagcctcctgtatgtgcttttccttagggaggaatgggagctgcccttctgtcagatcctgacaaaatcgagaaggtaagtcttgcccttaagaggtctcttcagcgtgcctgtgagctagagctgttgggagcaccttccctcccctcccctgagattgagagaatcactcactccaccagggtctggtttttaaaagacttcccggtgattttgacatgcagccagattcaggaactcctgagccatcctgcagcagcctttggtgttcctgaaaagcccagggctagggacgtgtcagccgagagccaagggccctaagaactcatttagaactacctctatatgcctctcttccttctgagaagatcatgagagcacaggtcaggctacctgtgggttgtggacatgctcagtggccacatgtgt

SEQ ID NO: 46802 - DNA, 1854 bp, Bovine  19866881420698
  misc_feature (1)..(1): n is a, c, g, or t
ncaggctggagtgtatgtggacagttgtgggtgtccacccttaggggaggggcctcaatagggggtggttttcttcacaacatgtatatacaggcatttccgttatcctctggcctcctggcttctcccacctatgctgttagctctgtcttcaccactgcccttctttgggcacgttgcacacaagaggcagcagaattcgcagctcacctcagaagctcacttcatttctgtcttaactatttttaagtggcacctgggccagcaggccctgtcttgcctgtaatctgtcctaacagcctagcctcttggtccagtgtcttctggagggctctgccttagcctgtccctgagagaggcctccttcgctggttcttgtaacccggctgtctgctgccccctcctgtctagaaccagactggcaatggctgcctgaatgtctcctctgctcttctggacagggatctagtttcttggaagagggctcttgggatcaccttccctctagctttcctggcccaaaatttttgatgagggaagaagataaagatagcaaggtcacagacacacagtgtcatctacccctttcttggtctctgactcttgatctggtgttgttacttccctgacactttcctatgtgactttcttgatctgtctttggagtcctttgcaattaatgtgcaaaataaacccttttaagtaggatgacaatgttgtcttttcctttcccagtttctctgctgtatatctgactccccaaaagggaggacagggcccaggacctgttcaagctctcctgttcctacacttggcagaccctggcacagcactcagggaacatgccttcagacaggaatggagctgtgagccatgtgttctcaaccagtgttaggcctcagaatcattttgaggagagaccatgttggacagagtcttttgaaaacatatattcctaagccctgctcctgaacccggcctttcaggaaagatgaggtggaatctatggtgctgcatttcttaggctctccagctgattctgatgcttgtcctggcaaaggatgacactgtgtcctgcacaggcatgtatgtagacccaaccatacattcattccctcacttattcatttaccaaatacacgtatactgctatgaaccaggtaagggactgctggggctggggctctagtggagaaaaaaggtgagctcctttcttcacggagcttccatgtaggtggtgtgcaacagatgcattcacatggacccatacatggacataaatgcatctttgccagtgggccacacgggtctggagtgaaattcatcggtacaagcagctgtggtgattattctggaagaggcagatgttcttgtgttctcccctaccatagatcctcagcactcttgtgaaagggacgcgcagacctgtgacctgcaagattcgcatcctgccatcggtaaggatggtgtgttacacctgaaggtccattttctctgcagatgttggtcggggggtgtgaatgattcctgaggggacgagtcaggtttggaggagtggggagatctgagcccactttgggagctggcagctgctccctgtgtggctgcagtaaccaccctgtgtggccccatccctcagctggaagacaccctgagccttgtgaaacggatagagaggaccggcattgccgccatcgcggttcacgggaggtgagttgtccccttgctagtgaccgacttgcagggaggtcctcagccattttgatgcttcttcaccagaccccaggcacctaccagcttctcttctatgtacccagcctagctctttgcttagctctttgacccccgctgaat

SEQ ID NO: 46803 - DNA, 2042 bp, Bovine  19866880412900
  misc_feature (1)..(1): n is a, c, g, or t
naaatcccagggctgatctccttcagaatggactggttggatctccttgcagtccaagggactctcaggagtcttctccaacaccatagttcaaaagcatcaattcttcggcactcagctttcttcacaatccaactctcacacccatacatgaccactggaaaaaccatagccttgactagacggacctttgttggcaaagtaatgtctctgcttttgaatatggtatctaggttggtcataactttgcttccaaggagtaagcatcttttaatttcatggctgcagtcaccatctgcagtgattttggagcccaaaataataaaatctgacactgtttccagtgtttcccaatccatttcccatgaagtgatgggaccagatgccatgatcttagttttctgaatgttgagtttcaagccaacttgaaactcaaagagtagaggggattaaataggaaatagggagcaactggtatattttacccaacacccctgaaattgtgaataagaacacttctaatactcttcactcattcattcactcatccattcatccaacaaaaattgacgtaatagttataccccaggcaccctgttgacctcctaccaattggaaatatgtctgtggagatggtaagtccctccctcaagccagtttagctgagactgactactacacagataattgcaaccagatgttcacaggactggggtgaggacaaccgggagagaaacaaggtcaaagagaaggaatatttaatcccacctaaggaaggagtttgaggaacaaactttcccaagtgtcataaaagatgagcagaaaacattgagagacagggccagcaagggagaaaggagactgtaagagtccaggtctgaatgaacagcatgtgccagggcccagaagtgacacatcgtggcgactttgatgaagctcacattctgcatgtcagcccagatgagctagctgatactgcgacagtgtctgcatccaggggctcaccaagaagtgctttctttcttcttgtgagagtgtgcagtgggggctggttgggggccctgccgagattcaggctagcaaagagtttccttctggaacattggcagagcctggacagagggagagatggcatggatggggactgcctcttagagcttctgtctgaaagggacacacctgcctgtgctcaggtttcgttgcaaggctgcacctaagtccagcagaggagacaagcacagtcttcatgcatggctgaaaggaactggaggtatttgttgatgacagtaatgaccaccacagtcagtgtggcaagaagggagggggacaaagatgaggcggtagcagaggagaaataaataccggccaggtcaggaaggcccatgaccgttcattctaaattttttactgtatccaggaagaactattgcagtatatcaagtctgggaatgacacaaggaaatgttcattttagaagcattaagttggagatagcaggactggtgttcattcacttataccacaaccatcctaattggtgaaacagagcagaataaatccgccttgcatttggtgaaggcaagagatagtcaatcaacaggcttaacatgaatttataacatttcagaagcgctaagtaggaaggaaagtgagaatgggataatggcttggagctagtagcttaaaggtgagagaagggggtcattagtcagcattagaaggtacgggcagcagaactgggtcctctcttagtaagagggcaaatgagataagatacatggaaatatctaaggcaagaggcttctataaacccactgaatctgaatttagagttggaatagctcttttgaagcattcagtccccatggacacagatgtgacaccaacccttttcaggagagtggataacagacaagccactcagctggtttattaagagggaaatgttcacaagggcttaaataaagattcaagtcaatgggagctgcctttttaattgataacaggactgggaggtaaaggaaatgtgagatgctcgctgc

SEQ ID NO: 46804 - DNA, 1052 bp, Bovine  19866880620920
  misc_feature (1)..(1): n is a, c, g, or t
ntgctccttttttgtttgtgaaaagttgggtctttgtttcttgtctaaacagtgtgggcgataatattttgtcttaataattagcaagtttattatgatgatcaattaagagcactttgtaaactgtcaagtgttttgaaacgtgttttctctataacgatgaggcggagaataaatacaaagtgtagctaattcgtggaaatctctgtactaaagttagaattcttaagacgaattctagcccaaaatatgttaatttggctcctcccgtgtattgcattttacgaatgtgaccacagtatttactatctcatgtagccttcttcagtgtgaccttgatactcctttcatggttgtggggactttatcgtatcttcttgggtctaagtggactagggactcacttgtgcacagtaaaatgcagagatgacttctgaaccaaggttgtaaaaggccaagcagctttcactttgttccccgggaatcttacttttgttgtccttccacactgcagccaccatgctgtttggaagcccaaactagcccacacagagagaccacatggagaaaccctgagaccacatggagaaagcaagaaagtggtcctaggccagccagtgcccacccccaccaccccagctacatccatcctccagctgcaccccagaccccaagccagaaccctagaaccaatccagctgagccctttctggatttctgagccacaggaaccccaggaagtaattacaagccttgttatcatcttgagcctttgttatcatccaagctgtaggatagtttgttacacaaaagataattgaaacatcccatgtaaatctgataatggaaccaatggtctgattatcaatgatgtgttgaaaagactgttgttgcagttaatcaaatgtgcaatcccttccagccccacacacccccacgtacagccctttggctacttacttatccttttaatttcaaatgcaccttctagtaacactctagaggtgattcccttttatgctaataagcaagttctagcttcccagccctac

SEQ ID NO: 46805 - DNA, 1032 bp, Bovine  19866880873916
  misc_feature (1)..(1): n is a, c, g, or t
nacaacagaagtctactgaactttgtttaagagggtaggcctctctatctggctcctgtttctttctctagggccagaaagagaagagatggagaaacgggttggaatagcctcagagttaaaagctgctgaactgtcttgtgggtttccttccattgttcagaacaaagaacctctttactctgctaattttcattttctgctcctcattttcctctctgaggctgggaatgatttaaattattttgtaaaaccagaggaatgggactctgaatggtggaaactgatctcagtgagtaacttccattaaaaaggctcagctgacctatgtctgctgaagcacctatttctaaatttaattaatgtttcacccttgtgtatttttatacccaataaaacacttgggggtggtaggaaggggacaattccttgaaaaacttgaagttgcatttttgcagccttagtcacggatatttatgaacgatccaatgcctgggctaatttacaggaaccgtgtctctcctacctcaatgtttgcccagggacctacatcagagtagaccaggaaccctgaattacacctctatacctctagactcaactttcctccctgtcatccttttgacaaatgttgagatacttatgatagcttctaactgtgaagtttcactcattcagtttcactcagccaagtgatgaaagcacccattcttaattctagggtaaaaggtaaaaaaaaaaaagacagggagaggaaaaacatgattatctttatctccaacaaaaatgtgtggggagaaattaaagctaagtgtgaaactctttgatacctttgtgggatgttaatgcacgttggagaaggctatcggtctagagtcctggctcccttattatttctgtggcctggtgataaagccacctccttaatggcagagaagtgtgcacagactgaggtcaagtgtgaaaacagcaggatctgattttcttggccagaaactcatcttagggaaaatttagaaagcctttctgagg

SEQ ID NO: 46806 - DNA, 1016 bp, Bovine  19866881010183
  misc_feature (1)..(1): n is a, c, g, or t
ngatatttttagttttggagagcccctcgtcttagaacacattagatctacaaaccttttctgagtgctgcaaaacattccctagtgtggggatgccatcattttagcaattcccctgttgttggacgtttaggtcgtttcccagcttttctcagactcgccctaacatccccacaaaaacacctgtcaacacccaagtcgtcgcgcctgtgcacagaggtgcatcaagtcttgtctgttcccggttccctttaatcagaagtaactgggatgcctttccctttgagggccctcccccgcccctcccttacacctacgcacccttgggccctgtaccagggacctctcccgagcccctggttagacgaggctgttctcttccgtattcacatcaccctctcctcagtgcaccgccagtgcgttaatattttcatatgctctctctgttgcttatcgctgacctgccagaccccagggaatgtgactttttgcacctctatttccccagcacccggcccagggtcccctcccccacgtggtaggcattcgataagagcttttagaatgaaggccattgtcacagagccacatccacaatgggatgaaaacccatggaaataaacagtatatcagcagaaggaaaaattaagctgtcaatctgctgaacagcaaacatttcttttctatattccaggtcttttaacgtgatggaggagagagggagggggtaagggaagctaaaacctaagggagccagggaaaggctttgcttttcataatctggaaagtgattgacacatcactctacagccatcgccccggtgggggacgggcttggcccatcactgtcccccgggtgaccatcacatgctctctgtctcgcccccgcagggaccacggtgatgcggatgacagcctttgatgcggatgacccagccacggataatgccctcctgcggtacaatatccgtcagcagacgcctgacaagccgtctcccaacatgttctacatcgat

SEQ ID NO: 46807 - DNA, 1308 bp, Bovine  19866881306010
  misc_feature (1)..(1): n is a, c, g, or t
ncctgtctttcctacagctgcctggcgagtcacacttgacaaagccaccgaagtgtcctagttctcatccctgtgattccctcttctttttaaaacaccaattcccgggaggcagagatcacaggccaagttctaacagtgcttcctcttcaaaggagttcttgaacagaatcttggtttgtatagatacaatcaaatgcccatgacattggatcgagccctaacttgtgactggaaatctgccccattctctgtccgtatcgtcctcctgccccctgctgcagggatgacctactgactcacacactgttagaaagtcagacattcttttttctttaaggaaaatggaaactcagatggctatatctttttttgatttggggaaaaaaaccccaatgcttgctacggctgttataatcttccaggatgtctgtacttatttttggctttaactttcagtgggtaacagttactgcatacttccaatatgccaggctaaatgcctttcataaaaaatttaaaacatcctcccaataatcctgtgaagctagagctagcacagccttccattttcaagacgtggaaagtacagcccagaaaggtgagctaactcactgaagaccacactggctgatcagtggtaaaaccgtagtatttgaaccttggctcctgccacagagcccgttttcctagctgctatgctcagctgcatgattaaatgaaaacaaaaaaaaaaactgtctggcagagctcacaaaaggcttcatcaggagaggtacatttttcctgggctttgaaggatgtgcagaagttttccaagtcaaggggttgagaaggatgctaggggaggggaggggaaagttattatttctctttctctctgtggatgactagaactattttacggtgagacagattttttatttcagtgacacctcagggtccccatcaaggcagagagggatttgcccaaattgaagagagaatcctgactgcttacatgctcggggaaataggatatgtgcagagtccaaaatcccatctctgtggcctgtctgcttcagatgaaacgtctctggtgttgggtttaaatcactggctgctactttagaatttctctggctgctgcagaaatatttaaagtgtatttgtcttgcctgctcaagtgttggtttgctgcagcctctctgccttaattctgtaaagctggagactttctccatttccttttctaaacagtcctgtggtgtcaatgagaaggatgagttgtaaatgcaagagagcaagggcagtggaccagaaaggcgg

SEQ ID NO: 46808 - DNA, 1659 bp, Bovine  19866880244468
  misc_feature (1)..(1): n is a, c, g, or t
ntctttgcaaccccacgaattgcagctcaccaggcctccctgtccatcaccatctcccagagttcactcaaactcacatccatcgagtcggtgatgccatccaaccatctcatcctctgtcatccccttctcctcctgtccccaatccctcccagcatcagagtcttttccaatgagtcaactcttcacatgaggtggccaaagtactggagtttcagctttagcatcagtccttccaaagaacacctaggactgatctcctttagaatggactggttggatctccttgcagtccaagagactctcaagagtcttctccaacaccacagttcaaaagcatcaattcttcagcgctcagctttcttcacagtccaactctagcatccatacatgaccactggaaaaaccatagccttgactagacggacctttgttggcaaagtaatgtctctgcttttcaatatgctatctaggttggtcattaggaagactaaataatagtatctaagtatctgatcaggttttggcacagagtttgcaatcaatgaaaatcattttgtactgcttactcccaggtagagctagcagtaaagaacctgcctgccaaagcaggagatgaaagaaattcaggtttcatccctgggtcaggaagatcccctggaggaggaaatggcaacccactccagtgttcttgcctggagaactcaaaggacagaagagtctggcagactacagcccatgcggttgcaaagagtcggacacaattgaacacacagacacacagacacacacacactaactcccaggacagatgaatctacttacaaattttccataagtgtagtgttagaaacttgcttacaagaagttctcctaatcctacaggaagtctggcctgttggcctatttgccctttgctgatgttctgatcctgaccccaagacgatttcctagtacagacacacgctgatctttcctgggtttctggataaatctttatttctcttttcttcagtcttttctgatctcaagacctttactaccacagataactcaggacagattctgagttctgctttctaaaaggaagccaaatgattttccctttaccttgaaattatgctgattcaagaaaatggaccatatgctgagctctctgatatcaattccatcgagcagaggtcagggttgtacccacccatggctcgtgtagttgccaaaagtattattcaccttactttgggttccaaaagggattcaaaggaataatgaaaggagcttgaacaagttggaactcctcatgttaagcaatgtttgagcgtgccatttcttaacagctaagtgaatatcttcttgcccagaaaaaatacttctcactgatccaaaataccaatgtagattcagctttctcattatcataatcagagtaaattggtacaagtttaaacgaggtacaaagcacatgagtttaccaaccatatttttacctttgcataataaatctaaattactggggaatgggggttttatttataaaccatgctatttcttaagagtgttaaaagcttatgaaactcagggaaaatttaagctgaaattgtcaataccccgactaagaccttgactagtgatcaagtcagtgacagggcatggggtcag

SEQ ID NO: 46809 - DNA, 1634 bp, Bovine  19866880404292
  misc_feature (1)..(1): n is a, c, g, or t
ncctgagagcagtggttcagagcccctcccaagcccgggactagctctggaacaggggccacgctgggaagagctcctcgggcactggtgttggcgctgcccttccagctggtgtggggactggtagctgcctacccctcgaagctcctgccaccactctgctttttagggcagttgatcgggctccttcattaactacagcaggccgtttccattgcaaataaaaaactgccttcctaaatgcctttcatcctgaggtcaaaggctctgccattgttctgtccaggcacctaaccctgctctgtgctccggctggagctccacaagtgccccccctctccctgaacctccgctcccttggaacccactcagcgacagcttggcgggaagtccctggaaattgaaacagcatctactgcctagatgttcaaatgttgctaactaagatacagtactatacagtatctaaataatagttaataattattgacataaattattcttttatattatacattatattttatatattatatatataatatatatgttaagttaattaacattaacttaatactgaaataatatctaacaaggtcacactcttacctgaaacaggataatagttataacttctgtcataactgttagaagtaatgacactaaagcaaagatgagtagagtctatcatagtcacggagagtttttacagaaatgacttagaagatttttgcatttgcagattacacacacactgtgtgtgtatctaagagatactcaaagatctatatatctttttaaaatttttactgattctttaaaaaaacagcatgtgggccaaatgttaatagtttatatatgtctctggggacataccgaacatcaggacaaagcacagactgaccagatcattgattcgttcctgaaccgcaaagctctgcctggtgaccaccacacatccaggggcttgagcagagctggtaggaggtctaaccccaggtgaggccagaagccttgcccgcccaccccggcagcctggccgctgggcacactcacttcctctggttgtccgtcagggtgatgccctgggccgacaccttgaagtgcacgactgtggacaagggaggtggctcctggactagggtcatgctcagggccttctggatggcttggtggcccgtgagggactccatctccacggagttcaggtaccacacattgcaggctggaagacacagggggaagcggcgttaatgcgtctgccagactcaagggccctggggcttacgaatgacgtgcataaattcatggccaggtgcatctggggcaagtgccctttatttctaattccaaaggtgtagacagcaagtgactcagagacacacacacacccagcactggagtcaaggagacttcgcccactggtcaggatgtgtttccacctctgctgagttattcatacctggcatccctggggggatgaggggactggaggcacctcctcagtctcagtgtaggcctgggtgggacgagagcccaaccacacctgcagttaaggaaacatcccgagaggggagtgtgcagtctggaccctgactatccaccctgcaaggagttctaaaagcacacgcatc

SEQ ID NO: 46810 - DNA, 2889 bp, Bovine  19866880563746
  misc_feature (1)..(1): n is a, c, g, or t
ngctggagccagtgttactgaatcccaagttcatattgtttgtggcaaaacagtcagtcccattgtacaaggaatagcaactctattttggaaagccaggagaccaagaagatggaggactagtgtcccagagaaacatcttccctgaattagaattcaggcttcttttaaattaaaaggagagggagtgtggctggttgtaaaattcatggtgctggaatccttcattcttccagcttgtctgcctaggtcaggtcaatatgttcctgcaaacctccaacaagacaaacttctctgttctgcagccttttatctctatacagatgggaaaaggttatacctttaaaggccagagccttgagaatgggctttcctatatatctcaggatatgggcaacattcttttataaaatgttcagagccaagatgactaagcacaggcaacagagcacaagagttagagctaaaggaataaatccaatatggagtaagttgtgttcttctcggttacaccaggagccataaagaattgctgggggaacatacctgggccctattcaatgggtctgggcccacatggaccagggcacctgtggcctctagttctccacttttcagcagaagaacctactccacaattgtaattagtgaagagaggaacagataaacttcacccaagaaacctcatctgacacaggaaatattgggatttcatggaagactcacaagggtgaatgtaacttcatgtgggaggaatgtagtgactcatggccagaggtccaaccaaggtagttttaaatgtgtgtgtggaattctttccatgttttcccttggccctggggcagtctttgtaattgcttcatgggggcatgccagaggtcagttagaggaggccccagctctcctgactcctcttgagttttttctctccttcatccatgaaagaggtgccccaccttcctggtcagagacacagaataaagacaacctagcttggccacagtggccttgtccttaggagcaaaatcaaaggttggtagttgtttaaaagagaaatctaagacagagcaattaaacaactgaccagtaacctgacaggatttccagaaagctatatcaatgccattgaaggggagaatgtgctttttaaaactcctaaatgggattcaagtcttccgttggaaatggcctgctgctgctgctgctgctgctgctaagtcacttcagtcatgtccgacttattgacaaactttcaggaaggaaaagactagttgagatgtactctggtgcaatttctgggctgggggtggggagtagggtccagatacttgcctcacagctcccttggggatgaggactcttttttttttccttgaaattcctgctcctaacacacttgaataggttttgttttctgaaacacccagtttattgattccttgactaggaggattcctttgtggcaagctctttgactctttgggtcttcacttataatttaaaaataaaaatactgacttcccaggtggcgctagtggtgaagaaaccacctgccaatgcaggggacagaagagacgcaggtttgatcccttggttgggaaggtcccctgcagtaagaaatgacaacccattcccttattcttgcctgtagaatctcacagacaaaggagcctgggagacaacagtccacagggccacaaagagtcagacataactgaagtgacttagcacagaaatcacagatttccttatgggatgcccatccagcaacatgcaaagggagcccattttagaggacagcccttcccagatcctcagaacacacacacacacacaccccaggtacacttgcaagaactcaggggcccctgttctaacttttccagaagagacaagtgtgcgggggagcagctgaggggtggcaaatgatggtgccttctcagagatcaagaaattctcaacagtgcccaccttctccctctccaaagggacagccctcatggtttgccacagaggcagaaggaagaaatcaagattccaggagtcaagattttcaaataagcattctttgagctctacaatgggcatgtatgtgctactgtatggtctgatggttctgtggggtgaccagcactccgtgttcatctcaggagagtttggtaagcaacatccaaccctgccaagctaggggagcagggcacagcagactccccaacaaagagaacatgcagagccaggagtctgtgctaaaagagcaaacgacccaaaccaagctcctcagaagctaactgaattgtatcacaaagtgatatctcaccaggatgctccacatttcacggaaagtcatatataatttttataaaatgaaaaaaaaataatgctaaaaccctattatgtttatatggacattttcagaactgctagaatgtgagaagtcatcccactatcaatgtgtatgtaagatgttaaatccatgtatctaagaaattaaaacaaatgaccacaatgtcctgtgcaacctcaaagctttgatgaattcttggcagttagcaaatgcccaaggtggaaagcacacaaatatttgtattttccctgaactcatgagtaatggaacaactactttttcctgtcatagcagtctttgtgtattattcctcatcccaaggactgccatctctcacattctaggctctccttccactctcatcttgtagctgtgtgacttgaggcaattcatcttaccctttccggtctgtctttttctctgctaaatgaacaagatgaccccaaacccaaggggtaatcagttaagtaaatgtgaaagagctctatcctcaacagttaccacaaaatgtacccaaatgccctcggcagatagtctgagctctg

SEQ ID NO: 46811 - DNA, 1790 bp, Bovine  19866880579142
  misc_feature (1)..(1): n is a, c, g, or t
ncagtcccgtgggaggaggggcagaaacttcattatcatctttattttgtatgactgcacagtttctacttctttcatttcatgttactgatcgataaagtagcaagatgtttcctgtgcccattacagatgactgagaaaagataaaagtccaattatctccatttccattactaccatttattataactagggggtagaaagatgagaagaggaaagctgccctcccctagagctcacagtctgagagggagcatgtctgctgtcttagtgggctcaggatgccataactaataccacagcctgaatataccacaacagaaatgtatcatcacagtcccagagactgggggtcagagaccgacgtgccagcagggccgatatctcctgagccatctctcactggcatgcagaagctactttcgctcctctccttgtcttccctctgtgtgatttccccttgtaaggacaccagttgtataaggacagggccacccataggatcccattataccttcaccacctctttaaacctagacagcatattaaaaagcagagacaattattttgctgatcaacgtcaatctagtcaaagctatggtttttccagcagtcatgtagggatgtgagagttgaactataaagaaggcagagcattaaagaactgatgcttttgaactggggtgctggagaagactcttgagagtcccttggacagcaaggagagcaaaccagtcaatcctaaaggagatcagtcctgaatattcattggaaggactgatgctgaaactgaagctccgatactttggccacctgatgtgaagagccgactcattggaaaagaccctaatgctggggaaaactgagggcatgagaagggacagaggatgagatggttggatggcatgatcaacttaatggacatgagtttgagcaaactccaggagacaatgaaggacagggaagcgtggtgtactccagtctatggggtcacaaagagtcagacaggactgagggactgaaggaaaacaacaaaacctcttaaaagaccccatttccaagtccattcacattctaaagtcctgggggttgaggtaactacctatgcctttggggccacattcagtccgtagcatccaccatcaaaggcctgagggggccaatggggaatgaaggccattctcacaacgtcatccaggcagatttgggaaggtggtctgtaaaaatgctcctctggggaactccagtgaggggtccaacacaaacctccaaagaattacagactccatgcaaagggatggctcccaaaatgccaatcttcaaggctttattaacttacatgcctccttcaagcacttttccttaactttatcaggcgtgaccctggaatccctaattaggttcacattcctcaggaaactgttctcccactgagagttaaagcccaatttagcctgtctaatccgcatgagaacacaccgccctacaaatgcaattaagccttattggtcccgcctgtccccccacagcccctggatgcaggcgggggttggggggtggtggtggaagagagaaggaaaatcactgggatcatttcactatagtttctcttagataagtcttctaaaaactatttttacttttcccataatttcttgcaagaagcccacgcatgggagaacacccccctccccacactgtgacccaacggcaaggcactttaaaaacactgggtgcaccgcaaagtgacagaggggggctcagatgtcagcggtagaacgaggaagatg

SEQ ID NO: 46812 - DNA, 1521 bp, Bovine  19866880732702
  misc_feature (1)..(1): n is a, c, g, or t
ncagatgaggaaactgagacttggcggacttaagactgctccaggatcttaatgagcaggaagccagatctggtctggttctcaggaggtgttgccatgggcatggggttgctgcccgcaggaggtgggtcccgtccactgggcgtgacaggcactgcgaagggccgtgagtgaggccccagctgcgtgccaggcctctgggcgctgggtacactggtagacccagaggcacccccgagcacacgtctcccactcacactgagatccagttcagaaaaatcgttctttctgggtgttgcatctgcgttggccctctctgttcaatggccactttgtgaagtatgaactactccgttctgaggaaatataagcctattcatattagccgataaaccctttcctttctagcattaaggaatgaaatttgactttccaaatgttttctgtggaaacaaattggagagctcatgcctgccaggcaggaaacccaaccctccagtgaaagtcagatcctttcttggtgataataagcacttgtgtgtgtgtgccagacaaattgagattcctgctcacgtcacatccctctggtcagagagcagatttcacctggcggactctggacagaggccacctcacatttgtgcccacaacagcacagctctgtctggaaccagagtttcatgtgccatagacagtcctggcatttttggaaagcgtggagactgggctttttttcactgtaagcttatcattggtactctctctaaatgccgcacttttttctgaatagctgaagtgtgtctcagctgcacgtgttaggcaattcacatgaaaggctctaaactccggggtcctcacctaggaagcagggctgatggctgttcctcacagggttttttttttgacaattccatgtattatcacacgaaaggcatttgcagcatcagtgctggtgtgggctgatgttcatcctgctggtactagtagataagatagtattaagtgctcttcgctaaagtgaagtgacactaccaagatttttgtaacacggttttctgaattcacactttcctaattggcggctgcatagtttgctacttcatgaatagaatgttatgtatttaagcatttaccagtattgcctatccgagttgtttgcagtttttctttagaatttcagttgcttctaatgattttgtacactgaagtatgccctggtgacagattctcatcattacatctttgatcatttttactatttctattttccccttagatagtattcacacaagtagtgtaatcatagggacttttgaaggcctttgtcacacactgtgtcacacacagatcgaaatagacatttccaaatcgctaagtgaagtaagaaaaacattctggtaccagcactaggaagataagagttcataaagatagagtcagtgctaatattatgaatactggtacgatattaacaagcttccctggggctcagatgttaaaggatcgcctgcaagcaggaga

SEQ ID NO: 46813 - DNA, 4064 bp, Bovine  19866881028899
  misc_feature (1)..(1): n is a, c, g, or t
nctgctgacatgaactcgtgtaggttttatgggaatatgaagactttctagcatgaacacaggctggagacatgtagaaagcatagtgacatagatccccattgcggttaaaaaaacctccttccttttagttatctcctcaggataaatgaaaattaagccatttggagttctaaagttgatatatttggattgtcttcattactcttattagaaccaatttcttaaattgtagtctatataaatttaatttctgttgaacattaacaatgataacagccctccttctccccagccctcctccaatggagtgcagtctgggtagggaatgaaatatggattgggaatgaaatatggatctagccaagcacagacttgagttatcttgttaggcttctgttcttgaagacttataggcattagaaactgattagtaacgtagttctaattattaagaaagtttgagattgaagccaactgccctctgctagtggaaaaagtctgtgaacagtttacttcagccccctgcatagattcaatttacatataaactcagattcttagagatacacattgagatgtctggtagtgtttgcctacaaagtgaaatagtcaggaaaatgcttttaaattggatctggtagagtgttgtcagttgaaacttaatattcttaccatttcatgcttcatcataacttcatagcccagtattgggttggttctgccctatcaaggattgatggcaggaagtggtgcctgatttcaatgctgggagcaggccatgtgcaatccatttttccattttaagtgcttccataatcagacacagcttcaattaggaaagttagtataggtttttcattttcatgtggtgttaagtcaaacgctaagggataaaaatggaaaccaggacccttaggggaagcacacattttcatttatcctggaggcactaaagaccaattgggtcactgagctgtttctaaatgtagaagatagttcccaaatcaattatcaggagatgctgtgtgaaaatattggagattattgattgactgaactatatacatttcttccatgaatagaacacagaagtagcctttatgtaatggagtatacctaactagtaaacaaaaaagtatatagacatgtgttagagtaaatttttaaaaaattggaacctcaatccccagtagagaagttctttgtgtggcttctttgcagtcttccatttctggtgcttgcataaacttgaatctatccacttgagagtcaatgccagtcaaccagaaggtcatgatgcatcttaaattctgttatgatgtcaaagttatgggctctggcttcacattcaactgagggaaagagctgtataatatgataaaagatacacactgttagtgcctatagcaaggacattgtgctaatactacaagagaatcacatgagggatttgtgaactctgctgtggagactttcagtgaggagcagatatttgaggaggaccttgcaggataagcttgtctggctacagtccacagggttgcaaagagttggacatgactgagcaactaactcttcttcttctttgcaggataaggggcttccctggtagctcaacagtaaaagaatccacttgcaatgcagggagatgtgagttcaatccctgggacagggaagatcccctggagtaggaaatggcaactcactccaggattcttgcctggaaaagtcccatggacagaggagcctggcgggttacagcccatggggtcgcaaagagttggacacgactgagtacacacacaggcaggcattgcaggataagaggggttttcctgaaagacacaattaagggaagggcattttccacaggaaaaataagcaaacagttaagctatttgttcagaggtgattggataattctctggatagaacatagggtggtattgaaggaaatggcaggaaatgatgtgggttggcagattgggccagggccctgggggattcaagctggtatgtcagacccctagcttgggcagcatccccaaggcatgagttggcaatgcttctgaaggtcatgtatggagggtggatgaggaagggagtgcttttggactattttgttctgtaaagttagattttatctttgccaggacaagtttcctgaggaaagacacaaagacatcacaaaatatcttcatttcatcctatggttccaacagagctaatttatcataaattttctgttttaaaataaaaatgtcataagctctcatgttacatatgtgttgtctatggcttaaaaactatgaaagacatttattctttcattcttttcagtggtgcaatgcatatgtgtttctatttttttcaataaatgtgatttatttggtacataaataaatgtcatttaattttatacaatgtaacaaataaaatttgtattctatggtatgctattatgctatgtatctgtaagtataataacaagagatcttgttttatattgcatacaatttaaaacagttttttaaatgtcttggtgtttagaaatactttcagcagcaaatatgctacacactggtttaacaataaaggattaattttttatctgagacaagaagtccagagaatggcagttgctgtactgatacatctgcttaacagggcatcttggactggtcaccttcttatcctgttggccaattgtgctggtgtctcctgtttagagtgtgattgcctcagatgcagttatcatctgtgggcaagacaggtaaaatgaagaaaagaaccagggtgaaagcctaacagaagctctccctcttcctgcacatctcattggccattcttgactggaggtagtctgggaaagaaaaagtttattttggccacttctagaattgacagtgatgaaaggaaggtggtaggaaatgattaattggagagtcagtcaataagtgagggatcattatggtttttctggttgtacagatggggaaactaaggtttgcatgaactaaaagaattgcacaaattccatacattgccagtgacagagacaggaagccaactctaaactatgacttctaaactgtatttctgataccacgactttttctgaaatcctggctcctaaaaagtattattttcattgagaatattcttgatcttctctccttttttttaaacttagaaaggcatacactaagatcctcagaagagcactcctgaatgcttaagggggcaagactggctactgcaaggtcacctgctggttggaaaagactttcttctgtgatacttgctctccagtgcagatacttctgcattcctgtatccacctatagccagtcttcacttgggctttctgtatttccttttaccttagaaaatactatgtattttttcttacaggctttgtcatatttgccatgtagtgtttgttaaattctgtatttccctttgttaattgatgataagcattgtggatggtctttcatacagggagggttattactggcgagaaattcaactcacctatattctaggatggtttccaattgctgactgtgtcaaggtgatatccacaacttatctagagcctggacattcaaaatggggacaatggtcttcaatacttaatattgaagattattttccatgatattctgctactataactgaaataactttcattgactgttaaatatcaagaattatcatacagaaacataggctttccagttgggcaaaaaggtaaaacgatatctttaattttgtgtgattaaccttaattggtatctagagttccaaacaaactagtcttcaattacctgatctttccaattcaggttcatatcagacacatcagcaatttaaaattgctccctcttctctcctctgaaaggtggcatcagggctacttgtatgttaagacaacagcaatgccaatgtgtgtttcttctgtcttctaccaccatcagctaagatatacctcatccactctagtatatctcttgctattaatgactttgctcatcttcatattactaattcctcaa

SEQ ID NO: 46814 - DNA, 795 bp, Bovine  19866881187690
  misc_feature (1)..(1): n is a, c, g, or t
nctggatacagtttatgtgtggagtgtatactcaattgtacacttcagtttattactgtgtgaacaaagactctattgctgatatgagagctggttggcaacccatttagacagaattacatggactgggcactatgaggtgcctgtgcccaggggttctctcctcccatctggctcatgacacgggctttcactaatttcagttatgtctacaaaaaagaatgatgtctgactgagctttcttatttcccagacaacctagaaaaaaaaaaaaaaacatgtaagtatatttttaaagagcctaaaagtgcagatttttctcttatttgttttttctaggttaatttattctatattggaagttaatgaaagtcaatatattttgcttctaggcaagcatccgaatattttaagaatatttcatttgattatctgcttgctatttattgatcctactgcagtggtctctggacaaaattgtgtgcagtgaggagcacaaaatgggtctgcccttgtttggcagctggtgataacgaaatcaccccacttcttagcctgttttgaaatgtaagtaacagaagagagttacttctgttacttgcaacctagacagcatattaaaaagcagagactttactgtgccaacaaaggtccgtctagtcaaagctatggtttttccagtagtcatatatgaatgtgagagttggactataaagaaagctgagcgccaaagaattgatgctttgaattgtggtgtggagaagactcttagagtccctggactgcaaggagatc

SEQ ID NO: 46815 - DNA, 932 bp, Bovine  19866881821853
  misc_feature (1)..(1): n is a, c, g, or t
ntatttctcatgttactatgagccttttcataaatattaatgacttcatatatcctcttgtagatgtaactaatgtatgcaaatgttatccttaatattgcatatgtctcatctttaatgacatttattttataatgaccatctttgtgaatatagcattgctcctattttggttatgtattaggatatattctgagaaacatagtgggtaaaatattaagtatttagaaggcaattttcatgattcaattgatgcaaattgaaaaattaagttccagaaaacattactaatataagtttatattcctgtcatatttttcctgaccaatgtcatctggctataatgacttcactccacttcctagctcccatcttccggtgttagcagggtccagaaagaaatttgcttacacctgtaatcaaaggaagcaaggtggtacaaggtaacgccccatttgcacatggttcttcaccagcagagctagggtggagccagatatctgtcttcatctcaaacgaggcagtgtgttcagcgtctcactctgccagggtgttggcaggccctatagggaaacatcatacacgccagcttggccttcatgccacatctcacacctcagtagggtggtggctgctttatataattgagagttacttttcatgtgaagaaccaggaatatcaggatacaaatgagaaaagacaccaatataaagatgaatcagatgttagaactctgtcaagaatcttaaagcagtcaaaattaaacattccaacaagtcattttaaattattttgaaaaaaaattaaaaaatagaaaatttcaacaaagaacataataaagaatcaaatttaaatatagaactgaaaagtaaaatcacataagtaaacaaataaacctctctaaatgagctcagtgaaatgagcgtcaatg

SEQ ID NO: 46816 - DNA, 1430 bp, Bovine  19866880270865
  misc_feature (1)..(1): n is a, c, g, or t
nattgatgcttttgaactgtggtgttgaagaagacacttgagagtcccttggactgcaaggagatccaaccagtcaatcctaaaggagatcagtcctgaatattcattggaaagactgatgctgaagctgaaactccaatactttggccacctgatgcaaagaactgactcatttgaaaagaccctgatgctgagaaagattgaaggtgggagaagaaggggacaacagaggatgagatgattggatggcattaccgactcgatagacatgagtttgagtaaactttgggagttggtgatgaacagggaggcctggtttgctgcagtccatggggttgcaaagagtcggacacgactgagcgactgaactgaaaccactacgagggcaagactccacaagtctctctctgactctgcccatgtgtctacccacacacactgtactctttttttcctctaaataaatacttgcttcactgctttccatctttgtgggaattcttttctgcaaagccaaagggccagggcccttgtcactgaccactggactagtggctaggatctggtgctttctccacagtgacccagcctcaacctctggctgggaacccaagctccgctccaagccgttgcaggccaaggccacctgagatcaataccacaagtaaatcacaccctttcctctctgccctgggccctgtgccagtgtggactatgccctgtcctccaataaagagtggatgcccctccctctccctcccagcccaggggtaaagtgtccacagactgaggctggtgcccagactttcaccaaatggaaaactgttaataacagccaaggtagaagatttaaagaggaactagaaaaaagagtccagaatgtatgaaaacattactctcatcccccaagaaccaggagtatgtcatctcacttcagtgagaaaagacaagaatctgtgcaagattttaaagcagccatcataaaaatgctccagtgaacaattagaagcactcttgcaacagatgaaaaaatgaagacagaaaagaaatagatgataaaaaaattcaattgaaaaatattttgctggaaaaattcaattaaaaagctcattgaatgggctcagtagcaaaaaatgcaaatgaccaaagacagaatcagtgagaaattcccaaacaggatacacccaaagaaattcatgccaagatacaccatcataaaatttttgaagactaaaaacaaagaaaaatattgaaagcactgtctgctatccaaaccctccaatgaatccccatcttattcaaagaaagaaaagtccatacaacaacctccaaggccctgcatgatctggctctctactaaccttccaagttcatcttatatttctcttcctttgactacacactctagccacactggcctccttcctgtc

SEQ ID NO: 46817 - DNA, 2332 bp, Bovine  19866880488445
  misc_feature (1)..(1): n is a, c, g, or t
nagggggatgagaagaatgacacaagtttaaaggtttggaacatggtttccctagtggctcagcagtaaagaatccacctgcaatgcaggagacacggattggaaatgtctacccattccagtattttcgcctggaaaatcccatggagagaggagcttggagggctacagtccatggggttgcaaagagttggacatgactgagctactgagcaaaggtttggaacagatgactcatgagaaattctagaagacaaacggacaagtaagaggattgctaggctgcattgagagccccactgaagtcagataactaaagaataatgatattttcctgaattttaatgtctatacatgtacagaaaatattgtcctgcttgcatatgttcctacttccacaagagaaaaaagtttgaaagaaagaaaacctgattgaattttttattaattccagtattaaaatgattttgtaggtattagtgattgaattataaaatattggaaaggcaagcatttttataaatcacaaccttgtgtattttctgcttttatgtgtgtatttctgccttttcacatttggttaaaaaaaaattacaggtggagggaagagcatcaaccaacagggttttgtggatcacacagccccatgcaattaaggtgccattgttaattttcaaattgtcataatccatttgagaatttaagacaattcaaaaaacaattatgactgaatgaaaagtgaattgggcaatcaactgagatgaaattcagcccagagaaacaaaacgttgagaaacaaaaccctagaataagggaagaatgaaaggcatatggaagtgactgattgtaccaggacagtctttaaagaccaaggttacttgacaagaacgtggtaggagtttgttttatacttaatgagatttagctattttgctaaggcagtggatcgggctttttcatatttaggttgcataataaaaatgttgaagcctacccagatgcacatagatagagctatatgttgtttacctaagactgttgtatagcagcaaataaacaaaaccagtctccacagacattctggagcagctttcagcaaaacagaatttcaagtgtttattctgattttatgaaggaagattaatttgtgatgcatctaaatgaattcttttaccctagatcagcaaactcaaatcatcacatcctgtgtcttttattttttgaagttgaaataaatgtaggtagccagatcatcttcatcatcaaacaacctcaacagaataccctggaaaaacctcgcagaaggctaaactaatgtaatctgtatggattttttttttttaattcttgctctctaaaatcttatcttccacccaagccaatagaaggtccacatagaagagtcaaatagtattgcattgtgtgctgtgcttagtcactcagtcatgtccaactttttgcaacccaatggactgtaatctgccaggctcctctgtccatggggattctccaggaaagaatactcaagtgggttgccacatccacttccaggatatcttcccaactcagggatcaaacccagaactcccgcattgctggcggaatctttaccacagccaccagggaagcccattgttgcattctggtttctgttattttaaattcttgctataccctttgtttattctcctccaagtcacttcctcctgtttcaatctttagtctatgctttttttaaaggcattagccgagattcatctctagtctcatgctttcctaagtaaatcacaccccatcatgatctttgtcatggtttaaattccctctgaactcattcattcattcactcactcattcatgcatcattgtgcatctaacatatgagacccccacagcatcgagttcagtgttctccatgcaatcaaagaacatgtattctatgcctccttagggccccagaactatactaggtgccataaaatttacagaaagaagcatatgtaattatctgtttccttcaaaaagatttaaagcaactagctctttaaaacaaattacagtacagcaacagtccacaaaataaaagaaaaaaatcaagtaataaaggaaaaggagaaaattatatcaaaaaaagtcccttgagtttctagcaactaaaagggaaattaaatggatcataaagctctcatttactaatgaaagaaatgctactactgaaaaaagattctaagttgagcaaagataacaacaacatgggctgtgttgggattggtagtgacacaacctcagaatccttctttacatagcattctagtgaacagccatgaattca

SEQ ID NO: 46818 - DNA, 1359 bp, Bovine  19866880558738
  misc_feature (1)..(1): n is a, c, g, or t
naaattttaaagaaaattaaatctgaaatgcattttgactttatctagataatttaggtaaaattggactttttagtctaaattatctactatagactctgcttacttctatgtatgaatctttactttgtaggcacatgctgaataaatcattaagatttaaaaatttcttagagggatctccttggtggtcccgtggctaagacacttccaatgcaccaggcctgggttcgatccctggttagggaactagatcccacatcctgcaactaaaagttcatgtgctacacctaaacatccccagtatcgcaaagaagatggaagacctggtgcaggctaactaaataaatactaaaatttttttttttcttagagatggaaaaagacagttgttgagatatctttttctgggactttcctggcagtccagtggttaagactctgccttcccaatgcagggtgaagattcaaaccctggctggggaactaagatcccacctgccacgcagcacggcaaagttagtctttttctatttatctttctgggcgtttttagttttataattgtagtctctaaaatagcatcatgttcaggtgggcacttaatcataatgccgttgtggaaggcacattagcctctggagaatctgcatgtgatgttacttcagtggagtttcaaagattaaaaaaaaatatgtgagaaaaacaaaaaggtatatttcttggttccattattggaatagaatgagaacaatggtctatttaataacttatcactatcttccttctagattgaattcaaattactttactattctattaagaaaatctttgcaaaaatgctgccaatcattttttatttcagcagcttattaacaatgaaatcaaagatagctccatgcttctgagagataatgtaaacttccttttagaatcttaaagaactaaaaaattgaatgctttgctgtaattttagcttttaatatgtcaagcttgcttaatgtgagtagacctgacctaaatgtctgatatactttttttttttttaaggcaacattctagtagtctcttttagaatgtcttctgcaaaaggcagtgtgcggaaacagtgctgagtatgtgttctgaagtcagactacctgggttcagatcttgagttgaatctgtttaggtttaaatgctacttgctttcatgaacttgggcagatgtaaagttacctgatcttatcctctctgtacctcacgttcctcatgtgtaaattacggctagtgatagaaccataacgtggggttgttgtaaatattaacggagttaattacttaagacccttagaatagtgcctggtacacactcaataa

SEQ ID NO: 46819 - DNA, 1206 bp, Bovine  19866880577506
  misc_feature (1)..(1): n is a, c, g, or t
ntgaatatttatttttagagttgaatagtaactcccaccagaaagaattttaccttgacatttttatatttgaagaatataagaaaagacttgggaggcaagggctagaaagcaggacatggatttccattttgggaaatggtacttagagtttccaggtggctcattggtgaataatccagtggccaatgcaggagaaagaggagatgcaagttcgatcactgggttgggaatatcccctggtggaggaaacggcaacccactcgggtattcttgcctggagaattcgatggacagaggagcctggcaggctactgtccctagggttgcaatgagtgagacacaactgagcaagcattcgtgcacgcacatgtgcttagagtttgcattagcaattctcattttaggcaatcccttaaaaatgacttagtgatgtcagaatgtattttcctttgatttttaactttctgaaaactgtgaaataatttatataaaataaagtatacaaatctgaggtgtacagctccacacacacacacacacacacacacacacacacactccttaacatcccagaaggctactttgtgacccctctcagcgtataaattcatcaatttgtatttcttaatctcttgcaacatgtttaaaagaaggcttatagttgtttaattcagagatactgcttagaaaaaatatatcccaatagcttcattttaagaagcaaaagccaagccctagaaaacttgtttggataacattgtttgagtgtggggtacaaggcgctcactatttcaagataattccaagagaaactattgctgtgacctacaggtatctttttactgagggtcattgcaagccacaatagaattccagtggtctcatttgcaatcacactcatcttcaatagccatatttgtggcttcctgagtaatgaggtgatttatcatggtatgtcagccatagagagttcaatataaatgaatttagtttctttaaaaaaggtatttatatctaagcactttcacaataatctgacattgccctttaaaggtaagcacatattatgtggtttgcatatgaaggaagcaggcattactcttgcttgactgactgtcagcttcagcccctgcacctggtagtccccaggtctgtcattgtttccaggatagagctcatttttcaagggttaataacatagac

SEQ ID NO: 46820 - DNA, 980 bp, Bovine  19866880579329
  misc_feature (1)..(1): n is a, c, g, or t
nctctattttctttgcttaaaaatatcctttcttaggtgattgcaaaaaataaaaaaagtcatgtcgcacagcgtacaaatcagctttagaattaatttacttgtgtgaatttatgttatctgtctattaagtttcgtgaaaccccagtgcaaaccaaaacaacagtcagggacaagattatttagatgttgagatcctttgtttcaaaatagtgcagatgtgaaaaacccagtggtgagcatggcttgctacaccaaacaggttttacatttttagtaaaatatccaaatgagcattgtatcactgaaatgttgtcaaaggttatgtttagttcatgagacaggctcaaaacaatgaagttttgctctcatataaattctcaagatgagaaaaatttttaaaagcaaattaagtagaaagaagtaaatgagacattatttctccaaagttgttttattgcctgccaggaaaatatcttcaggagatggactgaaaaggaaaagacttttgtagtgagcatctgagccacagcaaatttgtgggtattattggctttttcagacatcaaaagcaaactgtgtgaaagatgatggaggtgctcagacaagaatggggaatgaaaatgagcaaatagaagatcatgctcaataaaaacacaaaatgataatcagaataaatgagactatcagtgcacaagtagaagaaaatcaactaggaacatctgttcaggtgaggctgaaattaagagaataatcaggttgtgtgcatttggaaaaagtctatgaaagatatgatgagtagaatctcatccttcgcccatgtggaatgatcatatactatctctgtactttcattaaaattgagtttgtgattgtgcatgttataccttccaagaaacataggtttgcataaaaaatgcaatttgatgtgcattgcagattaagaaaattgtaacggtacaataaaatttctcagagaa

SEQ ID NO: 46821 - DNA, 1124 bp, Bovine  19866880592614
  misc_feature (1)..(1): n is a, c, g, or t
nagaagctagaatttgaagctgttctaaatctgacaccagctctcaggctgtggttcccagcttccctgacactcactgacatcacattgtcccccaggaagcatgtaggcaccaaaatgacttttaacaaagattactgatacagttcaagtgaaagtgaaagtcattcagtcacgtctgactctttgtaaccccatagactatacagtccatagaattctgcaggccaaaatactggaggcagaagcctttcccttctccaggggatcttccaacgcagggatctcacccaggtttcccacactgcaggcagattctttacaagctgagccacaagggaagtccaacacagttcacaagcaattaaaaaaatatttgtcatttcaaagcaaaattagatttctaggttttttcaagatgtctcaaatctctttgaaacatgtatttggaatagaccataaaatatttaaattgtaagttcccatgggaacaaatcaaaattttagatggtagtgtgaatgaacatgttgtcagaggaccctagatgtgtaaagtcctttaattgccattccagtgctaatttatatactttaattagatgtgtgtagtatgctttgtttaaaaaaaaaaaaaaaaaaaaacggaaccatatggatgctgcctcatttttatctgagtccatccaggggctgtaaaccttaaagtgatgttggaacccagcacccttccatctgctaagaaaggtgagaacaataagtcttggggcaaaggctgaatatacatgagaggagtgtagccctgcactactctttgcttccacgtgccttggactaatttgctttgactaataatataatctgcaaagtaagaaagccaagtgatttttacctatcttgctgattacatggtttggagtaggaatgcttttggtttgaggtagctttttttcatttaccttaaatatgaaacaataagcaataggattttcttgagagagaaaactatcaagtagaccagagagagaagaggaatggattctagtgtgggaaagcagaacagctcaggctctgagtttgagtttgggtttgtgacttaacagcttctgtggttggctgtcaggaag

SEQ ID NO: 46822 - DNA, 756 bp, Bovine  19866880644973
  misc_feature (1)..(1): n is a, c, g, or t
ncggcaagtagcattgcaaataaatttgatctatagacttttcaaacttctcagatgtgatccctgacgtctggcctgatgaaggaagccctggggactggaaaaacacaaagcatgctactgtactgacatgcaaaatgtctcataatctgtctttatctttcatgactgtagtggtctggataaattagaccaaattgggctaaacactgttcttggctacactcacgtagctgttttcaaaagctaataggagctgtgtgtgcacatccaaggacaaaatttggccccttttgtctttgcacaaacaattgctttagttgagatgattattcctgactgttttataagcagcattttgcccagtttaaatctcttttcactttattcttcagagtcaagacatttatgaatatggaaacatgtaactcaggatcttcagtttccggaaaaataaaaatctctcccctaaaatctgtgagtattgcaaatgaactgggaaagaggtaaagaaagtcatgttaacggtggcaaaaacagaagtaacactgagaaaaagtgttaacactcattaatggtagcaatctgattaaaatttttgtagcacattcatccttgatcgttcaaaagagaaatgtgttgttaatattttcaaggaaaatatagactatcaatacatttatttattcagatgcaaaaaaagaagttgaaattaacccttaatgcaactttttccttttccatcagtatcatatt

SEQ ID NO: 46823 - DNA, 3164 bp, Bovine  19866880689173
  misc_feature (1)..(1): n is a, c, g, or t
nacaatattgtaatgtaaaattaattaatttttaaaaaaagagctctgacattcagctcagatgtcaatgatgatttggggcttgaattgaatgaatggtgtcaatcttgatttggggctggattgaggccatgctaatggtgcttggtgaatgaaatgtagctttacctttatcattgctgttacttggaaaccccagtgaccagagcataagctcacagaggaagtttagaatccaatattagagaaatgggtaccaagaaaaagaaaggctgacatatgtgtattatatattgagtgcttctcctctcctatttgagtaagataatctatcagattagaaattggtaaatacagaatccataaggtaaacaataggactaatttttgacatacatttcacacaatgtatgttcttagcctacacaggtaactccttcatagacaggctgtttatgcactaaagagttcagggaaactaattgctatgtccttccagtaagaactgtctggttcctaaatgctctttctcgtaacatcacactcttcattcttgaacttacatgtatatatgtcatgttaaaataaaaagctagttactcagattattttagcagagaggataattgctggtacctaaaagcattattaattttgcatatttaaccatttattcactctttcaataactacttactgataggtatgcccagaaccatcttctatgatgctgtaagacataatataaaatgatacaggagatggatgaggtctccaagtttcatttaggctatctttactatgggatggtatatgctaaagtgatctcttgatagtatgtgtacacttttacccgatttataaagattttctttatgtcctgagaatcacttgtctccatagggtatcttccgagaaatatcataaatatctttatttctatgattacattacctttagagcacacatgtcatttctaacatgggaactgcaatatcagaaaaatatttctgacaatttcttggataaatctattactcaaaaaacatctaataagtagttgattcactacacagcatggaatgttaaggaaagtaatcataagtttcttcacttggactggatccctcccctgcctcctcagaagtactttcatcactcttgttgttgttagtcactcagtcatgtcctagtcttttgtgaccctatggattacagcccaccaggttcttctcttcatgggatttcccaggcaagaactggagtgggttgccatttccctctcctggggatcttccagacccagggatcacaccctgttctcctgcattaggaggcagattctttaccactgaaccacttgggaagccctgcactctcagctctgcgcaagaaaaaaagaaagaaaaaaatacggaagcaattttccatttcctgagtagattagcataagattgacttgcatgatttgattagtaaagatttacagacacaagagataccaaaatgcaaagatcccagaaatgaaacacttgagcctcctcatctgaaatttgtccattccacgattgcttgtttctcactagtattggcgaggatcccagaattcagaactccaacatgcccagaaagaatatcaggaagttttttccaaaaagaaaatgctttgcctttgactggccttcaagtgacaaaaagctattactccatattgaggaagtgctagataaccaactggatgagaatttccagaagaaatcagaggatttctgttcatatatctttacccatgcaaaacccaagaccctaaaagaaggaatcattgtcaagtggggaggtgagtctcttgcactagagcatgtatctctgtgattcattgtgtgtgatgaacttgtgattgcactctgggattctcagtaattgtattttcttctccatgtaacttggaaaatggatgctcatgccacacatggaaatgcatgtttcttcactaaaagaagcctatgtacatggtttttttgcagtctatcaaatctcttgaaactattacaataatgatataagttaaagatagaaatcttcatggtgatgagatgtctgatgtgataggtgttttgagtgaggatatgcaaagtattttgtgaatttacactaagaagaaaataaatagtagtccatgaatccatgtagttttaccgagagactgagaaacaaatacaaatacgtcttatatacagggttggcctcatgaacatgccgcctgggcagtcacactgtgtcctgttctgagatgagtccttcttattttcatgttttgtgtcactgtcctgaaattctgatgacattttcatcaagatgttttaatttacaaattatgtaaattacttacaagtgccataagttcttcttattttattgcaatgggaaaagtgttctgggagacccttgagcatattgtttgagatgatttgttcaatattgtaatgtgatgagttggaaaaacataaaagatagagtgcataggagacacagtgattatattttaaaaaagtggattcgtacaataaaaaggatgaggatacaagaatgaaggaaatgaggagaaggataaatagaagaaaataaatctttaacttcaaaaaattttatgatttctagaatgctgatctgtaaagctgttttaaaaaatcaggtgagaattctctcccatttcataaatatcatgtatctttcagtgttggggactctggtggaggcctacatagatgctgtcaacagtggaggagttccctgtttggagaatgcagtaataactctggcttagcgtgagaactcagcagccgtgcagaaggcatctgatcactacagtgagccgatgacccagcgactgagcctccacacagatatgctccaggagctgctgaaggttcatgaagcctgtgagagagaaggcattgccatcttcttgagggactccttcaaggatgacaagcggatgtttcagaaaaagctcgcggtaatgtgacctagaatatatccttcctgattcctttcttccagaatgatgcctagccaccccacttttgaccccatgattcctgtgcttcttatcataaaataagactagattctagtgggtgatatggctctacaagctatacagt

SEQ ID NO: 46824 - DNA, 1520 bp, Bovine  19866880740002
  misc_feature (1)..(1): n is a, c, g, or t
ntgagtgggcacttctcgtggtgactcccagtctagggttctgcttctctgaggagctgccaagatacacagagaggggctctctctgcccttgtctcgacagccatctcattgttaggaaagagttccctggaccatggcttgttgattccagtctgtcatctcacctaaagtgagacaatgggcttatttctcccatgaaatggaaatgttgctagaagagcatcagtgttactggaagttgttgatagctgagacacagtgtagtgctctgaaaggaaggcccacaatttcttgcagaagaaatacatggagttgccctagatcctatcctttctgagcctccctttagttcttggattctgtaagatattcttgctttcacttccctgcttttgctcttactgctagaattggtttatattatgtgttatacaaagaaacttagctaacagaagatggccacaaccatgcctgaaatgttggaagaaaattgtttatcgggatggcatttattaattcactgattcattcaatagtcatttattgaggacctattgtatgttaatcacagagataggcacacaaataaggcaggaggaagtgtggggaaatagtcctgtatacatataatcacactaaattgaaataatgttctggtagagaagcttataaagtgaagtgggagtacagatcagagtttgaatgaactctccaggtaggttggggaacaggggttaatcagcttggagaaggatataagctaaggactaaatcaaagctatacagaaaattcaatcttattacatgacagtggcagcaaatgaagaatttctacatagagactgaagaccagctgttctcaatattgactcagctctgccgagtggaaactgatttgaacagcagcatgagagacttagattatatgaggaagaattttctgacagtgtgagttgtcagtgttggcagattgtagcatcttctctggaggttaaaaaacaacatagatcttcatctgcctgggatagctttattgtgatgctgtctgaaaatagcaaaacggaagataatagcccaaggtcttttctaacttggagtgtttataattctgtcacttttaagaaaaactttattggatcaatgggaaaataaaattacggacagaaatgtaatgcaaaaaaaaaggggggaaactaacgaaattattaactttcttgggtcaggagtgagaaagaagtgaagagattcaaaagcttcaatatttaagttagaaattattttgaaatcacaaagtcagttgttttagaagtcctttgttggggcttaactgactgttaaccaacagagggtcctgtcttttcctttccaatccagagtactttagtttcccctaattgacttcacaactcgtctcatctcgtagaagattttgtatatattgacaaatttcttttgattgtgaactgaagcaaatttacagaataaaacagtcaagtgaacattagctctttatatca

SEQ ID NO: 46825 - DNA, 1666 bp, Bovine  19866880817784
  misc_feature (1)..(1): n is a, c, g, or t
nagataattgctcttattagtttggtgactgttctccaaacttttagaatgcatttatttgtacatatagataatgcagatatgttttgtgtttaattatttttataaagatggagccataattttgagaattttaaaattcaactattaataaatattttattatacattagatcttaaataattatcagaagtgaagtccattaaaacaatgtgattctaaacttgcttaaggtatttttttttttaaagcaaacttattttggtggcaaaacaaaactgtgacaattataaaaataccttgatttctcttttatttgtaaaaagactgtcctaatgatacttagtaaataactgagtacagggagtatgttcaaattaaacctttaagataaatatttcacagaaacagaaaatgaagctctcacagagtaactattttaaaatcacatagctagaacacagcaaggctaggactaattttgattctattgtctcaagcaataatatgtttgcctagcatatgtgagccacccctcccctcgaggtgttctactagtacacaggatagacataagtgatcattgtgcccctttagtgagtggagacagacaaccaaaaatgtaaaaaataaataagacaatttcagatataaataaagtggaatggagaacataaaatataaaacagaatagaatggcctgatttagacattattgatacagtgatattttagataaagtactcaagaaaggaccttcaaagaaatgacattgcaggtgagatctgaatgattaaagggaggtactgcagatataaagtattgcaatgtagcattttattcttgtatttcactggggttaattgtttcattggtactatgtaatctgtactctcaaaaataataaaaagtgtgttaatgcagaataggaatttacatttatctcaaaaaagaagcgtaacaaaacaaaaacaaaatgtccatggcagttagtacagggctaggcatagtctagatggcctgcttttaatttttaaatatgcagggaacaaatttttaatggccgcctattattttgtggcttttgcctcctttattgaaagcttcactatccaccagaactaatgccctatttctttatttgaaatttgaaaatatgacagtactactatctgttctacctctaatggttatggtaagaatcaaataaagggaggaaagtaaaaatgttacacaaatgtcagttgtcagaatacagacaagagataaagattttataataaacccaataaaggtttactgagcttccctgtggtaaagaatcctcctgccaattcaggagatgcaggttcgatccctgggtcaggaaaataccttggagaaggaaacgacaacccactccagtattcttgcctgggaaatcacatggacagaggagcttggcaggttacagtccatgaggtcacaaaagagttggtctcaacttagtgactgaacaacaacaacaaacatttactaatcactggtttatgatttttatattttggaggcagaatttagatgttgcaggtaaggaaaaaagagaatcaagaatgactccttgtgttttggtctgaacaactggtacatggtattaccatttaataagagagaagactagaagag

SEQ ID NO: 46826 - DNA, 986 bp, Bovine  19866880917212
  misc_feature (1)..(1): n is a, c, g, or t
ngaagatataattaaacatgaacacagatattaatagtttcaataataccatgtactaaaatctttaacgctatatttgaaaaggcatatttcattcatctaacttaaagccatacaatttaaaaaattcagaagtgattttgaaattcttctttaaaaaaacatatcgcaatagaattaaggaaaaatattatgtgaaagtcaacctatgcatttagtattggctagagaaggaaatgggagaaggcaatggcaacccactccagtactcttgcctggaaaatcccatggacggaggagcctggtgggctgcagttcatggggtcactgacgtcggacacgactgagcgacttcactttgacttttcattttcatgcactggagaaggaaatggcaacccactccagtgttcttgcctggagaatcccagggacgggggagcctggtgggctgccgtctatggggtcgcacagagtcggacacgactgaagcgacttagcagcagcagcagagaaggaaatggcaactcactccagtattcttgcctggagaatcccagggacgggggagcctggtgggctgccgtctatggagctgcacagagtcagacacgactgaagcgacttagcagcagcagcagcagcaagcttaaatgttaatgtacctgtcactaaacttaggttataacacaagttaggagcaactttttggtatccaaatattctcacccaccatatatatttaaatttcttgattgcactaatttaattttgaaattcaaattcaaaccaagtaccctgttgtgttatgtttcagacgataggctataaatgatcaccagttcaaggcaataaatgagtatttgcagtatgcatatttaaggttaatatgcatgaacaagggaaaagacatgctcacgtggcacaatttggtctctagcatctcccttggtgatgtcatcttctcttccggcttccactaatat

SEQ ID NO: 46827 - DNA, 2262 bp, Bovine  19866880958063
  misc_feature (1)..(1): n is a, c, g, or t
nttaattatggagcatcattcatctggtggctaagctggactggaatgtccactgtggcctctctcacaagcctggtgcctcagctggaatggctgggacagctggaaagctttggttctcttccacatggcctttctccacatgatctctctcattctccaggggcctgccgctagcagaaatatcaggacttctttaaatagtagttgagttttcaagaagcaaaacagaagctattaggcctcttgaggcctcttcttgaaacaccctgcccatcatcagaatgttatttccactctactattagttagagtaagtcaaaaggtgcactttgagtcagtgtggaaggaggctacataacgatatgaatatagagaagcaggattcgtttgaggccatttagtaacaatctgccatagcttcatagcaggtttccctgcctttccttgccccgctcaaatctacttttaacacaggaggtcatacagtgtcacttctctgcctaagccctataccatttcattttgaataaaagccaaagtctttttattggcttatgaggccctatataatccttagtcagattgggatttatagttcatctgaaacacaaagtacaaagtaggcagtcttggacttgtgtagcaattcaaaaaagctgtcagtgttctgggctcttcctctgctttgtcatccttgttgtttttgtcctgttgacctattactgtcataggatggctcctgcacctttgcctaggctttgggtgtgcattctaggcaaagagaaatggaaaagtggaagcttcttccaaaatcctgggtgtctctttgacaaggattttcatatgactacttctagctgcaagggagtctggtaaagtaagaattttatctctgcactttgttgcatctaacaaaatggaaattttcttagtcaggaaacaggggctggatattatctgtcagtgctatgagccaggaactgtaccgttgctataaaagcacacttagaaataatacagtcaaggtagttataataattccattgtactgaaaaagaaattgaagctttagcatggttacagtatcagaatatatgcatggccagtctgactctaaatgctcagtcctttctgtcacactgtattcagactgaactttttgttaaaacacatgtgtgttcacatgtgcaccacacatacacacaatatagccaacatttgctgcttctttagattttgtttggtttttgtgtctgtcttccttaataaatagaatacttgaaagaaagtagaattgtgtcatttccattatctgctgttgctgctaagtcgcttcagtcgtgtccgactctgtgcgaccccatagacggcagcccaccaggctcccccgtccctgggattctccaggtaagaacatccattatctagcactcagtgaatatttgaataaatgaagttttgttttgttttgtttcttttaaattaaaagatgggagaaccaaacataatttggcagatgggcaaacaggtacagagggataggataacatgcttgggttgtataactagtgacacatagttggtgttagaagtggcttcttgctttctggtgagagcattctctccttagatgtggaaggttggattaggatgatatgagagaataagaggaaataggtcctgttagtatctctgaatttaggcacataatagtccttagttaatgcaaatcagtaaaataaagggaaatggatactcctctcagaaggtagtatggagtaaaagagcaccaaactaggagttaagagaataatatgctaaacatagccaggtcactttttatttgtgaccttatgtgctttgaccctgctttcctcaaaactaaaatcaagggagttatactacatgatctttgaaatctcttctagctaaatagtgtatgaatcattatacccagtgagtttttatgggttctctaacatttcttggcatctatcaggtcaggctgttttatatttctataatatagagaaagtaacagctttttcacttcttctctgggaacttggccagtgaaaagtaaacatcctttcctgtttctccctaaatgaagtacttggtcataagtgacagacttttttcttcattttgttcattgaatgtgatcctgttcttattttaatgtttttcttaacttcactgtgagtttgttgaaatatagtaaattgaaaatgtcaagtttatgtttaagcctacaga

SEQ ID NO: 46828 - DNA, 2110 bp, Bovine  19866880987589
  misc_feature (1)..(1): n is a, c, g, or t
ncaggttcctatgcaatattgctctttacagcatcggaccttgcttctatcaccagtcacatcccaccaactgggtactgcttttgctttggctccatcccaaaggccacaaataagtataatttgtgcttctctcatagctcagtcagtaaagaatctgcctgccaatgcagacgacctgggtttgagtcctgattgggaagatcccctggagaaggaaatggcaacccacttcagtactcttgcctggaaaatcccatggacagagaagcctggtaggctacagtctatggggttgctaagagttggacatgactgagtgacttcactcactttcacccaggtctaactgacaagaatgctatgtttggtttaaaatgtttttattaataaacttttgataatacagggttttaaacagtgatatctgagcatgataatacatcaagagtgaagcttcaggtagagttgataaggaccagaatgccatagtgctgttttgttttgtttttggtagcatggaagtagtaatattgccttgtgcttgtttatagaatgttttttcatcttcaaactgcttttcaatcattaattaatactcataatgctacttttagctcttttattgcatccctacttattgtggcataaaacagttaaggcaggaaacctacacacatgcacatacacacacatacctataggagagcttcttctctatagtactgagatacaaacatacacatacgctcatacacatacacacacacatacacatacacacacatacctataggagagcttcttctctatagtactgagatacaaacatacacatacgctcatacacatacacacacacatacacacacatacctataggagagcttcttctctacagtactgagatacaaacatatttgattttatcacgttaatatctagttttaatcttttcatttcctaaagaaatgttccctctagatgctaactactgaactcaacaagagaaactatagaggaaagtgaaaatggggcagaggaccaaatgttctctttgttctttctttatccaaactccatttttggaagacatgtggatttatgatacaattgctaatatgaaggggtgatgccataaacactgatattcagggaaaaggagcaacttgaggacatatctctaagagaaaaagacctgcttaggatcctaagagatatccttatctttttagggtggaagccagatctttagtgaggactgagttgcgttcccccaaaattcacatttaagtcctaatccccagtacctcaaaatgtgactgtatttagagacagagcctttaaatttgcaaataaggtaaagtgagctcacatgggtaagcactaatcatgacacagggagaagacagctaactactaaccaaggagagaggccatggaagctagccaagctgataccttcattttggactcctagactcaagaactgtgaggaaataaatttctgctgtttaagtctgtgatgctttgttatggcagtccagaaaacttttcatatagtatcaaacttgctttattattataagactcctttccagagaaattttggttatatctgaagtaagtcctttaaatacaaggttttgtgtgtgtgcgtgtgcgtgtgtgtttgtgttttcggcttggctggtgtaatcaatcattgatttatttttctaactatactgcacagtcaaatgagatccaagctagggttttcactgaaagaataaatcaagaattggattattttaaacccaatggatattcaggaataattttcactaatactcaaatgtcttaaaacagaaagtgtttttaacttctttcatttcaacatatgggaattcttatgtctatgagaagcaaagggtcacagctgtattcaatgagcatttctatatactcttaaaagaatatatgtgtacactgtcttatagcttacaaagtgctgataaaccattatcccatttgatctttaaaacaacaccaagataaatcaaggcagatggtatattcttgtgttgtcttttttttaactgatgagaaaacacaagttactttccaa

SEQ ID NO: 46829 - DNA, 550 bp, Bovine  19866881029133
  misc_feature (1)..(1): n is a, c, g, or t
ncctgaattttatctttttcaggaatgggatatggagacagaacaagcacattttgtggcactcctgagtttcttgccccagaagttttaacagaaacatcctatacaagggctgtagattggtggggccttggtgtccttatatatgaaatgctcgttggtgaggtaagtagtataagatagataaaagggaaagatgattgagagaacaaagcatggcatttataaaaccacttaatatgtttcctgcataaatagaacttaagctttataaatacttacatgcattagtaatgctcatgatcctatgtcaccttcactgtcttttttaggttgttatgtttgtggaatgtataccagtggtttgaaaatagtttatctgagtgttgctatgggcttcccaggcagcgctagtggtaaagaacctgcctgcttgtgcaggtagacataagaaatcaggtgcaatccctggatcaggaagatcccctggaggagggcaaggtaacccactccagtattcttgcctggggaatcccatggacgaaggagc

SEQ ID NO: 46830 - DNA, 1093 bp, Bovine  19866881068180
  misc_feature (1)..(1): n is a, c, g, or t
natactggactgggttgccatttcttactccaggggatcctgacccagggatagaacctgcgtttcctgtggattttttactgctgagccacctggaaaatcctgagtcactttagtaccatttagaaaaattgactgattaaataaatatacttaaagttatgagatttttaaatctccttgccaaaattcatctcctgcatcaggaagaacagactgatttttataaattgaatgagtgtgagatatagttcatggggcttgatttggacaaagaaattcttaattatatcatgactcatttcagcatttttaatcatcatggcatgatgaaattcactgcattgatctctaggggattagaaagaaaactaatttcagtttttgaaagtcattttcaagacctcccaaggaaggtttataaaggacaagaaagggcctaagaattgcatacctcttagtttgattctaagtcccagaattagtagaattaatcaaaactgtaatctccagccccttacaaaacaacaatatgcaaaacacatggccattgtgtagagtcaaagcaatcatatatgtttgcagtttggtcatattcaattaacctcattcattttcttgataacatcattgagtatatcttcattttaactagtacaaatgattgatggtattaagatggcagtagaataacatctttattgtgtattaagagtcacgctatttgggtttctcaatggccttttcaatattcaagcccttgttccaaatcctggagaggaatatggataaacaagacaaatacagagttagaattcagaaatccagatttccatacaattatgttttcttaagtcatttaaaactcttggtactttcttatcttttaagccatctttacacacatattttaaaagattttcctttgttttatttctcactcagggaagtaaggtaaagaaaacactttgaaaattaagaatgctttgcaagtgtaggtgggcctgtcatttttcagatttacaatgtgcaaccatgagaaaatgcactgtgccaatctattcatccttcctactattcagctatccatcaa

SEQ ID NO: 46831 - DNA, 3487 bp, Bovine  19866881114658
  misc_feature (1)..(1): n is a, c, g, or t
nctttgtgccatcaagaatgagcccagtaatcttctcagtcacagtgttcaagtggaagtgtgccatctttgttaacatcaacctgggaacacaatgatgataacagataataattattgaaattttgccttcatccacctccagggattctacaaaactgtcctcaaatatttctgaaactcttcgggatgcatttcatatttgtaaacatccctttaatttcaactatgggaaacttggaaagtgtccattttgagggcactgaagtctgtgtcaggtgtaatttctagtctctctcaaaagctgttgatagagaatgttagtcttgccatttctgctaaaaccagtggtgtcaactcaagccactacccatcctgctacactttaaatcacttcccacccccatctttggtcttgatgaaatcctgatgaaggcttccaagatgccatagacattttagtgaatcgagattttctgcatggtttcttctttccttagggctcacaacaagactaggtgttgggatggaagacaattatgagtaacacaaaccttgatgttctcaaaataaatattctctgtgtaactgaaacatgttattgagtcaagggtacatgcttgactcttagaagaattatttcccccgattattcctcaatcccacaagtgaatagaattcaggtataacataccatctattttcctgaccagcccaacatgtggagatgcaggttaggctcaaagcagaaatatttcctattgattaattaattcattgttttgctgaaaacaatcagcacatctattaaatgtctactacatagaggcatattctgggtcttaagtttgcagctgtgagcaccactgacatgaccttggcccatccaatctaacagctccctcctccttcacattatcagtctgtggtttatgtgctcagtgcagtctttcactggaagttaagttagatcagaatttctctgctaccagttgctgtcagtagtgcaccctagggcaattcaatatttccacaggccaacattactgatgaagttgatcccaagacaaaaagtaaaaatcacccagtcacacattctcaagttaaggagtgtgtctgagttattaggaatttgagccatgaaattaaaagacatttgctccttggaagaaaagctgtgaccaatctagacagcacattaaaaagcagagacattactttgctgacaaaggtttctagtaaaagctatagtttttccagtagtcatgtatggatgtgagaattggactataaagaaagtggagtgccaaagaattgatgcttttgaaatgtggtgttggagaagactcttgagagtcccttggactgcaaggagatccaaccagtcaatcctaagggaaatcagtcctgatgattcattgggaggactgatgctaaagctgaaactccagtactttggccatgcaaagaactgactcattggaaaagaccctgatgctgggaaagattgagggcaggaggagaaggaaccgacagaggatgagatggttggatggcatcaccgactcgatggacatgagtttgagcaagctctgtttgttggtgatggacaagtaagcctgatgtgctacagtccatagggtcacaaagagttggacacaactgagtgactgaactgaactgaactgaactatttgctgaatctgagctgtacttttcctttatgagctttggttagactgaggattagcttcattgtagtgtgtgatttgctctgtaagaactcatcatgtgaaatgctttttaaagaattagttattaaaaatattttattgtggtaaaaatatatagcatagcatttttcattttagacattttaaagtttgtagttctatggcattatctacattcatgttattgtacaatcatcaccactatccattactagaacttttcctcttccttaactggaagtcttaagtcttaagtctccactcattaaacaataactcccattaccccttctctctagcccccagcatccactcttctacagtatgtctctggggttttgatgactctaggaagtcatgtaagtggaatcaggtggtatttgtccttatgtgcccaccttatttcacttaatgtcttcaacgttcatccacgttgtagactgtgtcagaatctcttcctttttaaggctaaatcatattctactttatgtataaaccacattttgtcagttctttcattgatggactgaaaagctttgtttggccttttaggtagagtctcattttgaatatgccccaaatcttgctctagtaaatgttatctctttaaagtagcacatttagctctgtggcattaatgaacaagctataacatctgcagttgccactcgagaagaaaatgtaattttacaaatcaggttagtgccaccttttattctcagtacaggccctaagatgaggattatgaaatgattgttttatgatagaagtcagtttaagaatttttagcagtcttcatgccattaggaatatttaaacatcaagggaaatctttcccttatgtgtttgtgctgaccaatatggtagccagcagccaaatatggggtttaaaattttaatttattaaaatgaaatgaaattaaaaattgaattcctctgtcacactggccacattgcaaatactctgtcaccattgttagtggctattgtattgaactggacacacagactgtttctgtcatcccagaaaatgctcttccacagtgctgttggtgttagcttggattttctcccccaaagtcattagggatcatttaaatgtcataaaattcattgctgcctaacagagtgtgctattcgattgctcctcagcttcactggcttgtagtctgtagttgaaggacaggatttaatcttctgtggagcataagaacagaatcaatatagtcttgctgcttgctcgccattcacctgcataggcacacagagcctggaattcatagaggaaagagaaaaggtgaaattctaataagggtgaaggagcaggaaatgaaagaataagttcactgagagttaatagcattttaagattttatggtttttgaaatttagtttgtagcctgtcaaaccctaagtagtaaaaatgcacatagatggagaccatcaaacaataaagaacatgtttggacctaatgctaattcttataatgggatattttaaaatctatagtagagagaagtccctttgggatggtaaatgggacctgattaggacagggcagactacttaagaccacctctttagagaggtgattttcaactttcttttgcagttgagtttagtaacggtttgtttataattattttgttattttattttgtgtgacatcatgctcttaaaggaagaaaatgaatttcatttctatggtttttctatacctttgacttgttaggacaaagacaactcacagcag

SEQ ID NO: 46832 - DNA, 708 bp, Bovine  19866881135036
  misc_feature (1)..(1): n is a, c, g, or t
ncttttcccccgcttttttgctattcgcccttttccggtatgtgggagagaacaataaccataggaagtgctggaaagactttcagtgtaactggctggaaggtaagatgaaaaatttaattgtttgaaaacaggcacgtatcttatttcttgtagagttttttttgtgttgtaaatgcataaatactcagtttacacaggtttttatacttactgatctgctttcttattcagttttcatgtttttatcctttttgagatgtaatcattcttttgaagtaagaaaaatagggtaatttgcttatttataagtaaccaactgatgatactcttttctttgcaatgcttggattactgtatattaattaaaaggagaaaaaataatagctaatgggaagaactgtacaaaaaagatctttatgacccagttaatcgcaatggtgtgatcactcacctagagccagacatcctggaatgtgaagtcaagtgggccttaggaagcatcactacaaacaaagctagtggaagtgatggaatcccaattcagctcagtggctcagtcgtgtccgactcctcgcgactccatgaaccgcagcatgccaagcctcgctgtccatgaccaactcccagagtctacccaaacccatgtccatcgagttggtgatgccatccaaccatctcatcctgtcgtccccttctcctcctgcc

SEQ ID NO: 46833 - DNA, 908 bp, Bovine  19866881202560
  misc_feature (1)..(1): n is a, c, g, or t
naataaaagattctcaaactgatggccagaaaacgtctacattctgggaacttgcatgtgcatgcacacacctgctcagtggtgcccaactctttgcatttgcaaccttatgaacgatagtccttcaggcttctctgtccatggaattttccaggcaagaataatggagtgggttgccatttcctactccaggggaattcgcctcccagaattgaattcccgtctcttgcgtctcctgcatggggggtggatttttttttactgctgcagcacctgggaagcccctgggtccttggagaatgcgtaaaagagatgtcactttgaattgcaacaaagatcactagtgagggaaggcccttcaaatagacccctgactggctatcacacacagttgtattatcatggaagctggtctttggctaagaatactccactgcatgaccctcacactggcacctgcactctagagtctctttttcttgcaacatgagaaagtagaaaattttctttctgggatgctgaatgcgttcatgtttaattcttcatataactaatcaaacatctgcaagttaatagcaccttgaggtcttttaaatttatttttgtgcattttttccctctcttggaccacatattcccttttcttcatccatctgcctttatttctcctactatatctacctatttcttgcaaagaaatgggactcaaacattttcacttgcagcactccttccccagagtcagtgccaacaaactgcaaccattcaccagccctggtgtgctcaaacacttgcgtacatccccactagaaacactaagagacagcaagcaagcatctagtgtggatacagagctaacatccaccacttggcaagctgtgtttggggaggcttacttagctctcatt

SEQ ID NO: 46834 - DNA, 1764 bp, Bovine  19866881270302
  misc_feature (1)..(1): n is a, c, g, or t
nccatgatcctatggagtgtagcccgccatgctcctctatccattggattctccaggcaagaatactggagtgggttgtcatgccctcctccaggggatcttccttgacccagggatcgaaccccacgtctcttgcatcttctgcattagcgggcagattccttatcactagcgccacctgggaagccctgtaagtacattatctatgtacatgtagtatccccctggtggcaggttggttggctgggatcatagatattcacctgcttcctcagcatctgtcatgtggtgggtgctcagcacatactgattgaatcaaatatagtgaggaaggaaaagagtgtcaataaggaattttgaattgcatgcttttttcttctaattccttttcattatggcttccagagagaagggcagaatgagtagaaatagggcagatgtaggggttttgacacttgtttttagaggattgtaaatcctagaaaatcttggtcaaaccaggacagataaataacttgtactttttacctttggaggaatgtagatggcaaagctatccttaaaaaaatttaataaccagggagggaagatccctaattgtttaaaatatctatataatcataaacaatgctttacatgccttatggatctcctacttaaatactttttttagtccacatactaactttatataatatctattttaataaaatgttctgtttttgtaaggaaattttaattgaatgggggaaacaaagacatcattattcattagagatgaattatttgtgaggaaatgataactcacgattgtgtgcaggtttgtctatgaacagacagtaaacatcacagggtatgaatattttcatttgtcagattagcagcaatttctgtctattgctctgtgtaaggggagctggcatctctgataataacctttgaattagacactggtttatattgtatgtggtcgtcatcagttaaccagggtaaccaggcaaacagtactgtgtgggtacattttctgcccatacagaactcagattcctggccccttaaggaggaatggctctcgaaggagattaagtgccataaagtatcgcagaacccagggtttcagacacacagctgcacagtttacctgcttagagcattagactcttgctcaaactggttagtcttattatttttttttaggacaggaaaaaaaccaaagaattttggctgtaaaatcttaccttcttttccatctcttcagtgtgaaccaggagtaattagataaagtatgactggtcagtgtactttccatattgatgaactgaaataaattttgttttttattactttcgagtggcccagacatttctaaaatgtggatgttttcaagtgacaacaagagacattcatttcttatacttaagctaataaattgaagaaccctgtagaatacatttttaatttatacatcagggtaatgtgaaacaggaaaaagcaaagaattctgagggcatcttttcagaaccccacctaactgaacaaatcctaatcataggaaagagaagtggcatcactagagggtgcacccacagggatgagaaagcctgaattttctatgccaggcatggagctgctgggtgaccctggacagtgtgcttcttcatctaaggattggtgggttttaggacactctccatgtctgagcagacaaagtacccttgatgtgggtcaagccctggcattcctatcatgttcctggatgaaact

SEQ ID NO: 46835 - DNA, 848 bp, Bovine  19866881300891
  misc_feature (1)..(1): n is a, c, g, or t
nttgagccccttcttggtacaggagcagtgctaaattcttgattggtcccgtgaaagtaacatggcagataggcaggtagaagtagtgggttgggcaggtgcagcagaaccatctgaagtcaggggttccggggaagtttctctggggaggttacatttgacctaagacctgagaatgaaagcttacagtctgaggtcatcaccagtcacatgtcctgtgttaggtcaagtggcttcaatttaattcttttcttttcaaaaatcttaagtggtgaagcctttatgtcagtttatgacaacttttagaaagcctaaccatcctgccactaaagttatagattctacttacttataggcataatattttattgacatcaatttgcaacagttttaatgcaacataagctttatacctacaccactaaaattcctagtacaggcttaataggaaaagaatcatttgtgaaataaaatgttcatgaacagtttgcacattcaactgtagggggagtgaatattcataataggaaaaattccactgcataaagtgaatataatagttaacgagggacttggaaactcagaaatatcatcaaaatataaatattggtgtattatcaagattgcatattattctgtattattaaatcataaaaatctcgacttttcctgcaatcaggttttgagtgctcaacattttcatgccatttaactagaacacatttttctagatacaaatggatatattcatttccataaaagtgatatctttttacagtatatttaattcagatccagtttctatttccactgaaataattgcttataatacatagactcgattttat

SEQ ID NO: 46836 - DNA, 1699 bp, Bovine  19866881371830
  misc_feature (1)..(1): n is a, c, g, or t
ntaaaatacagttgctaaagttatacttttagaaaagtaataaagctacattttagaaaatcagctcatgtgactggaaattattttccttttctagtctagatggtgcctcttcctaactctttaacctttttttagttctgtccatgttcttcattcccttactttacttttagtgatgtaagtcaagcctaaaaggaagtatcttaagatattttggttttttaaaaaattgctctaattatctactggactttaaatttggaattaactagaaagagaaacagtagtggtattaataaaggattagacatgataaaggattagtctagataagtagttggagtatttactgccctgactttttactgcatgctattatttatggtttgtctcatttacacttgtttcttttgcaatgctatgcttataatactaaaatttacaaattactttgatacaaagtgtgattgaatttttcagtccaaaatttcaagactagtttcaagtttttatcaaagatttcctcagaattaaaacaaaaaaaagttactcaattgtaccaagttgaaatattgaattagtaaaattgacgtaaaataatttttccagaaagtaagagaaattacaaaatatttacttattctaatggaattcatagctattgcttatgaatatttacttcttggctttgtttgtttttaaaatttcatattatgggttataaaagtaaaaaatttaattttaagctatttcttatatggttatatgcagatgcaattgtgtcacctcataaaagaaagaaatttctatatacttaataaagatcttaaatatctccaagttttttcctaaatgaaagcaggtgttgaacattgtcatctcctaatacattgagattactaaaatatttaattatttaccaggatttgaagtagtaactagatgttttcagttttcccaggatgacttttacatccaaacatttacagtggaaatgaactaagtttaccaccttaacaataacaaaaaaaagcaaataaaacacacagacacaagttgtttcttttgaaccagaattgaaatgatattcgttaaacttacaatgagccttcatactttacagtgagataaggtttccatagccaaaccaaaaataagtttgaacttttccctcatgcttagccatctttattgggatatatttgaagtaatacacaaatttttctggttttaaatatagttttacaatttttagtgaataaatacacctgagctaccattatcgatatccagtctgtagaacagttttattgcatatatttgaattatataatttgagaagttttgttatatatttaaagtatgaaaccatcaccacaaatcaagataattatatacatcatctccaaaagtatcctcatgtgcctctgtgaaaccccttctttctcttttcctgctttctttccccatacctgtccccaggcaaatcactggcctgtttctgtcactagatattagtttgcattttgtagaattctgtattaattgaatcatacagtgtatactttcgtgggggaaatctggccattttcactctgaataattcagaagaattgcatgtatcagtagtccctttctgtttattgttggtactatttaattgtgtgactataccataacttttttacccattcac

SEQ ID NO: 46837 - DNA, 1234 bp, Bovine  19866881397642
  misc_feature (1)..(1): n is a, c, g, or t
nttcacaccttgtcttactatcttcctatttgtaatcttgtcttctgattaaatgtttccctttttagttctaggatgatgctcactggtcagggaagttgctaagtatagcagaaaatatataagtttaccagttagtacatggatctctgcattcagagtctacctctgctacttattaattgattaacttcaggtaaatttcttgacttttaatgacatctttctcaactatcaatggggatataacagcaccaatcttatgggcttttgtgagactttgatgtttgtaaagcaaattactgtatcataatgctcaaaaaatattaaccagttagtcactgctatgagctataaagagaattactatgtccatgaattttatggttcatttttatctttaagctaccatcaaatgaaagttttatttcttgcttctgtcttttgaaaaaggtgggaccaacctccagtatatggaagaatttctatattcaaaataatcagatgaaagagaaaaataaaataaatttgtcttcatatatagaagggtcttatagacattaacattctttctcacacaggtgaaggaccataaagaacacacatcttttcccccatcatcataaaagttgttttctagcccaaatcctttcttttcctattacaaccatactagttcaagatctaggacctaaaccaacacatgcatgcaggctgggatcgactgaggatgaaatgggaaactatttaagagcttaatgcaaacaaaagttgcattactgtctttttgatgtttaatgtcaaaatctgacaaatttcttttagaatttactatctggaaaagtttggttccaggaaagacttactcttatctaaaaagctgttaagtttaattttataagaatcatgtaactaatcccatttttctatttgtctttgttgccatcaagcttggaaccaagttaaggctaattacaatacagctgacccttgaacaatacaggtttgaactgcttaagtccacttatacagattttttttcaacagcaaacaccatggtatatacaatccatggttggttgaatccacttttgtggaaccttagataaggagggactacatacacagaaggacctcagatacggagggccaactataaattatacatggattttcaactgaacagagtcaccatcttgcaacccctgcattattctagggtcaactacatatg

SEQ ID NO: 46838 - DNA, 1255 bp, Bovine  19866881401102
  misc_feature (1)..(1): n is a, c, g, or t
nagaaaattgaaataaaatcattaaggaaagccatattaagtcatttaaaaaaataaaagtgaaactttcttttagtgtcaaggtttttacactattaatttgaagaaacccagaatttagtgaatttagtgaataaaatttagtgaataaaaatttagtgaataaaatttagtgaataaaagaaagaagataactgccttgatttattttgagcaataaagtatgtgtgtgttagttgcttagtcgtgtctgactctttgcgaccccatggactgtagcccaccaggctcctctgtccacggaattgtccaggcaagaatgaatactggagtgggttgtcagtcctttctccagaggatcttccctatctagggatcatacctggatctcctgcattgcagtcacgttctttatgaattgagctaccagggtagccacaataaaggataaaataattgattacagtgaccatcagtgtttgttgctttggggcattcaaaaagatcttgagtacaagtcagtacagttgaaacaatatgaaatgtaggtttctgaatcccagtgccagagaaatatcttgtccagaccttaaagcaagattggaacaagagataaatataggaatgtgtatttgaagtttttcaccaaattttttaaaaaattaagcataatatttagaagagggaaacaataaatacatcacttgggagaactatatagatgttttctcttcataaatagtgaattatattaatttactcattccacaaacatgcttttcagtacttacatgctagatactgacctaggagatggggatagtgataaattgcaatatccctgtggagctcacaatctaataatgaattaccatttggaaataaaattcttatagatgaataccttaaaaattgaggttatttccttaataatgatcatagaggcatatattatttctaagtggaaaggtaacactgcctcttcctactgtcttccagtgctaaaacacaaacatgatcaatcagatgtatatgtgagtagtgccttagagtatcatatctgtaaagcttctctgggaattccttacttcccaccataccatgcagtatgaatccagcatgaggaaatcttgaatcttagtagacaaatgaaatacactttgcctcagatataatacatagccatccaatttttattattgttttagatgtagacctctggatagaaggacagcaagaaccttagactataaat

SEQ ID NO: 46839 - DNA, 1655 bp, Bovine  19866881448207
  misc_feature (1)..(1): n is a, c, g, or t
nactgtacataccaccctcaattctctgatttagtcaaatgctctagaagaattattaagactcaattggcaaaaattgaagaagcctccaaacatcatggacatcagcattgccattgatccttctaaatctcagaaccatcccttttggaactcataattctcactcttcatagttgtgggatgcccagtgcacttggctccgccttcttttgacacacaatagacaaaaggagaagtgttccaatattgcaaaggcctagttgtgtgcattaaaaatatctgtgcttttgtagatcaatcttttcatcatgattcttgggagacaaagattttaagcatcacaccctataatctcaatatttcatctactggaaaagacattccctgatgactttcatcaacctcactgaaaaggccccattcaggtacttttaaccaacccttgctctgccaagttccaaagaataaactcttggattcatgtgacacacctgaggaaagtgtggagccatgactggacctacataacatatgatgatctgaaaacaaatattttcaagaaatgaggcagatgatatccaatgagacagctttctaaagatatacagactaggcttattgaaagtctgtcacaaaacctttgatgatgacataattcttcagatgatctccagtgtctatgatcttgataatatatggactttagacaaaaatgtacctaacagttcttccttccaaccttccttcttaccagaatttgaccttcaaaggtttccaattggtgctttccctttagcatgggacattgtacctaagaagtttccttccttgtatcaagggacaaaaggattcaaactagaaaacatgactcttgatcagagatgctttcagagaaagatcttaatcaaagggggaaacataaaattaataaacaaaaacctcaaccaaattgaggtgggagaccataaggggcagctcctaggtcctgtcacaatagcagaaaccaacaggaagaagaaagactcttcttccctgtcaaggactcagtcaatgaaaagtcatgtacaccccaatttttttgtttgcattctgtaaaagtgttttcagtcctttgctctataggaacttgcacaaggcataacatagttgttaaccctgaacttcagttttctgttgatcctaagtaaacccagcttcactgaggaaatatctggcagcctatttatttcaggttgatgataggaagtgtaaaagaccattttagaaaatacgcctagcactgaaattggtaactcttaaaaagatagttgactgtcactgctttctaagatttaattcataaaagatcacatagacatagttagaagcatagtgttttagactactgattatagagcaatcgaatgataacattctgaattcaacttatagtgatattccctattctaagtaattcttagtgggaacagactacaagtttaaaaaaaaaataagataattttaaaacctttgccagacaccatagagacagatacacctacttatctcacagcatatattctctatgtctttctttttaattgatgagtctcccatctagagtttaaactcagcacagatccagtgcctccatttcacaactttcctgcagt

SEQ ID NO: 46840 - DNA, 1262 bp, Bovine  19866880351296
  misc_feature (1)..(1): n is a, c, g, or t
ngggagcaaagcgcagcgtctttctgacactggtgcccaggcggccagccgaaaccggtcctggagtggtatgggatcctctggagcccagcactgggcgatgtagtgagcgtggaaacggagcgggtcacctgggtgaaggagagaggcaggtagcagtttccactggtggaaagctggaagacactgggacctccaacacggaagggatcgcaatgcatccagccatcactaccgatattgtaaaagacacccttgggcctggggggtggagcaagttgacacattatgtgaaagtgaagttgctcagtcgtgtccgactctttgcgaccccatagactgtagcctaccaggctcctctgtccatgggattttccaggcaatagtactggagtggattgccatttccttctccaggggatcttcccaacccagggctcgaacccgggtctcccgcattgtagacagacgctttaccatctgagccacaaaaacaacaagtaactgaatatattgctgtcagtcaaagccatgaggaactcaaaagggtatcatgtatatcgtatcataaatatccaatgagaagtgactcagactaaaagagaatgatttacaacagaagggtgaaataaaatagaattaaggagttaatcaaatttttctgaaaagggccagatagtaaatattttcagttttgtgggccatgctgcaaatactcaactctgccaatctagcaccatagcatcaactgattaaatgtaaacaaacagagttgtgttccaataaaactttatttaaaaagaaaacctgtcagtgggcctcatttgacgggctgaggggaggggagctatactttgcccccaggttagatgaacctgaccaagtaaagtaggaccctgagtagggaactatacagaaaactagcaggtaacataaatctaaaaaagcaaggcttccaacaattctactcctcggtatttatctgaaaaaaataaaatgaaaaccctaattcaagaagataaacgcacccctatgtacattgcagcattatttacaatagccaagatatggaagggcttcccaagtggctcactggtaaagaatctgcagtatgtatgtattattaaatataataatgtacataacactacaaaatatggtttgctttttattctatatattttctgtgagagttctttttttcttctctttgttcatttactaaactgctctccaaaagagtttgggttcccaagtgtttc

SEQ ID NO: 46841 - DNA, 889 bp, Bovine  19866880576326
  misc_feature (1)..(1): n is a, c, g, or t
nctctgtaatcttctctagtagctcctgacgacgggtctctcgggcctcagctgccagagtgctttgttcctggaagccctgctcttgctggcgcttgaaggatgccagtgcctgagaagtaaactttcctgtaataccaggattcaggcatgccctgccttaggaagctaggaatcctgactctggcccctccaaaccttgggaaatgaacctggggatcctactactctcacagaattccagaatccaggactctcagatccctcccacttcaggaccagtcgtccccggcctctcctcccgcaggtcccccgggaagggcgccccaagtctgccccgccccttaccaggctgtgttgacgggggtccgggcgcggggcgctgaccagggtcactgcaccgatctcggccagcagtcgcgcctcctcaggcatcagcagcagtgggaggcccaggcgcgagttctggcggggcccgcggggcagggcgcccaccgtgcggccccccacgcccaggcgctcccgcagcgcctgcacggcctcggccccccacaccagggaacggccgttcgccacctccaccaccagcatcctcctgcgggaggccaggtgcacagcagtcacccacccggcagcacgcctctcgccgcaggattcgcgacgctgggagggcgcccacagcctggccgggggtctcggcgaagccccacccctgaggctcgtggggcggaacctcgctccgagacgcgttcgccacctgctgagcgggagcgctagccccgccccctgggcgccgggctccgcccccgggcgatcccgccaggccccagggctgacccagacgacgccccgccccgagaggagcgctgaggccccgccggggcgtctc

SEQ ID NO: 46842 - DNA, 1516 bp, Bovine  19866880643061
  misc_feature (1)..(1): n is a, c, g, or t
naatacgtgaaccgtgaacttcctgatgttcaagctggttttagaaaagtcagaggaaccagagatcaaattgccaacatccgctggatcatcgaaaaagcaagagagttccagaaaaacatctatttctgctttattgactatgccaaagcctttgactgtgtgaatcacaatgaactgtggaaaattcttcaagagatgggaatacaagaccacctgccctgcctcttgagaaatccggtccattaaaggaccgcaacaaagggacattcaagagaaaggtgatatatgtataaatatggctgatatgcgttgttgtatggcagaaaccaacacaatattgtaattttcccccaattgaaaaataaattaagaaaaaaaacagtgcagccattaagtaaataaatctttaaaaagagaaaaggaaaagaatgaaaaggaaacccacagaatgggagaatgatattttcaccaatcatatatctaataagcgattaatgtcaagaatttataatgaagttctacaacttaaaaaaaaaaaacagaaaatgagtattggggagaaattggaatctttgcacattgtttctgggaatattaaatggtgcagctaccgtggaaaagagtcttgggttttctcaattaaatatagaattactgagaagtgaagtgaagtcgctcagtcatgcctgactctttgcaaccccatggacaagtagcctgcaccaagctcctccatccatgggattttcaaggcaagactactggagtgggttgccatttccttctccaaggaatcttcccaacgcagggatcaaacccaggcctctcacattgtagacagacactttaccttctgagccaccagagaagtcctgtatgacccagtaattccacatctaggtatccacacacacacacacacacacacactggaaagcagggacttgaacagaagacatatgttcaccaatgttcatagcagcattagtcacaaccaaaagtgagaatgacacaaaatatcattggtggatgaacaaacaaacaaaaaggtttagatatataaaatgaaatccttattcgctctttaaaagaactcggaggtgatggtggcaactatggcagtggtcctggttaaagtagtggagaaggctgtggtggtattgggccagaatatggtaaccaaggtgggaggtatggtggcggtggtggaggatatgctgattacaatgaaggaggaaagtttgaaggtaattatgtggtggtggaaactataatgattttgaaaattatcatggacaacagcaatgaaagtatggacccatgaaagggggaagttttggtggaagaagctcatccagtccctatggtggtggttacggatctggtggtggaagtggtggatatggtagcagaaggttctaaatactcagaagaaaagggctacagttcttagctggagagagagcaaggagttgtcaggaaaactgcaggttagtttgagacagtcatccca

SEQ ID NO: 46843 - DNA, 1388 bp, Bovine  19866880899443
  misc_feature (1)..(1): n is a, c, g, or t
nagaagcaggactacgcctttgcctgcgagcagatgaagtccatccggcaggacctcacagtgaggcgggggccggggagggggtcggggagggggccgatggggtgatgccggctctgccctgacgtccgctctcctgccatcaggtgcagggtgtgcgcaccgagttcacggtggaggtatacgagacccatgcgcgcatcgctttggagaaggtgaggggcgggcagggccccacctcaccccgggctttcagccgtccccctatccagccgtgtggggctcactctgccccctcacgctgtgccctccagggggaccacgaagagttcaaccagtgccagacgcagctcaagtcgctgtacgccgagaacctgccgggcaacgtgggcgagtttaccgcctaccggatcctctattacatcttcaccaagaactcgggaggtgaggcgcaggaccgcggccccgggctcccaatgcggcccctcaagccccctgaccccgagtctctggccgcagacatcaccacggagctggcatacctgactcgggagctgaaggcggacccttgcgtggcccacgccctggcgctcagggccgcctgggctctgggcaactaccaccgctttttccggctctactcgcacgcgccctgcatgtctggctacctcgtggacaagtttgcagaccgggagcgcaaggctgcgctcaaggcaatgatcaaaacgtatgtaaagctgagctctgccctggccctccgcccctgtgccccgccctggccgagggcgccctgtctcctccccctacctgtgtgctccgccctcttctggacccgcccccttctgcacagccacctctcccccccctgctgctctctgctctcggcagcctggaccccccacatcatcctcttgtccaggcccccttcctccaaggcctcctgcctccctgaccctcctgaggccgagtccccccagaggctgagcgccctgtggggcagcctgcagagccggccccgccctcagtagctgtaggctcagcaaccgggccttgtgccctcctgagagctcagatgagtttacggccaggtgtcatgggcaagcgacgccggacggcccccaaagagggtgccctctgccctgggcaacggtgtgctcacatctgttaggagggaggcgccccaggtgggctcaggacacccctttttttgtcacagccggggttgtcccggcttctagggctggaggccagggatgcactgagtgttgagcggtgcccaggtcacccccagcagggccacctcctgaggtgacaggctgccaagccctgctcagaggtcccaagggccttgggagccacggggcgcagtctgggtggggatgaacacc

SEQ ID NO: 46844 - DNA, 955 bp, Bovine  19866880916307
  misc_feature (1)..(1): n is a, c, g, or t
ncacgtgcccgagcccagcagcaccccccccacacaactccgccccagacccccacgtacggagcagatactccgcgctgtcatggtcgtagtccgtgtcctccgggaaatggttgatcttcacgcagacgcctcttttcaaccctggaggggaatggggggcggggggtgatggtggtgggcacttaaccagttggggaactctgggtgagaaaagacaaccccccccctttcctcaaaccccttctctttctgggctgattgggagacaggaaatactggctcctgaacgtggctgcgcacctgggacaaactttcaaactccctggcctcagtttcccaaccaggttttaaaacaaggacaaaggaaaacatccaacactcactaaaaggccacagggacctttgccctgtaacctggacggggacagtctctccggcctctgtttccccctctgtaagaaaggtgttggtttcagtgatgtcaaggacccttcaactcgaaacccgttgaaaatacgtgggaaaacggagaggcgacagaggacgaaaaggactccatttcccgtgtgtgtgtgtgtgtgtgtgtgtgtgtgtgtgttagtcacttagttgtgtccgactctttgtgaccccatggactataatctaccaggctcctcggtccttgggattctccaggcaagaatactggagtgggttgccattcccttctccaggggatcttcccaaccccagggatcgaacccacatctcttaggtctcctgcactgacaggcgggttccttaccactagtaccacaaaaagttggacacaaaagctctgcattggagtccctttctgaccttgccctgtatgtctattcacttggttagtcctttaaaataaaactgcagttgtgagcatagttttttccccaagttctaggattattctaggaagtattcaacctta

SEQ ID NO: 46845 - DNA, 2130 bp, Bovine  19866881030709
  misc_feature (1)..(1): n is a, c, g, or t
nacctggggcaatggaacacaagtggacgtctcttccggccttaggtggagctggaggaagcgagagtgcggcgcagggctgcggtgcggaccctgggccaacaagccaggctgtggtcggtgcgcctgctgctcaacctggtggtgctggcgctcctgggggcagccttctacggcatctactgggctaccggggccactgtggacctgcaggtgcagagggccctgggggaggaaaggccctggaacctaccttcccaagggtggaagagactgaagcctgtgattcttggaatctcagagaggaaggattggggtctgtgtgtgtgtgtgtggtggtggtggtgctgaaggaagaagaggcttggggagggtaatggtaggcatggcccctgcaggaccgcggagcctcttctcttggcccaccctccctcctaggacaagcctcttatccagcggacgccagtactgaagctcgtggtggattaccttccgtccatcttcatctccgtggtcaacttcgtgctgccgcctgtgttcaagctcattgcacccctggagggctacaccaggagtcgccagatcgtttttatcctactcaggttctggactcttggcgtgggctgggtctggccgagggacattggttctaccaaataagagactgacatcgtcaagatatgggatccggtgggatctggattcagatcccgactcctcctgtcactgagccccagttttcttcatctgtgaagcggggagaactgtgagcacgctccacacaggagaatccggggcacgtggtgggcgctccatcagtgttgatgccctttttctcttttccacttgccaggacagtgtctctccgcctggtctccctgctagtcctgctcttctctctctggaatgagatcacttgcgggggtgatgcggcaggatgagaggtgcaaaacctgtggctataattacaaagaacttccggggaggatgcggggactcctgggtccttgaaggaaaggaacaacccggtgggtcccagattcttggtttgggaggaaagaggagcttgtggtgctagaataccttccccatgaggacaggggtatggatttttaaaaagaagaaagacccccgcccccccagataaagtattgatagagtctcatactcctgcaatttggagactcagctgtttgggtctatagggtcctgaggtccttctgacctgttcttcgtccctcagtgctgggagacccgcatgggacaggagatgtacaaactcctactgtttgatctgctaaccggcctggcagtcatcctgctctaccagtttcctcggaagtgagaatccctccccttgctgtggtcccgcccctgccctaggcccgcagaccatgcagaccgcccaccctccacgggtctgatagtcaagattattaactccactcaagcccggccccctagacgcacactcccgctgggcctgggaagtttcgccccgcctccagataggctcccttccgattggtgggcgggacggtgaaggcggggaaacccgtggccggcccgcctctgattctgccggtgtcatcctgcccctcaggctgctctgcggcctctgtcccggggcgctgggccgttttgcgaggacccaggagttccaggtgcctgacgaagtgctggggctcatctacgcacagacagtggtctgggtggggagttttttctgccctttactgcctttgctcaacacggtgaagttcctgttgcttttctacttgaagaaggtgagtggtggggagcagccttgggtctgaggcaggggaggtactggggcttgggtttctggattctgggagaagagagtacttaaggatgtgacttccgaatcctggtgggggaggatgccggggtcccggactacgagatcctgatagaggatgggtctggaggacagacccctggatgtgggaggaagggtccagggcatcccaattgttaggtctgagggaaggaggggacccagactcttgtgtctgatggtggaaaagaactggggttcctggctcctgattgaggagagggggccagggattagggctcctggatggtggaggagagtctggggct

SEQ ID NO: 46846 - DNA, 1994 bp, Bovine  19866881378910
  misc_feature (1)..(1): n is a, c, g, or t
ncatcccagcagccaacacggtggagtcctcgtcacttcgtccactaggaatgatttctttggttcatctaacacctggggccccgaccagacatgggggcagagagccagggaagacttttgtcctagattctgtgctccagcagggaggcagacctgggttgaagcagcccataatttggatgcccaccatgggtatcagacaggcctgggtcccagtgaattcaagttctgggttgtgaccaagttcaggggccacagctccatttcggggggctgggggtaggagtgtagactttgaaggggtgaagcagacccaccatctacaagaaatagctgttggatacacccaagaatctacctgcaacgccagagatgcaggagatgtgggtttgatccctgggtagggaagatttcctggaggagggcatggcaacccactccagtattcgtgcctggagaatcctttgcacagaggagcctgcagggctacagtccatggggtcgcaaagagtcagacacgactgagcgactgtgcatgcgtgcacgtgtagtcatgcatgcatatgagactgtctggcacttgggagtccttcaggggacttggccagttctcccagagggaaaattttgctgttcatggagggtaaacacagaagtgccatctgccctgtgaaaccagtgaggctggagcacgtgagctgtcagtggccacatagggaacctggaggtcagctggagccacggggcccagcttccccttcctggagacagcctgaccctcccacggtccgggaaaggagtgcacagtcagtccccacggaggtccgagcagaggctgccacgaagaaggtggcggctcccttgctactctgcccacgtggggacctttgagaatgctgctatttattgagcatctcccatgggccagcactgtgctgtagcttcccgggctttgtcctctgcagtcagagtgctgatcattaactgatactgaattcttcagtacgctttagagttccctgattcgtgttcaggctaacggttagatgcacccacatgctcggcacactccttggtgctttatgggttctctcagccttacgacagcctcaggaagtaggtgctgctgttctccccaagagttaccaaggggaaaccgaggcacagaagctgtgggcaggcaggaagcggaggggctggcattgcggcccagcccatctgcctgcagacgccaagcccttgggttgtgccctgtgatgctggatgcaggcctgagaacaagtcccgctaagacgctccagcctggggtggaggggctggggctccgagaggctaaatctcagagagtgccagtcacagggctcgtgcatggcttggtgcgggtgcggttatggtgatctgcctcaggccctgtgctctaaatggcgatagtgaccggccccctgtgcacccgtttcagagatgagcttggctgaggcctggagactggccgtcacggagagcacagagatccaggcagaggcgggccctcgtgggggtgctgtcaccttctgccgtgtcccagtccgggaacctggacacccgaaaggctgggttggctgcttctgcctcacccctgttgccccctccccaggtggctggcctatgtcctcctgctgctcctggagctgctggtctgtctcttcaccctcctgggcctggcgaggcagagcaagtggctggtgatcgtgtaagtccgggtggccttcctggaggtggggaacatcacagggcgagatcccacagtgctcttgtgagaagggcccgctgtctttccaaggctcacgctggtttcattcccttgtcccacagacctcagagagttcctagggtggggcaggcacatagggacacagagcagcccaggagggggctggggcagcagactgtccttgtccagggagtgcaacaaagtcccagaaagtaaataacagtaataatgcttgtgctga

SEQ ID NO: 46847 - DNA, 1815 bp, Bovine  19866881517913
  misc_feature (1)..(1): n is a, c, g, or t
naacataagaagcatactgttctgttgaactatgtatagatataaccaggtgcccaatgcttggcattgttagctctgctgctgctgctaagtcgctttagtcgtgtccgattctgcaaccccatagacggcagcccaccaggctcccccttccctgggattctccaggcaagaacactggagtgggttgccatttccttctccaatgcatgaaagtgaaaagtgaaagtgaagtcgctcagtcgtgtccgactcttagcaaccccatggactgcagcctaccaggctcctctgcccatgggattttccaggcaagagtactggagtggggtgccatcgccgtctccgtgttagttctaatccactggaaaccgattcgcagggtttgaataaaccagtcatagataagacgaaaggtacgtactcgtattcagccctattttcttactccataactcctactaaaggctggatccaatgtcttgctccatgtcttgcacaaccctagaaggaagaacagcagcagctctcctgcgggctcacatacacaccttcgaacagacgccgcgggtctttctcatccagcgtcagcagctcccgggcagcctttcggatcttggccagggtgaatttgaccctccagacctcacgtttgttccggagcccatactcgcctgcagaatgagtgaaaaagctcagtcccatggactagtgaaaaaggattagtgacttcgggatacagaaaaacaacagacaatcccaaaactgggtgaggagggtgaacacactggagatttttaaacagaacgagcacgtgggcggcctcacccatgtgtcagcttccccagcccgggaaacagaaacctagccactcaccgatcagcttcagctcttggtcgaggcgggacttctcgaagggtctccgcggggtcacataggttttgcgacaaacccagctccgggcgaccggcatgcggcctctgtttgcccgtctgcgcctgtgcgggaaggagagctgcccgtgaggactcggcagcgcctgcgcagtcccagagctacgctaggaacctccccggcgcctagggaagatatcgcgagaactgttcctgaagagttttataatcgaccatcatttctaccactttccagttacgctcatttcacctccaactgctttagcgtactcattaaaggtcgaatagcccgcaagactttacgacccacacccaaaataccgaacacggccgcatggctcacctaagcgaacgctctggaaaccaagaaagaggagcatgcgctcgccggccgcgttcttatagcaacgtcgcccttttgtgacgtcatcacgcacagcgcaagtttgcaccaatcagaaaaggccttggcgggcggacaaagcagtcaagaggagagattgggctagagtggcttgctaaaccgggaggactgacgagggattagtgctccgtctggtgcgacgtgagggctcctctccgccctcgggtagtgacttaagtcaccactcagctaacgtcagagtcgcggtataaagttggagtagtcaccgccaccgccgctaggcttcattcaacatgctccgtctctctgaaaagatctccagaggattggacctataagaattcaaagctccttccaagatgctctgttatatccatgaataatttttttaaaaatcatttttcatatcaccatgtctacgcaaggcacagccagaagccaatctgcccttttgaacccttcaacagcccctctgttcgtgaaactttgagcctaagggaagagagggaaaataat

SEQ ID NO: 46848 - DNA, 640 bp, Bovine  19866881979497
  misc_feature (1)..(1): n is a, c, g, or t
nccgaggtcccctaccggcctcctctctgtcccccacctgggtccccagccagtctcggtcccctctcattccccctttccaggccaagggcagggaatctgggccagactagctctccctatctctccagccccccttccctcccagccttaaaaatagcaggagaaattgggacggacgccgagggggtgagggcgggggcgcggcccgaggagggagaaccgggtgtccgggcactcacgtccgtctgggggccctttccagcgcctggacactcgaaggtcacaaactcgtggcatcgtcgatgaaccacaaaactgcagactgaaggtgaaaatcatagaaatccagagcagagagagaccccagtggacagaaaatcagaaagaggggagacccagacagaaagaaacccaggtgagagggatctccatagggttcaatacagagaaaatcagagaccttgacaggcagagagagacagatagacactgagagacagagattctaaaggtggacccagacagagaaacagagatgcagagaatcacagaaacagagaaacacagagcgcccagtgcctacacacagccaaagacgagacagagacacagaggcagagacagagagagagagagg

SEQ ID NO: 46849 - DNA, 2381 bp, Bovine  19866880265545
  misc_feature (1)..(1): n is a, c, g, or t
ntatattgtcccctgattatttaaattatatgcagagtacatcatgagaaacactgggctggagaaagcacaagctggaatcaagattgccgggagaaatatcaataacctcagatatgcagatgacactacccttatggcagaaagggaagaggaattaaaaagcctcttgatgaaagtgaaaggggagagtgaaaaagttggcttaaagctcaacattcagaaaacgaagatcatgcatctggtcccatcacttcattggaaatagatggggaaacagaggaaacagtgtcagactttatttttctgggcttgaaaatcactgcaaatggtgactgcagccatgaaattaaaagacgcttggtccctggaaggaaagttatgaccaacctagatagcatattaaaaagcagagacattactttgccaacaaaggtccgtctagtcaaggctatggtttttccagtagtcatgtatggatgtgagagttggagtgtgaagaaagctgagcaccgaagaactgatgcttttgaactgtggtgttggagaagattcttaagagtcccgtggactgcaaggaggtccaacctgtacatcttaaaggagatcagtcctgggtattcatttggaaggactgatgctaaagctgaaactccagtactttggccacttcatgcaaagagttgacccattggaaaagactctgatgttggcagggactgggggcaggagaaggggatgacagaggatgagatggctgaatggcatcaccaacttgggggacatgagtttgagtgaactgcaggagttggtgatggacagggaggcctggcgtgctttgattcatggggtcgcaaagagtcggacatgactgagcgactgaactgaactgaagttgtatagtttctctcaaatttcacatacatttcaactattccattctgttgtttagactttgaggattttgcattttgggatagtgagaaattgggaatgaacactgataattaataagcatataacatttcaccatagtagtgtttctcctaatcatgtgttgctttctcctgaaacttgacctgatgaggttcctttttagtctatactgatgactcctgtatcacagatattgcttaggtgttgtttgggaagtaggtatatgtgcttacctgagtttttcctattgagtcaaaaatgaaaattaagtacttactgcctatctcatgatagactaatacttaaatcacaaaattgaacaagatcgaatatgcagttttcattttttcagcgagtgggataaccaaagacaaattcttcagcttattgctttaacttaaataattctgtaatataaagattattaagattaccactttataccttttgtttataactacacttcactctcttaagtgtgtgcatctgtgtgtgtgcttgtgttacatgactgtgatttccccttaaataaatgaagaaaatctgtaaatctcattcctagtttcataaccccaagattaagttctgataggacagctcactacaaaaggactgttttaaaaaactccttaatggttatatgcttaacattgagctgttattgctttgaaaattacactgatccagatgatccaagggaagaaactagtattttaaataatgtgtaaagttgtttgggaactatgtgaaataaagtgagaagattctatttttgaagtcaggcagggtgtatgtaattctaaaatttctttgaaacatgtttcttaaaatttgcagacttctttatttaatattcttatactaaaagcaacacaaattaaattagtgaaaagagtattagtattctgcaaataaaatgccattagttaaggttatttcacattggctcccatataaagcaaagttaactattacaataatataaattatgctagtgttccctagaaagtgctgcacaaattcatataggatcagaaactcaagcagcaagacaaaatagtaatacacctagtctcttaagaggaattattttaaaaaaaaagaaagaaaagactactaatgatgaaatgagagcagcaatattattaatatttaaataaatgattaattatcttatcacataacctagctgaattgagtataagatgaaaatagcaaaatcattttttgaagaatttctcaaatatgattgaattaatatactgtagaatttatatataaaaagagatcataggatcctaatttacccataattaaaatcatttatacattttatcattcttggaataaatgtcattaatgacagaagctggaaagcaaaatactttgtgatccattttttcatctttaaatcaatctttcttagtctaatatctggcacattt

SEQ ID NO: 46850 - DNA, 1321 bp, Bovine  19866880427247
  misc_feature (1)..(1): n is a, c, g, or t
natcttcgttttctgaatgttgagctttaagctaactttttcactctccattttcattttcatcaagaggctttttagttcctcttcactttctgccataagggtggtgtcatctgcatatctgaggttattgatatttctcccggcaatctttattccatcttgtgtttcttccagtccagcatttctcatgatgtactctgaatataagttaaataaacagggtgacaatatacaaccttgacgtactccttctcctatttggaaccagtctgttgttccatgtccagttctaactgttgcttcctgaccttcatacaaatttctcaagaggcaggtcaggtggtctggtattcccatctcttccaaaattttccacaatttattgtgatccacacagtcaaaggctttggcatagtcaataaagcagaaatagatgtttttctggaactccttgctttttccatgatccagcagatgttggcaatttgatttctggttcctctgccttttctaaatccaacttgaacatcaggaagttcacgaagctgaactgaagccagctgaactgaagccaggcttggagaattttgagtattactttgctagcgtgtgagttgagtgcaattgtgtggtagttaagtggacataaaccaaagagaaatatgttgctacagaatctatcttgtttttattattattgttctatttacatgtttgtttgttttgttatgagcagaatcaaggttgacaaccattcattttgctcttgctaagcagtcagctaccaggctgcctacaagcctcctgcccttgtaatctgccaatttaaattgaactaacagatgtgtagtctaagtcacttatacttttattcaagtgaaaataagatataaatcagacacatctaaataaatatggatacagaaatcctcattttattcaaggaaaactttgtaaattgtgtctatgagatgtgaaattgcacacaagttaaagcaaataagcaataatgtctcctccaaatatgagattctatgacttataacatagacagctttatgaagaatgtcatgcattttatctccaccacatctagcatcatgtgtatatagtagtaaaccatatgggcatacattctcagttaaccttcaaccttcaatgaacttcatgtgtgaactttaactttttacactgcctccctgctgctagagatctctcttttatctttaaagaaaatattccatcccctttttaattgtcatgttgctaaattatcactgtctttccaaactccattcacttcttgattcagcttcaa

SEQ ID NO: 46851 - DNA, 1378 bp, Bovine  19866880429951
  misc_feature (1)..(1): n is a, c, g, or t
naatattcaaagtacaatgctcggtggaagagggcgtattatggaataaccgagtaggatagagaaatttttattgaattatagaaacttttttagattatgtcaagtcaaattcatagtatataatctattaattgtgcatttacgttgttacaagttgaagactgttatctttcaagagttaaagctggaacaacaattggagatttctagacatatcttaataagtcctgggtcatgactttagttttatttaattagaagagatagtttggtctgtaaaacatatgtgggagaaataaactactttatagtttttaattttccactacaattatttggcataagttattgggcttctttctcattttgtatatgtgacttaagggaaatctataccaaagcccaggtgtatgctacactgtagaaacaactgtgaaactcaatataagtaaaaatgtgtggttttttttttgtttttttttttttaataaagaagccctagaagagtttctttaacttaactttcctggacatagtcaatgctttacttagtttattctaaattctttcctatattaattaattttcctgtatagggtgttatgcctctttatgcagagatgtcacatgaaaaatgatgtgactttttttaaatgaaaacttaaacactaaatatagaaaactaatgaagctgattatcccatagagttgaacttacatgcccttcaaagagagaactgacctcattattagccgcttataggaagttccaatgaacaaatgcaaatgataaattttcagattttgtatcttggcactgatgcataatcaagttgaagttattttaatcaagtaactgtggatctggaaaacagagcacaattggtaaagttcaaaggaacactttgaaatttcccacatttaaaacctttattaagctcagatctagactaaacagaggaactcattatacagtaatgagtgacatagaactgcatcctaaggaacacttctttattttattatataatgaaataaaagtcactacttaaagctctctggaatgataattttaaaactttgtttcaaaatgtaatgtcttgatcagtatacatatgtgaagtgtactattttaataaattactattatcaataaaggggcctttccttggtggctcagaggtaaagaatccatttgcagacatggattcagaccctggggttggtaagatcctctgcaaagggaaattgcaacccatttcagtactcttgcctggaaaatcccaaggacagaggaatctgatgggctacagttcatgggctcacaagatttggacagaacttagtcactaatccaccaccactaccattatca

SEQ ID NO: 46852 - DNA, 2415 bp, Bovine  19866880467322
  misc_feature (1)..(1): n is a, c, g, or t
ntactgttgaagcctagcttggagaactttgacaacgactttactagcttgtgagatgactgcaattgtgcagtagtttgagcattctttgatgttcccaaaaggaatgaaaactgacctttcccagtcctgtggccactgttgagttttccaaattttctggcatactgagtgcaggattttagcagcatcatcttttaggatttgaaatagctcagctggaattccatcacctccactagctttgttcatagtgatgcttcctaaggcccacttgactttgctccacgatgtccagctctaggggagtcatcacaccatcattgtcatctgggtcatgaagatcttttttgtacgattctgtgtattcttgccacctcttcttaatagcttctgcttctcttaggtccgtaccatttctgtcctttattgagcccatctttgcatgaaatgttcccttggtatctttaattttcttgaagagatctctagtctttcccattctattgttgtcctctatttctttgcattgatcacttaggaagtctttcttatctcccctgcatggatatctttccttttctcgcttacctttcacgactcttcttttctcagctatttgtaaggctcttcagacaaccattttgccttttgcgtttctttttcttggggaaggtttagatcaccacctcctgtacaatgttacaagcctccgtctatagttcctgaggcactctatcagatctcattccttgaatctatttatcacttccactgtataatcataagggatttgatttaggtgatagctgaatgacctagtggttttccccttttttcttcaatttggcaataaggagttcatgatctgggccacagtcagctcccagtctttttttttttctgattgtatagagcttctccgcctttggctgcaaagaatataatcaatctgactttggtattgaccatctgatgatgtccatgtgcagagttgttccttgtgttcttggagggtgtgtatatacacacacacagtggaatgctactaaaccagtagaaaagaatgaaaatttgccatttgcagcaacatggatgtacatggagggcattaggctaagtgaagtaagtcagacagagaaagacaaaaactgtctgatatcacttagaggtgggatctaagaaacacaagaaatgggtgactatatataacaaaaaagaagctgactcacagatgtagtgtataaacgagtggttaccagtgggaggaggagaaacagtaggatgggggagtgggaggtgagacagtgttttggctatcacatctggggggtggtacttctagcacctagcgggtggagtttacagccgactcctacagcaaagaataatccaactccaacgtcaataatcccaagatatagaaaaaaatatgcagcgtttaattacaattttctaacattagtaggagctctgagcatagagattagatgtagcttttattttcttcttttttaaatcaaagttttctaagatttctataagaaatgtactttattgttttatttttttttaattttattttatttttaaactttacataattgtattggttttgccaaatatcaaaatgaatccccacaggtatacatgtgttccccatcctgaaccctcctcccttctccctccccataccacccctctgggtcgtcccagtgcaccagccccaagcatccagtatcctgcatctttgaagcagtttatatttctaaactgtattgtaactttggtacaaaatttcttggatttgttatattcttgggaaaagaaagaaacacatgttttctgtctttgacctttagcaatcttagtgaaaattcaactttttaagacagtaagtcaacatacttaccttcacattaacttatatgtactccacctcaagcctgagtgacattacatttctttccagaagattaaatacataaaccttaaaagaccaaaaagattttggtctttacaaccaaaatcttggttgaaaattggacatttggatgtaccttggtttcatactttgttgtcataaaactcaacttgtctagtttggaagtaaaggaaaactttttcctttgtccccaaactttgcagattttccagtgcatcttaatgtttgtctttctctacaccaccccctacactcatactcatccctgggacttttatgttttacaatcactgtaactaaatgacatatgtgaaaactaaagcaaataataactttagtaggaaatatcacaagcaaaaacacttcctttattctgtacctaatgctgtaaccaaaaatttcctcaatccattagtcttcaattcccaaataatatatattcaagacagtaagactcaagtattctcatt

SEQ ID NO: 46853 - DNA, 795 bp, Bovine  19866880504840
  misc_feature (1)..(1): n is a, c, g, or t
ncctccagaactgtgagaaatgaatttctgttgctataagccactgtggctaaggtattttgttacagcagcccaaactgactaagacaatttcctaatcctttcattagtgttttgagtttgaattattcttccttctgagggaaagtaagtagtggtctaatgacatccaggctatgtaccagagatggaggagacatccatctctaagatacatggtccctttccattgaggtgtccctaattcgaacccctccctacctctcagctttgaaggattagacaatgaaaactacacacatacacacacatgcaaaaagtccaaggtccaagtcatctgtcatccctcaggatgtgattttcttcgtcatttaactgtcttcccctgaagaacaaattatgctaccctgaaatgaatgctaatcttttagtccacagggaaaaggcaacaaacagccaaatatccgctcatcacaatgagcttagatgaagcaggatttaagctgctcttatatggacaatccatgatctttattagagtttactttgcataattacctcagggaactatgataagcctagagccatttctgagtcttgcattcattgtatgttgctttgcccaaggaagtaaatataaattagaggattctgccaagctccctagattcctgaattatccaccacaaaaagagaagcatagcatcctggaaccctttgggtatctgagaacacactctgacccaaaggagaaatatacagatcatttctctgcctcagaggaaaacagaaagt

SEQ ID NO: 46854 - DNA, 710 bp, Bovine  19866880741305
  misc_feature (1)..(1): n is a, c, g, or t
ntggacactacttagcgactaaaccactaccaccactaaaactggcaaaatccaacaaggtaaaggaaacatgtatttaaatccttcatcttctgactactggtattaaaaactagggaaatcttcatgaatatccagccaccttttctccaaatgcacccaggatttgacctggttttgttatgggtctagaaataatgcatgtaatgtgacctcactctgtcttgaatgtgggagtcaataattcaaatattatttccatctcagttcctgtttgcctgctcaccttatttaaagaatggacacaccaaaggcatagatatcttcagtgtcaacttttcttcaaatctagcactaaatgcttgttcaacgtacaaataataaaggtggctagtatcattttaggcttcgattgcttttaatgtgggttggggaaaaacaaactaagatgcaaaaattgattcttaatttattaaaattatcattaagcttccagtatgtagaatgtacagagatattttaaaatgtgcaactggaagtatttttgccacacagagtttatctaagggtactgaaataaaactgcagtttaatgggataaatttatcattaggggatgaataaggccaagggaatcaattcaagcatttggttttcagtatttttctatgcaactggtttcaattcaaaaattattaatagtctcaagg

SEQ ID NO: 46855 - DNA, 752 bp, Bovine  19866880819265
  misc_feature (1)..(1): n is a, c, g, or t
nttggcacagacttaaaatatgattaagatggttagctcttgggaggctttcaacaaatgtttattaattgaataaatgcctaaaaaaatgctgctttttgttttaatgctatgattctgtcattacagaaatgggatggattagaattgaagaggattttttctctatagattatccatacccttatctcatagccacactatataaactcagaaattgaaatttaactatttggtcatatgaaactcaaaaaacatcctaattttatgtagtgaaagcatattataaatataaactttactaatagcatatgatttttcaagaaaatatagtatgctgatctcattaagtttgcaagaaaattcaccaaaatattaaaagggcaaataattgaaaggaataacaaacttgctcagttttatttacaacaattaaaataataaaaatatgaacatagtcttattctaagaaataataaaatcctactaacttggtaattgcccaacttctaacagttttcagttctttatttttgagcaaaaatttcaatttccaaaggcaaaaatctagtttcatattgttaaatgtttccttctgaattcataaaaaataaaaataattttaatatacataactgaaaaatagctactttacagttacaaaaaattattaatttaaaaaaaagctttatcgctgtctgttgctaagccatcagcattttattctgtacttaatttatattctttaatgt

SEQ ID NO: 46856 - DNA, 1099 bp, Bovine  19866880869771
  misc_feature (1)..(1): n is a, c, g, or t
nagccgtgactgatggaactttgttggcaagtaatgtctctgcttttgaatatgctatataggttggtcataactttccttccaaggagtaagtgtcttttaatttcatggctgcagtcaccatctgcagtgattttggagctcccaaaaataaagtctgacactgtttccactgtttccccatctatttcccatgcagtgatgggaccagatgccatgatcttagttttctgaatgttgagctttaagccaactttttcactctccactttcactttcatcaagaggcttttgagttcctcttcactttctgccataagggtggtgtcatctgcatatctgaggttattgatatttctcccggcaatcttgattccagcttcttccagcccagtgtttcttgaacattaacttcaaccatacaggacccaaagtactatactccagaaagttatagaggaaaatagatcagttgagtagctataatcctggaaactaagaactctgaatctggctttcattttctctatcctaatgttcaagtcaatttactattttaggattttttattctttaactatagaaagccaaagaactttataaggctattaaacccacctgcttcttggggatgcagtagtagtgtaaagttctttgaaatggcaagtgctaaatggaaaaatatctgatttgatgttctattcctatttcaatgccaaagttcaatgctgtaagttaaggacagaatgaaatcacttgcaataaaatagttgatgcaatttcccaaaactcaactgtgtctccttatatgagatcctttagttactaggatatggaactactacaaaaagaaatgattaccctgtctgttcagaagataggctgacattcttcccttcactttcttttttttttttttttttttgataggtaagaattggatttatttaaaaaggcaatggcaacccactgcagtactcttgcctggcaaatcccatggacggaggggcctggtaggctgcagtccatggggtcgctgggagtcggacacgactgagcgacttcactttcacctttcactttcatgcattggaggagg

SEQ ID NO: 46857 - DNA, 1874 bp, Bovine  19866880871660
  misc_feature (1)..(1): n is a, c, g, or t
ncctgtggcttctagagtagaggcataacagagggacaccataactatctgtcaaaaggcatgaaaaattcctagattatttgttaatggctcatataaatgtctaggacttggtcaataaaattggttgagctgttctatgaaatcacacattgcttcaagcttataagaaaatagattaatattatcacaaattctttacatactaccattttaagtgaatacttattcagaaggtgtgtgtgtgtgtgtgtatgcgcaaagttcttcagtcatgtttgattctgtgagaccctatggactacaccccaccaaactcttctgcacatggaatattccaagcaagaatactgaaatgggctgccatttccttctcttataaaaagctttagtttttctgtacattaaatatggtttatatccaaacttgaggtatatttattttgaaaatttgaatatctggaggtaggggtgaggggagggaatatgagtgaaagacattaaaaggtaaaatagaaaataactgcagttgatgcaaaaagacatagaaattttgaatgacatttaaaatagtgatttattatgtgcatatatatattggtatataattaactctattttacttcattttaaaaaaagttaaatgcttttggagcatgaaataaccaaaaagtaaataatacaaaatagctataaaagatggtagtcttgtcatcagtcttgggattgggatatatattaaaattttcctcatttctttatgtttccaaaaagaaaaaaaaacttagtgaatctcttcagacagtatttcagaaaaattcatcagaatctatttcccaggcaaaagctggaaggttagaacaaatcttacttaaacatctccacaattattactgttcactgtgtccaaatcacttgtgcagagacccatattatcaggtttagaagggccaaagtgaatgggaaaatttttggtcatttagttagcttgtcaattagttatcttgcagatatgtatcatcaggctactaagcactcagagctttgtgggttattctcaatttgtctgaaggcatatttcctggcagggatgactaaacctcatggagtcatctttaatgaacttgtgttagtcattcaccacccttttcccacttgtcattaccagaacaagtatgctttgtaaccttcatccaaattttgttttatttttagaagtgccttaaattgaaaattcttggctgaagagtctatggaataagaatatattttactatttatatgtgacgaatttctatggtgaactctaggctttttagaatgagatcactgaaatttccatatcaaaaaatgttccaaataatatagcattctgaatccatatgtggttcaaaagaaatctgcagacagattctttaccactgagtcactggggaagcccctttttattgcttaattctctgcttccctgatagctcagacagtaaagaatgtgcctgcaagtcaggagacccaggttagatccctggtagggaagattcctctggagaaggaaatggcagcccactccattattcttgtgcagaaaattccacagaggagcatggtgggtcccagtctgtggggtcacagaatcagataatacagtgaccaacactttcacttttactccagtcacaatggttttctgcttgctctttagcataccaaggcttcttactgcaacactttgcttggagctcaactcttttcttggagcacaagatatgtgcatgattctccctttgttaatcactctatagtcttgggttcttttcctcatagaatttgacattaactaaaattatcttatttatctattcactattagtttt

SEQ ID NO: 46858 - DNA, 809 bp, Bovine  19866880934061
  misc_feature (1)..(1): n is a, c, g, or t
ncaggccttcacacttatgaagttatatacatacacacacataaattgtcaaatacctacttgcccatttctgacaaaagatagtaagaatatggagtaataaaaatttaataacaaaaatattttattattttcagaggataatacaaaccaaacattttcagacatagtgatttgggggaagagttttaaacatacactttttttgtttttgtttttaaagaaaaagttgaaatcacagtgcattttagaccttttatcccattagctctttttccaatatttctttggaagaaagtcttaataatgatttctgtactgtactgggaaaaagtaagttctatgatacactgctaatatgatacagctagaatgcttaataccataagtctttcatactatttcttatcacattaacacagggacagcatgtctttcctggccagcttagtttctcattgcctgcagctattggagattcatgaatatttaaaccttgtgaaaataagtgcatgttgactctgtgatatcactcaatagctaagattggctttttttcctccaaaagttggattttctcaagaagattctgtcacctgcagagaagcacaaaacctgagagaaaagcataggcaaggattctctgttctgatattttcttgtgtcatccagtcactacacagagccaataggctgcatactggcagcaaaagcagaggtatgtatgttttatgtttcttcattgccaagtttcttgctgactttcttgcagttgtggatgtagtaatttagcagtttactatgatctc

SEQ ID NO: 46859 - DNA, 1474 bp, Bovine  19866880939225
  misc_feature (1)..(1): n is a, c, g, or t
ntgggacagaattcttgtgatgcacaacaccagggggaccaccaggcacatataccacaatgtgaatgggactccttggatttatgtgacacaatggctgtggagtatacacaaagaccatgggtttacaatgctattaaatgcaaatttgctgatgcctccaagtctttgcaactttaaaaacttaccactagagaatgtaacttggtgcagcctctatggagattcctcaagaaatcagaaaaagagctaccatacaatctaggaattacattctggatacttatctgaaggaaaggaaaacactaactagcaaagctatatgcactaccacattcattgcactgttatttacaataaccaagacatggaagcaacctaagagtccactgatgaatgaatgagtaaagaaaatgtggtaaatatatatataatggaatatgattcagccataaaaaaagaaggaaatcttgccatttgtgacaatatggatggatattgagggtattatgctaagcaaataccatatggtcttacttatatgtggaaactgtaaaagagataacaaatgggaatttgctgtatgtctcagggaactcaaacaggggcaccgtatcaacctagaagagtgggatggggagggagatgggaggcagcctcaaaaaggaagggatatatgtatacttatggctgattcattatgaggttggacagaaaacaacaaaattctgtaaagcaattgtctttcaattaaaaaaataaataaatttaaaaactcaagctcatagatacagagaacagattggtggttgccagaggtgagtcaaaatgggtgaggggtcaaaggcacaaattttcagttatacaacaactgagtcctagagacatgcaacatgatgactaataatatatattggtgtttttgaaagttactaaatagtagaccttaaaagttctataataaaaaaagtttgtaactatgaatgttaactaaacatttgtggtgatcactggcaacacatgtatacaaatactgaatcattatactgtacacttgaaactaacatagtgttatattcaatttcacttccattttaaaataataacatatattttaaaaggaaaacttagtactgtgcagtttgcttatggatcaaaagaaaagttttccaagaaaataaaatgaactgatctctcacctcttattctttcctcaataacctgagacagcagagttatcaccaccttatctggaactcctgtgagaaaactgcatcagatgtccccctctaactccgttcctttatgacatatctctttcaaacaacaaaaccagcagttctacccaaagcattgaaggcctggaaaatggattacagctgtcattttgctcgagtagaccaaaagtcaacttccaaatgtagtagtgtttgcaaaaacagtaaattgtggcactaacattcataaaatgtgt

SEQ ID NO: 46860 - DNA, 1801 bp, Bovine  19866880963663
  misc_feature (1)..(1): n is a, c, g, or t
nctacaaatcttacattgtgttcctcctcccttttaatgtaatcctttgcaacatattttataattcaatgagtccttcaagtttcatttttaacattttgttagaacttagcagtcctttatgggtcatgatagtgggtttcccaggtggtcctagtggtaaagaatctgcctgccaatgcaggagttgtgagagatacaggccagattcctgagtcagaaagatcccctggaacaggaaatggcaacccactacagttttcttggctggaaaattccatgaacagaggagactggtgggtacctatagtccacggagcttcaaagagttggacatgactaagcgactaagtacacatgggtaagaataaactctgctattaatggttcctagagataagaccagactctggtaaagctggagataagcttggtgctgatgagggggactgtggtcattatagaaaccagctgtcaggctcacacacatgtcgaaactggttatggcagtgtttgaggcagtgtggtttgaagtcagaacatcaaagcaagtcatatcaagaatggaatgtgctacagagtgctgcccatggcccagcttccagttaactcactaaaggaacagtatcatggtggtataagtggagtggctcagatggtaaagaatctgcctgcaatgcaggagactcaggttcgatccctcagtcaggaagatcccctcgagaaggcaatggctaaccacttcagtattctagactggagaatttcatggacagagaagcctggcaggttacattccatggggtcacaaagagttaggtaagactgagtgactaacactttcacttttcacactttcattggtgtatctaccccctgggaactgtggcttcaattgcaccttctgaaccagtttaactgcacaggtgtttcacattataagtagagcctgaagagtagaattagaattcgtggctaggatgaacaattgttctgttttcctcaggatgagggggtttccaggatgcaaatttcagagttagaattgagatgatgctaggaaaattgtcctggtttcttctagaccaatgaattacctgggggttaactgaccagactggtaaggatcatggcaaaaccaaccagggatatggatgctgtataataactccctgcctcatttttgtccatcaaagtgggtcagcttctttctaatctctttcccttgaggctgttttgtcagaccgtgtggggcttgttttatcttaatgccatggcagaggaagcaggatctgtactattggcttaaccacttcattttatgcagagaagtaacattaatacattagggcatccatctggctggttttcattgccagtacaaaattaccttttgattcatgatgcattttgatctaaaagacacccaccatctaaattttgatcagttctgtgccctcagtctgaatctctcagcaaaaggagaaaataatacctgtagaagaaaatttccacacatatgtttcacctttctcatcccaaatgtaagtctgcataatcaccaataaaactttaataaatattgtctgaagttgtcaggcaaacaagggtgaattcagagtcaggaacaagaatgccaaggcaggaacaaaggtgagggcagattgaaggtggcagtcaaagcaaaggtgagtcacccacggattctgctgtgcatgtttactgtgtgccatggtttctgttgcattttattccacttgctccctgagtggcgctgatgcccgtgaagagtctgctgtgt

SEQ ID NO: 46861 - DNA, 1741 bp, Bovine  19866880976783
  misc_feature (1)..(1): n is a, c, g, or t
naagactcttgagagtcccttggactgaaaggagatcagactagtccatcctaaaggaaatcagttctgaatattcattggaaggactgatgctgaagctgaaactccaatactttggccctgatgcaaagaattgactcatttgaaaaaaccatgacttggaaagattgaaggtgggaggcaaaggggaagacagaggatgagatggttgaatggcatcatcgactcaatgggcatgagtttgagtcaactctaggagttggtgatggatagggaggcttggcatgctggagtccatggggtcacaaaaagtcagacatgactgagtgactcaactgaactgaactggtagttattgaaaatttaacttttgttaatcctaagtttattccttttagtcatgaaacatggccctaatttctattgatcatttctgtaaataatttaggaattttttgttttgttttgtttttaagataagaaaggccattcccaaattttctcaccaagtgtttttacttcagagcatttacaacttctgctgctgctaagtaacttcagtcgtgtccgactctgtgcaaaccagagatggcagcccaccaggtttccctgtctctgggattctcaaggcaagaacactggagtgggttgccatttccttctccaatgcatgaaagtgaaaagtgaaagtgaagatgcccagtcatgtccaactctttggaccccatgaactgcagccttccaggctcctccactcacgggattttccaggcaagagtactggagtggggtgccattgccttctccatttacaacttctagtaattacttatttcatagtattttcacttgcttattatgtttcccacactatgttattagctccataaggataaagttctggatgcctgctattctcataatggattcccagaatctaactatatatttctattttcagaatgaaagaagtaagtaatgaaacatccaagtaatgaaagaagtaagtaatgagtggccacagggtgaagaaaggaatgatggagagagatggaaagtggcacagttgataataaatacacccaagagattccatgatgaaaagtcaatgtcagctctaagtgagagatattggcattgcttgccttctgcttggattggacaagctaaggaaagaagacagagcattggcatgtttgaatatcaacttcctgactgggtgtgctgtttcatttcaaagggcaaattgtgcataaatcatggattgatttttcatttgtttcttttctctccctctctgtgttgttgatgatgatgttttgttttgttcatctctctctattgacattctctagtttttaaaacttccaagtctgccaatcaaccttattgctgcaagttttaatcttttataagctttcatcagttttctggggtcttaataaatgtctgcagagaaaatattagaattcctggcccaatcctgttttaacctgaaatctggatgctgcttcttatggttggaattgctgcagtgttagatttcagttaatgaatttgttctctcataaccacatgccagttacagcaccatgctgtctttttatttaacagcttccacaagcacattattatccacaaatttggaaaacttattttggggggaaccatgaaaaaattctactgggtgaggtgtcattacttgttaccactctttattcattaaacataattgagaatg

SEQ ID NO: 46862 - DNA, 1203 bp, Bovine  19866881031167
  misc_feature (1)..(1): n is a, c, g, or t
ngtgaagagttgactcttggaaaagattctgatgctgggagggattgggggcaggaggagaaggggacgacagaggatgagatggctggatggcatcaccgactccatgggcatgagtttgggtaaactccgggagttggggatggacagggaggcctggcatgctgtgattcatgggatcgcaaagagtcggacacgactgagtgactgaactgaactgagatctattaggaagctgaagtagagcaattattgcaatgcttacatctgaattgaggaaattctaagtactatgtatccatctcattaaagctgcttgcagttcagaaacaactaacaaaaaatagaaattaaggtaataaggttttgacccataaaaagatgaatgaaaattatgcattaatgtgcatctgataataattagcaacattcttttataaaatagatgtctatctgctctctacaatgttgtatctgtcttttgccatctcccagaaataaatctttgatttattattgccccgggctaactgaagaaaatgttaagtctcagctttgtgattcatgcatattgactatgcagtcagtgaagaagaaggaaactagagattttgtgaaacaagggccacctgtgttttattttggagctgattaaacgtggtgcaatctatggcaaaattacaacagttatggacttcagtatgcaaggattaaaaaataatcatatttaagagtttataattgtctaataattattttccaagtgtcattatgccttaatttccacacacatcttttggtcatagccacagtactagtgagggcaacatttaaaggaaaagacactattatttctactatggaaaaccttatacaaatgcttaccttttatctaaaaaattatgtctttccttttttttaaacacaaattcgctttaatatagtacaataatgtatgtacaaaatcaggtgttatctgtatttattatgtagcatatagtgctctttattaatgaactagccttacaatagaaaatctaatttttggtattataaactgccgatccccaatctctttggcatgagggaccggtttcatggaagacaatttttccacagactaaggtgagggtaagaatggtttcaggaggattcaaatcattacatttattgtgcctttcatttctatttttattacatcag

SEQ ID NO: 46863 - DNA, 2291 bp, Bovine  19866881172091
  misc_feature (1)..(1): n is a, c, g, or t
nagtttttcaaccttttaatttctctaaggaaattctgattcttgcagataaatggttcccagtagtacttttgtactcataccagtgtgtccccaaatagggaggggaaagaaagatttttttaaattagaaattaaactacccatgcacagcatcttaaaatgaaactaatttataccttcaataattttgagttattatatatattccattttagcattttcatcactaagatttcttactttttattttttatgcaagtttgactttactactttttttttgtttgtttgtttaaataatataggtatccctccactcatagatttaacaagggcttataaaatcaatattttaaccttggtaactttgcatcttatcaactgttttgaagtcaacatggctgcctctttttccagggcaaggaaaattagtggtatttagactttctggcaatacatcatttgggggaactccatgtatgctttcaacaaagaatgttaccttatgaaaagttatttctttgtagagttattggtaatttctagggtttttaaaattttttattcatatttaaacactggttcaatcctaaatttctttcttttatttatttatttatttttatttttaaactttacaaaattgtattagttttgccaaatatcaaaatgaatccgccacaggtatacatgtgtttctatttgcttttaaatttgaagagataatttctttggcaaaaagtcaggagagaattaattgcatttacaaatgtatgctgcttgtttttctgttttatgtactaccagtggtgggaggaatagtcattttcctctgtccttttaagttttgttgagacccctcctctgtaataaaaattcagatggattaatcaaagaaatatgcaagctcagtaattatcaatctgttcatcatatcccattgatccatctctgtcttctaacatgctctagttttttcccactagttgccctggcactgaaaaaccctctcccttttgttttcgtgaagttaatttcaaattggattctgtcctctttcctctattacaataactttgtatttcagtcagctcatgccatcataagaaaatgtactgggtggcttacacaatagaaatttatttctcatggctctggaggcttggaagtccaatatcaggggtccagaaagtgagttattgttctggctcacaactggctgtcttcaaccttgtcctcacctggcagaaagaaagagcaagcaagctctctgatgtttcttcttaattcctttttttagggttccatccttatctaaacctaatcacttcccaaagacccatctccaaatatgtcacactgagattagagtttcaaatatgaattgtaggtacttggaataaaattctgttcatggtactttgaataaaatcttatctgtttaattttgttcagttcaatttttgctttgatacagtcaactggcagaagagagtgtttttttttttcccatgggtaaaaataatccttcactacttattcttgatatctcattgagcagagagtaggcaaaggaaagagaggcactgtggttttctcaggcattttatattttccaaaggtcaggcaattcttgactaaaattatgaagaaaaattttctttgatgaccattcatctctcctctttattctgctcttctgttgtattcactccaagggcagggaggtgagaagtcagggtagacctcccggaaataatggcatttatgtataacaacaatgggagaacaggagcagagtttaggggtaacaaaacagctggtataaggaagaggcatgaactcatagtgataacagcaataacaaagtgttacatttatttaatttctactatgtgccagctttgattctaaacacttgatatgtattaattaatttaactgtcatagcaaccttactaggtagatcctataattttccctattttacacataaagaaattaagctactggcaagttaaaaaggttgcttatggtcataaactaataaatgatagagctggggtttaaattcaggcattactgtccatgcattgaatctcaaaactgtcactaaatatatgtcatctctctttagagagcatgcatgctcagtctcagtcatgtctgacactttgtgaccctttggactgtagcctatcaggctcctctgtccatggaattttttaggcaaaaatattggaacaggatgtcatttccttttctaggggaacttcccataccagggg

SEQ ID NO: 46864 - DNA, 1147 bp, Bovine  19866881283028
  misc_feature (1)..(1): n is a, c, g, or t
nagctctattcagagcattatacacttgtgtggaccctaaaaattttatttaccatccagacttgaatcaggttcagcaatttaaaataatggaaacagtgatgacacaaatagattagctctgggtcaccccacctgtttaggaagcttcaggactcttccacaccaaagaagaagccttcatggctgagaaaattattttccctgataacatcaattttagttgggttgcccagcagactgaatgctgcctttttggttagttgtttggcttatgcagtggttctttaatgtttgcagtttgtatgatattagccaggctcatgttctccagttccccatagatctcactattacacagagccataagacactttctcaggacaagggggcattttattttataatttttcatgcaaagggtttgaataaaattagtgtttccttggacactatgagaatatcttgggatctattttaaaggggaacgagataacgggattaatatttattgagctgctactttctacctcatagtttatttgtatattattatttcatttaaaggagaaggaaatggcaacccactccagtgttcttgcctggagaatcccagggacgggggagcctggtgggctgccgtctatggggtcgcacagagtcggacacgactgaagcaacttagcagcagcagcagcacttcatttaaaacccacaaaaaattttgaataagaccgttatcttccattttacaaatgaacagactaacattgtacaaatagcccccctatacttagcagaatgtatatggagaatgatctttgaatattgtttctagaattttcctttcttcagcctctgactcatagggtttatgggatccacagacagttgcatgccaatcgtgttaaatgaaaattgacattaaataccaataatgtgagaaacgaaaatatcattttgaaactagaacgcaatacaatggatttttccttcttttcttgaacaaaacactcactgatttcaagggcacttttgtggttgatgaaaatctgggaggtaatttcctagcccttgattatgagttaggtatgtgtgggggggggggggtatatatatatatatatatatatatatatatatatat

SEQ ID NO: 46865 - DNA, 1277 bp, Bovine  19866881372654
  misc_feature (1)..(1): n is a, c, g, or t
ntgtttctcctctctgtatttacaattttgttctgcaggttagcatggcatgacacctgcttactcttgttagcctctcacagaaaaacatcatcctgtaatcttgctcttgtctctttttcatttcatatataaatattatgcccagtcggcctggagtagcaggagtataagcaagaatatattcttgttccaaatcactcaatgctattttgactggagggactttaattttctcatgtatggtattatgaaatataccacacagattaattatctaaaccaatagtcttagtgagattattcagcatctttgttattctgaaaaatatccacaatattatatatatgatacttcatagataaactctgaagtgaagaaagtgaagtcgctcagtcatgtcctactctttgcaacctcatggactgtagactaccacccccctccatccgtaggattctccaggcaggagtacttggagtgggctgccatttctttctccagaggatcttcccaacccagggatcgaaccctgggtcttccgcattgtaggcagacactttaccatcttaccaccaggagagtcataacaatagatacatgatacttcacagataaactctaattagactaattacaatgcagggggaaaacagcctttggtttttaagtgcctaataaaattgagcattccaaatgcacacattaggctttggttaaacaacaagtctctctgtcaggttatttacagagaccaaaagaaacagccttcctcagatagttcctttggcataattctccaacttggacacaaacatgtaatggctaaacttaaaatttaaacaaggggagaagcaaaacaaattcatttctatgtttatagaccaagctaatttttcttaattatcttggacaagattaatcaaataaagtcactattttatactatgaagaaccttacctatctatataaagacaggcttgggttgaattagggagaagtacaagaagaacatcagtagatttttataagctgctccaagaaagctatagagcttgggaagttgtatatatcaccttgaaagtaataggacactatctggaaagagagagaaaaaagaaaaggaaaataacagatgacatacaacagtgatacggctgatgatgatcctgtgatttcaaaatcttctttttagtgactgtattatcagtcatgctgactatgcattaattgaatattagtcatactggtcatagaactaactagtaaacccag

SEQ ID NO: 46866 - DNA, 1301 bp, Bovine  19866881598596
  misc_feature (1)..(1): n is a, c, g, or t
nttgaaatctgattataaattgagtgaatcagtattgtgaaatgtttaaggaaattcagttatttttctcctaattatatatatatatatttggagtgaaacatcaagtatgtaaaggatccatatttatttttcaccttctatcccctctttcctttcttgggatattaatctttatgctagcagctccatcagggaatttttcagatgaaagaagaggtattggaatttagagaagtccaattttatttgttaataagaaggaggttgaaagtaatggttaaaattggatttttaaactaacagtgtatataatttattccatcatgcaagtttcccatttgccttctctttattgcaggtaattgagaattagtcatgtttgttatttttagcactccattttttgtcagaaatggaaacaaaattacaaaaggaggtaaagaaaaactatcaaaaatattaaaaaaaaaaaaaaacccaacatttctgattcaggaaaccttggaaaataattgttaagatgctatttgttttatcatcaatgcttgattttgaggaactgaatttttaaagcttagggatagcacatgttacttatttttttcttccttaaccctgaaattctgcctattaacacaaactatgtttttcagaaagcaaaatattctagatgcatttaaaactttgataatcagtaagttaaggttagtctgggaaaaatgagaaagaaaaaaaagacagttttatactccaaaataccttcaaaatgaatagaacttctaatgctatttctttgtaatgatttaaattcacatacagggtgttcacctgaagggcattttaagtttgagttataatgcattagtcatccttgaaaacccaggcaattcatatacacaaatacagaattccctaaacataatttttgttcacatctcatttatatatgcttgtgggaattattccttgttaaaatgcagattatcaaattcttgactaacaaaagaaatcaccctgtcattttatactgaaagatgtcaatgcaaagtactgttttattttgtcttttcaaaatacaggtttggcttttaatttcaaatacttagtgatgctaggattcatatttccataatgagaagaagaaaaaaaaagttaaattttaagcttcactatgccagttaacttcccaggtgaccctagtggtaaggaccctggtctgtcattgcaggagatataagaatattcttgcctggaaatcccaaggacagaggagcctggcaggctacagttcatgaggt

SEQ ID NO: 46867 - DNA, 836 bp, Bovine  19866880264231
  misc_feature (1)..(1): n is a, c, g, or t
nttgctcagtcgtgtctgactgtttgcgaccccatgaatcgtagcacgccaggcctccctgtccatcaccatctcccagagttcactcagactcatgtccatcaagtcagtgatgccatccagccatctcatcctctgtcgtccccttgtcttcctgcccccaatccctcccagcatcagactcttttccaatgagtcaactcttcgcatgaggtggccaaagtattggcatcagtccttccaatgaacacccaggactgatcttctttaggatggaccggttggatctccttgcagtccaagggactctcaagagtcttctccaacaccacagttcaaaagcatccattcttcggcgctcagctttcttcacagtccaactctcacatccatacatgaccacaggaaaaaccatagccttgactagacagacctttgttggcaaagtaatgtctctgttttttaatatactatctaggttggtcataactttccttccaaggagcaagcgtcttttaatttcatggctgaaatcaccatctgcagtgattttggagcccccaaaaatagtatgacactgtttccactgtttccccacctatttcccatgataaatctaatctaactcccaagataaattagacctcctcaaatagagcgaagtgaagaccatggccgtttcagatatctttggcaagatatctttgcattggcaaaaactaggtatccttagagaatgctaattatgggaaacaattactcgacaagttgcccttcattttaactgtcagggtaacaatgtaaagaaaacataaaacttccagtctctaccagtt

SEQ ID NO: 46868 - DNA, 670 bp, Bovine  19866880456568
  misc_feature (1)..(1): n is a, c, g, or t
ntggtatattattagtttcgagtttgctaatccttattttatgagatttaattttcatgacgtttacttttccattcagcctattgtcagaaaaaaagaatgctttttgtgttcattgaaaagataggccagagactaatgaatgtgtgatctgcccttgctcagataaatgttgtagttataagaagtcatggcagggcgtgggggcccttctgtttaccatgataaaattaataccttacagactttctgagtagtttgtaagatgtcaaagatttatttttaatataattgcaaagttggaaagctaagaaccatgaagcctaattcttgataaattcactgtcagtaatgccatattcagaacacaactacatattcggcaagaatattattccataatattttattatcactctgagactgtacattataatttgcaaattattgaaaatatacctgaagataagaatcctctttgaaagtatgtggaactttttgtgtgattatttagtgttctgtcttatttcttgattactatggtagggaattgtagtctatgtggttttataaaaataaagcaaatcacagagttactgagctagaagatgctctgagattgtctatgaaacctgggttccctttttaaaggtctctggggatgggattg

SEQ ID NO: 46869 - DNA, 4528 bp, Bovine  19866880532831
  misc_feature (1)..(1): n is a, c, g, or t
ngggtggtggggtgggggctggtgctcttcggccacttctaggactcacctctcagacccaggacgcatctgtatcatggcggatttcacgtcggtatcaggcaggagccagagcatgcacttacctctttattacaagtgcagttgacagtaaattaggagggaaagacacaagctttgcaaatctcctttgaaaggatttggggatcagagacacgggacagctgaaatcacctgaggcttagcgtcacaaagcgggaagttctgttctgttcgcagaggtggggacggggggcactgttccacaggaactgctggaccctggacgcttctggctgctatgcagatgaggcccaggcaaaaccaacaatgaggtttaattagcatgaagatcttcctttggatgcttaggagggagaacatatagtgaatgacagcatttttcttttttagtcttatgaggttgatcaccaatttaataactagattccaataagaaatgacaggtctgaggacccttttatttttttcttttcagaaatgctttctaatatgttgctatcgttaactgggaccttttcctcaacagtgtagatctcaccaacattttcagtaacagtacagaatcttgaagccctctgagccacttccaaccaacttgaacttgaaggtctatgggaagaccacagccactggggcactctggggttgagagtcggatgggctgaagactgagctagcaggcaaggactggtagttttgtgtttagaacttgaaaaataaaactgctgttcagctcatttcctggcagatttgccttttggaagttgtttcctcggtttcttttctttctcatgccagtgccctttcctgcctttatagaatgatgtcgttaatgaatgctgtgcaaagttgagactcctgaagacggttcaaatgaaggatcaatgacagtgacaaatcttccattaaggattttttttttttttttttaaaaagctatatttgttggaaacccagcagagtttcccatctagaaaatgcaatgatagacaccgagaacaaagttatgggatgcacacattagggtgccaacatgcataacttaagtcacgaatagaagattctatgacatcctaccaacaagtttcacaattaaagtaactcatggcacctctgagaccatgtggacaggtggctggggtgataggaagtgaccctctgcccaagatgacagagaaaacaagagaaggcacaggcagaaaggcaagacattgaactcgagactgaatggggcacgggccccaccggagagagggctgagagccctgaacccagatctgtgtcatctgcaggacagctcagtgatgtggtcgagattttgccttgggaaagtctggtctgaaaataggagacttaagttttttgctgtggtctatagcttgaccctcgcttagtgcataattgttgtatactagttacaataagccagttttataaaactagatatccagaggaaaattcttatcaagcccttataacgtcagggatccagttatagttcagactgactcacaccccctaggaatctattgataataactctggccctcctggtaataagaaaacatgatgatgcaaatgtaaattttgttcggcattagtatcacaaggggcatgagattcactgtgaagccagactcacaattataacattgtctatctgaaagattcttttttcagccaccttcattcatgtgtcctggccttcactctgaaatgatgcgctggaaaccatttggctacattaggctaccctgaaaacctcttaagagaaagtgttcgctccactggtaaactgcttcgaggctatacacacagcctggggctgagtgaaggtgactgatccatgggattctccaggcaagaatactggagctggttgccatgcccttctccaggggatcttcccgacccagggatcgaatccaagcctcctgcattgcaggcagcttctttactctctgagccgccagggaagtcctacagatcccagggcagtggacatcctggtctcagagatctagtctggctgatgctgaggctcctggaggttcacttgcagaggtcaagtgcacctccgggaacccagtgctgccacggtcttccagttgcttcaagtgtgatcgaatagactggcttgcagtggccacctgtgagtgtttgcctcctcccaccctacttggcgattttaagttcctcaaaacatgaactatttttttttttgcccttgatgtctgatttaaataacgagggtggtattcattgctttgcttagcgatgtctgctgggacataaggaagcatggttttgcttagcgggagggtggggcagacgcccctactccttcactcagctgtgcctgctggttcgagccacccatgctgggcaccggagaaagcccctgacctggccccgtgcatcccaacagttgcccagacctcacattttaagccctgggccagccctcaactgtcagtggaatggaggttgctgcaggtaccgtgggagctcctgcactttcccgccaaaaggcaggatcttcccaggtccctcctctaactccagcctgggggggacccggagacagggtgggaggggacagcgcctcttctcccccatctgccctactgctgcagggctgtttctaccaggtctgggagagcatggaggccccgggccagctctggatctcccggcttgcagctgacaaccccaggcagccggggatcaaggctcctttgcgtcaggttatttgtccttttgctccctagtgtcagcagtcctgggaacaggaaacagttttgtgcaatgggaagtgacaggaaactggtgaccgacgacttttgagctttgcagatacagtttcaacgtgcacggagatactgacacacattccgagacacatgtgcatggataaataagagctaaatctagaccttactctgctcaggttttaaggtggtgctgtttattgacagcttcctgtgctcttgggactctgctaggcccttcagtccttcacagaatcctgacaacttccctgggttccacggtccgcttttacaggggagaagagagtccgaggcagctgacgtagtcgctgctaagtgccaggacgtcctcggctcctggtctagacgcctgtcctcagctgcctcctctaagggctggcaaacttcaggctgaatgttctggggcgtgttgcactgcataggggtgaaagaattcctccaaatcatccgtgagaagagcgttcccgtggctcggcaggtcactccatggccgggcaaggtattgtgatttcgtatgttcactgtgaagaaggaagtacttctcaggcccccactggcatcgtcttgggtctagagatgaaaggcctctatacccccaccaggcccggagctcacagcccagacagggagatggccagctcctcccattctgcttggtgtccgctctgaagctccagctgagtggccaggccgtggtgattaagtgaaagcatgccttcctggaatcaggccctacacaggctgaaatgcagagacctggtcagctgcgggggaggagaaagtcaagtccggccatcggtcctggaggtcaaggagcctggtgcagggaaggccctggggcttccactcaccagcagccaggcggctggagaggaggctggtccccagggtgggtggtggatcactgctggcctgtccactgatgggacagcttatgagagtgcctctgaaccccgtgaacccgagtctttcttccctttcctcatttcacaatttaacagtttcgtgttctcgattccctccttatattctctctgccttcctgacagcattacctggatggggagatgacggaagccccgcccactgtgtgccaccaagccggccggcaacttcctgctcccacttcattccagacgcagctagaaactggttttagaacttcggggacaaaacatgttactcagttcactacgctatgttttatttccacctagaaatgatgcctcctgccagtggatatgaagaaaatgtcactgtaattaatgccagttaatcaagctggtggcccttgaagatctataaaagggagctgagacacagttttacacgtgggatttgaatagagtatttaggaaacagtaaatgctgtcatcatcagcctgactttggacagtttagccagggtatgtgaaatggccctataggactggggagaaagccaggcagccgtacttcttttggtgggaaatataaagagttcaccataaagaggatgagtcatcatttttaatctctggaaacctgtttctgcaagcattatttggtgaaaagtagaaaataagactgaagactttggtatttcattgtaacccagtaaatatgatttctagaaatcttctaattttggatatgtgctcaaagaacttatgcatattttagacaaaagaact

SEQ ID NO: 46870 - DNA, 1305 bp, Bovine  19866880578323
  misc_feature (1)..(1): n is a, c, g, or t
ngatgtgaatgacctgccctcttccccccacctccaaaaacagtatttctgcacacagtaaacaaaaatctctagcaacaccagcagacaaaagttgacagaaccatattccacaaaggaggtttgacttaggctggggctgtcaaataatttttccccctttagctctcaaatggttttctttaaaggaaaagcgtttcacaaagcccgaagatataaacaacactcttacctcaaaactggtccccaacggtgtgtgcagctaactgctcaacaacttagaaccagcaaacttatttatgaacttctacgaacttccttcaagagaggacccgtttcggaaagaaaccatcccgcccttgtcccttcgcgtccagagaccatcttactttgccacagaaggagcaggtatacttggcgtgctggctgatttcaattttcttcaccattttcctgagggaggcaccataacgggtcccgtatttgcccacgattccgaccttcttggtgcgtttagcctgttaagaatgagttaagacagaaaacagagatattacaactctggaacggggacttcgcctctccatcaagttccggcgcctccacacgcctttcttctacctgcccacctagctctcccactctccccaccctatccccgtaaacccagggcccacggtgggcctggtgccccgggagcacccggtgaacccagactggacgcgccagcccccgccaaaccgccctaatgtgcatcccagaggacaggcgagggtacgcaggccagagcgggcgagcagagacaagttagggcaaataaaccaaaaaaaggggcagatgcaagcggatagacgtttaggcctcatcctgaacaacactcaccatgttaacgcaacctagatccgagcccaagaggaagctggaaagtgcgcaggcgcggttttaggccgacaccaggaagtggtgtatgcgaggcccagataggaactgaactctatggtctggaggttttctcactccggtgcctccagggtagtgtggtcggaagcctctctgacagagatacggtgatttacaaattgtagcgacaaactgtgtagcagaagctctctcacatatcgacattatcgttcatgtatctcacgaaatcctgcaaaggaggtacgatttcctccatttatagacaagattcagattttaagtaatttgctcactcattggcacttagagaagtgcttaaaatatgatttcagatctcaccgctttctacattatgccttctagtagcggcaagccctgtggttg

SEQ ID NO: 46871 - DNA, 1766 bp, Bovine  19866880603363
  misc_feature (1)..(1): n is a, c, g, or t
nattattgaagactattaaaaaaataaaaaggaaagcattaacagatcttaagacctggcaatcctttgcatttagtattaagccccctgagtgaaggaagcaattataacacagaattctgcagagaagagcagctttggacacagaccccatgtctcagaggaagaggacaggagctaattcagaacctgcatgaggaaaaaaaataatgtatagaataaaaaagaaggtatttcccccatcacttttggctaagggtttaaaaaatcttcagtgacaatggatgggggaggtccgaacaccacactaccccaggagctacagctgaaagactttcagttggtatgcgcctgtgggtgtgtgtgtgtgtacatgagcgtcaacctgtgcagatgccacaccccacttcttccctcggttgccagatgcttgtgggagagttctgactggcctctctccatactgaaacaatctaatctgattactatatttggggtgcagggggtttatctggcagagatttaggaaaggaaataaggaggcttccggccaaggtcacattttgacaggagtgaaatttgacgatggttgctctaatgactacccggcacttagtttactatttatctactgctctctcatgttcagaccctttggctgaaaattctaatagaaagatggacgagtaataaattcacgcctccaagccctagcccaaagccataactaatatagggaaataagaaattacactccaatagcacagaatgagaggtgaattggcagataaagtctgagaggagagattacagcagcttgtcttattaataaaaattcttaaaggtaacaacattttcaagggcagtggaagcaaaattaaaaaaaaaaaaattctctgaactatttgacaaccaagccttcacctgagcatttttttcagtccctcatgtatggcttgatttgtctgatttagaatacaaaacaagtgtgaaacagtccattccaatattgagtttatgcaaatccttaaaataatcaatatcgctaataggaggtctaacgtgaaagtgcaccagcaggagcaccactcatttgtaagcaataaaatctgtttctagcttggtttcgttcatcagaaagaaggtaactcgagttacgagaagtctaagtgtggtgagccggctctgctgtctgcgactgactgctgctgctgcgtgcacgctcagccatgtccgactcgttgccaccccatgggctgtggcccgccaggcttctctgtccacggatttctcaggcaataatactggcatgggttgctatttccagatccaggggatcttcccaatagtgggcaataacatgctggctaacctttcttttcacgcacagtgtttggccaacatatcaaagtgctttaaatgtggcctaataatcacatgttagtcactgaaagttttggcgccaaattgggtgttaagccagttagtatctaggagaacattcagcttaacattcagttagaagttagcgttaactcttcacaggttgattataatgaaatttagcacgttttggctttagtgcatttaatggcattcagttagaactgggtatggaaaaacagactggttccaaatggggaaatcaggaaaggagtacatcaaggctgtacattgtcactctgcttatttaacttaatgcagactacgtcatgtgaaatgctgggcggataagcacaagcggaatcaagatgccaggagaaata

SEQ ID NO: 46872 - DNA, 1065 bp, Bovine  19866880747002
  misc_feature (1)..(1): n is a, c, g, or t
ntaaacaaaaaaagactgttcatagtccacagtcaaaatataaaggttaacttggcataaaattaaaatgctcactctaaagcattcaagttttaatcaaccaaacaaaatctagaacccagaaatccccaatgtgtaaccgagcaaataaatattctcaaactgaccaggaaatttgtttaacgcttttgaaaaatatttcaaaataaaattgctactcattcaaaacttccaattatcagaagatacaactactgtcagtaagtacaatatcttgattaaactaatcactgaaatgaaatttagttttaaataaatttaaaaagaattcctcagccaatcatatggacaaaggaaattataattcctaaccacaaacaagtagattaatttgttttggacaatgataggccacaaaggagtaaaggacaacttgccaaattgaaaatccaatccagcacagataaaaacgtgatgaacttcagaaaccagtatttttaagtcaaattaagtttataataaggctaacaattacaggaagcagcttattccacactaaggaataacccccttccctccctgtttgtactggtctgataaaaaacaatcaaacttcctagtcattatgctgtccctttttaaacatcctagctactatacaggagcattctttatgctggggagttgaaaaggctaaaactcaacagagactgagacagagatgaagtaaaccataataaaaataaaaaatatatattacttagactgtttcctcctcaaccagtggtttacaacatttaaaactcaaacgattactatttccaaacagagagaaacgaacaaaccaacctttgttagaaataatggacataactggaattctagatttagaagattaaaaattatcatgccagagattagaaccaacttcaattaccatttagagatttcagaccaacataacactacaaatctttcaaaactagtcagagaaactcagaattatttacttcaaatagtacaaatgaggagaaaacatttgcaaactttttataatctcctatg

SEQ ID NO: 46873 - DNA, 1169 bp, Bovine  19866880764574
  misc_feature (1)..(1): n is a, c, g, or t
ntttagaaataatcctgctagtttttatttaaagactgatgggaagtttgtttgagattgcactgaattctgtagatcaacttaggggacagttgccagttccaatccatgaatatggtatattttcagttatttagttcttatccgaattttctctggaatgctttctgatttttggtgcatagtcatgaatgtgttttgttattcctccatattttgtaatttttacattaatttaagtaaaagataaaattttattttccaatattttgaagctaatatattagaatataagaacttatatattaaatcttatttatttccttctgtttgcattttatatgctgaaatacattgaatgatttccagtgttaaaccaaccttgcattcttgaaatgaacccaatttgttcataatgtattactctcttcatatattacagtattgttttcttagtttgttaagaatttttgtgactatcttatgagaaaatctatagttgtctctctctgaaacatttttcgccagattttggtattatgttatactagcctcctaaaacttgttgggcagtgattgttccttctctgttttctaaaaatattcatgtaagtttggtattatttttcattcagagtttgataaaactcagcagtgaaactgtctatgcctggggttttctttttaggaaaagctttcataactcagattttctgttcactcacagacaatcatgataacttgtattattaacatctgcttcatccaacttgtccattttttttgagataacaaaacatcctgaaaatacatagaaatggaatatatttttatttgtaggcttccacttctgtgtaatcattcttgtaatctttaggaccgtatgccattctttaaatggtaaatgtattgacaaggtgcaaattttgtgctgactagttatgtaagtgatttaatacgatgatcagtcttttaaacacagacacacaaactattacttttccttgtcattttgttagactctgtaatacagtactttttagactagcagatattccaaattaataatgatcaataaattagaaatcaatttgctcctcattgtagaaggaagccagttgtcataggtattatttattaatctttctggattaaattcattaagaaat

SEQ ID NO: 46874 - DNA, 1188 bp, Bovine  19866880774723
  misc_feature (1)..(1): n is a, c, g, or t
nttacttaggacaccatcgtccaagaacaaaaccacctattatttaaggttctgctgttactaaacagcactgcaactttacaatattcaatcgacttgctttcaacttttcctggtttaattaaatccttcaacactccatataaaaacaatgatcatttctatctgccgcacctatagcatttggttccccgggaggagctttgaaatacccactagcattccactaacacaactgtgcaaatgaatcttcccaatttcattcaaaattagcactaaaagaacagggctcagggcacaagtgtgaagggacagtcatagggcttggtggtgtagggtgagctcactgagtgaggcctaaccctcccctggggaagttagggctgcaaccctttgggtctaagcataacgctggaaaggcattatacaggctcccagccccgagtggcagctcaaactctggaaatccacccacagcgggtgcagggcttcccagatggctcggtgataacccgcctgccaatgcagaagatgcaggttcagtctcagggttgagaagatcccctgggccaagaaatggcaacctactccagtatttttgcctgggaaatcccatggacagaggagtctggtggacttcagtccattggattgcaagagtcagacatgacttagcaactacacgacaacaccagcatcagccagccagccctaaaacagtaggaaacgagcaggaggccatgggctgatctacgtggatatcagagtccttacaaggaggcctgggtgcagggagaagcccaatcacagatcaaaacggctgtaattccacacctgtacagctcaagcaggcaacgtgctgtctacatgttcctggggaggtcacactggcaccatcttaaacaactctttcattgctcatctttactaataaattagcttcctatgtgcctaagaacgggtcacaagaattaccatcccttcccaccagaaagaatatatatggcttccctagtgaatccgatggtaaagaatatgcctgcaatgcaggagtcgtgggttccatccctaggttggaaaggtcttctggagaagggaatggctacccaccccagtattcttgcctggagaactccaggggcaagggagcctggtgggctagagtccattaggttgcagagtcagata

SEQ ID NO: 46875 - DNA, 1866 bp, Bovine  19866880783041
  misc_feature (1)..(1): n is a, c, g, or t
nttccagtccagagcaaaccccaagctgggagagaggagaatacttgaaaggtagagggagtttccagttttgatcagttctattaaaagggattcgaagcactggaattacgcgtgtgactcaaaagtgcctgaggaacctctgaagtgagtggaataacacgggccttgctgagttttatgcagtgtcagggcaaggctctcccactgaaggaggctttaaaaaattttctttggtctccaacctgctttgaaatttgccttttaattatgtcatgaataacaaatattcagtgcaacaattacactggtgacatttttatttttctctgcagtgcccacatagagacccctaaaaagccattctttggctctcctgaaagattttcatataatggaaaacgagaatgagaccttaattatccgcaaatccagaacaggtgatatttacgtgacttaaaaagtacaaagtatgatccggccgaatataggagattccttaaattaaagctttaaaaatcattatatgctttcttggtccaattaagtaaaactttctgttgcataaacagaaaagaaccctttttttcccccctcttggattagtatttgcatgcttgctcaccggggatccattgtgagtttttgtatacattcaagcatattacacagatatctggaggcatatctcaaaggccgtagctgaactggtggaatctcctgctcaggaaggtgccagtgatcagtggggggctaaggactgggaaccagctggcatcagatccctcagtccgtaggtctctgtggagtactcagagggggcccggtggctacaacacacactgcaaacagagctcagccgataggttaacaagtggccggttgtccccgctgtctccctgcctctgggcaggccaggaaatagaatccagccggcctgagagaggtcaggaagacctacagaggaggacgctgttctccatgtcagagcgggatcccggaaggttcctgggaggccggctgtctcctcggagtcttcagcctgggctgaggctgggtctcttgaggtcaaggaccagggtgtgggccacggggcccattcgagtgagcaggcagtggggcacgggtggcccctcagttccagccccccgtcaagcctttctttccgcacaacctgcggccctcttttgttgttcagtcgcaaagtcgtgtctgagtcttggcaaccccatggactgcagcacaccaggcttccctgtgtatcaccatctcccagagtttgcacaaaatcatgtccatttgagtccatgatgccatccaaccatctcatcctccacttcagtttagaagtgatgaatggaaattgatttttttatgattaactaaaaatgcacattgttcttgatccagtaaacttgcctttgatccaggactatcaagatgtgcctgggtgctgactttgtctgcagttcagagttcttctgacagtctgatccctttaggtgaacttacatggtgggagcagtggtgggactagaatgatggagcaaatgcaggatgaaacctggagactaagcgttgttaacattcatacagagaaactacaaacacaaaagctatttagacactgaaagcagtgtctgtcttggaaagaggctccatcggggcaggcagttcctgatggatctctggtttcccaaggcaaagccctttgattaaatacttctgcctgcttctgaagtgaactgaggggtccaaaggaggaatgagaactatcttctgggggagggagagctggacagtaaaagtttatctctgatggaatatctctgcaagcaggaactattagcatctagaaaacaaatt

SEQ ID NO: 46876 - DNA, 2526 bp, Bovine  19866880912555
  misc_feature (1)..(1): n is a, c, g, or t
nttgtgaggattaaatgagtcggctcgtgtgacacttctggcactgcgtgaacatttgatgaatgctcgccattatcgttggtgtgactgaaagcatggctgggtggagactgacccctggctcagagcacagttttagatcctgtatgtaaaggcgagcaggtgggctttcctggagtcgaggggcatgtcgaggacggggtgaacgagtctgtctgggagctctctgtggtgtagcagtggctgttctctttgtcacacgtgaaatcctaggtttttttttaggatcttggtgggttaattcaacactgctaggggataaggctgaatctctattttgcgtttagaaggctggggaataaaatgacactaagaactggcaagcaaacagcaaaacagaaccagggaggcgcagcttggggagcacgctccaagagggcggaatacattatggtcagtatgcattctgtgggtcatggatagtgatgagatttaaattcatctccagaatctctgtggcattgcaaagaatggggagactcacgaataaggcgtagggagagactataaaaggcagctcgttaaatccctgatttcagtggggatgacagacaacctccctatttcatgtttcgaaactactgctagttttaaagctatcatgaaatctctttgcttattttttttttcatctcaaaatagtccaagtgaaaaaatatcctcctcttgcatttgaaaggagagctataaacaggagcagtgttccaactagtcatcttctgaaacagtgatgtgtccaaagccttaatacttgagactttctctgtaggtgctatttatagactcattttaatattatagtaattatatgttatactatatggttatattaaaaagctgaggcattacttcaccaacaaaggtccatctagtcaaggctatggttttcccagtagtcatgtatgaatgtgagagttggagaattgatgcttttgaactgtggtgttggagaagactcttgagagtcccctggactgcaaggagatccaaccagcatcctaaaggaaatcagtcctaaatattcattggaaggactgatgttgaagctgaaactccaatactttggtcacctgatgcaaagagctgactcatttgaaaagaccctgacactggcaaagattgaaggtgggaggagaaggggacaacagaggatgagatggttggatggcatcatcactcaatggacatgagtttgagtaatctccgggagttggtgatggacagggaagcctggcgtgctgcagtccatggggttgcaaagagtcggatatgactgagcaaactgaactgaactgatagttatattatctagaatacacattttcaatctatttaagatattttaattcatcacatatgattctctttaaaaagtactttgctgaataaattactcaaaatcaagtgtgtagttggcagaaaatagattttgcattagttcattcagtaatccctaaactggcaaaaaatcaatatgtagtaagacaatttcagttataaatatataaacctagattatgtcataaaagaaacctaaagattgtagtaaacagaaaagtattttctaaaagtgaacttcacactaaccagagctgtgcaaaatctttacagaaaaaaataaaacatgaataaatccagaaagaactaaagaatagcatcaccaactcaatgggcatgagtttcggcaaactctgggagactgtgaaggacggggaaacttggcgagctgcagtcatggggtcacaaagagtcagacacgacttagcaactgaatagcagcaacagtttgtggatggaaaaattcaatcacttaagcatgtcaatttcccacaaattaatgaataatgaattcaaggtaattctaaaaattatcccagcaaggtttttcatagatcccggcaagctgattctcagcagcacagaatggagaataggtcagataattttgaggaattagacggagggcacataaaccaacagtggttaaaacaagagaggcaggaaacgcgtgtgcacggagagaagccgcgtatgcaactgagggcacggaacagatcgatgggtcagggaggaggcattcaatacatgatacttgcacaaatacattcccgtgtcaagccattcaaaaaattgtgaaataaagattaaaatgtgaaaaacaaaactctgtgtctttggaaaacatacacaagagtattgtcttaatcaagatcaacagcctgaaatcacaatgaaaggatcaatggatctgattatttaaaattattctcctatttttgcaaaagatctcatggataagggtgaaaattaaatgaagtcgggaaatacatataaccaagggggtagtattcataatcaataaaatacaacaaattgaaaggattcatggctcaacaaaaaatgagcaaagcgtttcaataggtaattcatagaagagaaatttgatgagctgacaagaaaaaaatg

SEQ ID NO: 46877 - DNA, 723 bp, Bovine  19866880921755
  misc_feature (1)..(1): n is a, c, g, or t
ncgtgtgtgaggggcaaggtcggctgccggggttccgaggggggccctgaagaaggccagcgacagtgtctgggctggtccctgagggccccccaccccgagcccggatgacattcctgttgaactcccctgctcacgaaacaggtggacttaggggggagttgacaggatgcaggtttgcacggcctgctgagccctggcaaaaatgccccaggcgcaggtggcgagtgtaactggtgatggtgctgagttgtgacagccttgatccagttcctgatggacaaagacacgtaaattaatcaccaataaatggcgccttttgttggcctgttagtcaaaaggtcaaggactgaatagatcacgggacagacatattttcctggtgggggcagagaggggtgggaaagtctgcacacaacggaaagcttaacacgccctgtttgtcccactgcctcccagaaagctaccatgacaagcagcgctttatttcaatagtgacctattcttatttcttaaaaaatatgtaactgtaggagtaagaaaactatgtagcttttttgtttctcagcagtgcataaaccaagtgataaaaagaacagagcagaataacagttgcttattcagaaagggagttggagttggaatattccgtgattgcagaatgtgtatccctgggggaggaaaaagctcaacaaagaagcaccgtcccttcctttgggcatg

SEQ ID NO: 46878 - DNA, 593 bp, Bovine  19866880926222
  misc_feature (1)..(1): n is a, c, g, or t
nagttggcttgggcccctgcatccatcatggaccaagaagccacagagcattacttagcattcctttcctttactaatggaactccacttcagctcaagtgctctggccaagttagatttgaggctggacgtgaacttcactccctgcggaacagaactatttatctatttatctatcgaaccactcaaattctgctggtcaacgcaagagttcccctatgttatgctccaaattcactcattaaaaaaacaagaaatttataggaaagatgtgactggttaaacaaataatcttttgtcatgcatctacaatactctacaatacattttaaaaatatatttaaactaagataagcagtaaatggcaaaatatgtcaagactgctgaaagaaattctacaagactaacccataagcatttccagtgacactaaaagtctcctaaatatactgatagagactgacagaataaaaaagatagatatacagacacagacatacaaacaagattgtatttgtctccctggatatttcttaccaagactgaaaagggtaggtgtcttcccataattaggtttcagaattgtgttattt

SEQ ID NO: 46879 - DNA, 1864 bp, Bovine  19866880966129
  misc_feature (1)..(1): n is a, c, g, or t
naaatggtgcattttaaaagaaatatgtgggagtggatttttaagggctcaaaagtataaacataactttctatgcattcattctgaagaatattgttatataacacatctgtaaatttctgacatatggatttcatttcatactccattctataaatacagttttgataataaactaagaaaaattaaggcttatgtatgtcattttccttataccaaagggtaagtttcagtggtgaactcaaattttattcatgatttcaatctaaagttattcatgtgactgaattcctgcctactgatgctgacttatgtaaaatgaaagaattgcatctggaataagcaaaccttttttttttttttgcacattttcctatttaggacaaataataaaatgcctctctgcaataccatacaacacagcacagatacgtgctaatcttcaggaacaccaaagaaaaacacatcctttggagagcttatttgttccgtgggaggctgtctttttcaggcctggaacaaaaccctgtggataaggattagaacatatgcagacatcattatgtgtgtgttggtgggaagggagggtgggggggcagcccggttccacaccatggaatttgctatcacattttctccttggtaccacattaaaaaagcctaagaattaaacaaaagcctaaagagcaaggcatttaaaagacaacaacaacaacccagcccaacaaatgttgcgttctggtgggatacaatggtggctgaaatgctctgccaaacacgactttgaaataaagattctttatatttttttgcaaataaacgtccaaaatatttatcaaattgcagctatgttaaagcaaattgagcagttttcagttgtcgcatctttctttgggatgtaggaaatttttcaaaaatccatgtattgttcaattaagatttctcttagagaacaagactatttgatatatttaaatcttatatattagattctaatttttaaaaatcattatttaggagaagatatgaaattgtgttttcaagttactagataggaaaaacatcctaaaccaataatgatataatcaaaacccagcagaaaaacatgctcctcggctctttaactaaatttgtaacttaaattattcaattcagccaatatttatgtactgcctcagtcagttcagttcagtcgctcagtcgtgtctgactctttgcaaccccatggactgcagcacgccaggcctccctgtccatcaccagctcccggagttcactcagactcacgtccattgagtcagtgatgctaccagccatctcatcctctgtcgtccccttctcctcctgccctcaatatagcacctactgcatacccttcactggcctaggggattttgtgacagctgagtccagattccagtcggggaggccaccgtccagcagaagagacgacactgcccttactagtgtcgcgtcgcatcctgacccaagcacgaccgggacacagaggtgcagataattccaccagtttctcccttttagcgggtgggtggagggcgatgtgagcctggaacagtccctaagacggtgacattgagctgaccttgaagtataatggtagtgacaggggggcaggacattcccggcagaggagaccaggcgccagaggtggggtggcaaactggatgagagacagcctcgggaaggaggctggaggccgcgtacgctcacggcctacccagcccagctggtgtgctgactcagctccggggggcaccctcagcaggactaaggggacccttgggctttccaggtggttcagacggttaaaagaatttgcctgcaatgcaagagacacaggaga

SEQ ID NO: 46880 - DNA, 1387 bp, Bovine  19866881017050
  misc_feature (1)..(1): n is a, c, g, or t
nggacaggggagccgggtgggctgccgtctatggggtcgcacagagtcggacacgactgaagcgacttagcagcatcagcagcactctgaaatactgtctttgatctggcctctttgccctttatcatcttggtccatacccaagaaatgggtgatacattgaccaagaaatcaaaagcagagggaaagaagagcttctaacctctttgtgtgtgtgtgcgcactcagtcgtgttagactctgcaactccatggactgtagccagccagctttagaaaacaaaataaatacattttgaatcaaactaatttagttttgaatcttgactgcttctgaatgaccttaggtaaagcactaaaatacttccattgtttgtaaactggtcttaatacttggtagttgtattactacttaatacttaataatatggtaatcatgagaattaggtgatgtataggaaaattccagagagtggatggtatgggatattcattctattcacgacgattgacttttcatgtttgagatagcaattgcctcactttgcaagttgtattagactcaatatacttcatttagtcactttttaaaatttttttatttttacatttctgactcaggactaatagcatgtcatagtttaattggaaacactttttatttctcatggatgcataaaatataaaatatttttaatacttgattacattttagatttaatgaaatagttaaatgcttccacatttattttgaaatgtgctctagggagaaaattcgttctagaaagatctggtccttaaggtgattagactatgtacactgtttttgttgaaaattgtgagaagaaatgccactagattaagaacatacatctgaatcccttctggcaaaaagagtgaagttacactagagattcagttagtgctctatgtttgacgcttttaatcaggtgaacttgcggctagcttcctgtattcgaagtttttctcaagctattattgatcactactccacaaaagaaattgatacgaaaacatttttgctttatactgcatatgaatttgtgggggagattagcaacagctgcttttatctgacagcacataataattgttaaagtggatcaatgaaacttccctttactttagtacattaaatgaaagaaatctgttgctcaaaacccctatttctggcaaagcaatttacattttcagagtatctgccattcaggtttggatgtaggatctatttatttttgaggctttggccgtggctcatttcggtcatatgaccttgggcaaatcattgatccaattcttagcttcttcatctgtaaagcaactatagcaattccaaaaacaatacttccctgtcctttctattctgg

SEQ ID NO: 46881 - DNA, 1420 bp, Bovine  19866881032160
  misc_feature (1)..(1): n is a, c, g, or t
naacctagggtctcctgcgttgtaggcagacgctttaccatctgagccaccagggagatgagttaagggacgtataaaggacaaagaagaaagactggtagaaatacagaaagacaacattttggggaaggtttctacatgagggattttctgtgaagtctacatattctataaaactgagaaaaactcagattaaagtcaatcgaactcaaagaagaattattcacagtataagaattaggactgaaaatccttgaaggtgggtgttgaaggtgtttcctcttaagatgtccagtggtaccctgggatgaaaagacttgtcaagaccgaaatgacagcagagagagtctatgtccaatcacttcttccttcattatgccagcacttgacaaagatttcctctcacagaaactagatctaaattctgttctgccctggtgtttaaattcttccccctgaaagtgatactgttataagcagtagattcaatcaaactaacatcgtatttgtctctacgcaagacgtgagttttgcattctggagttgatcaaatttaattatttacttactctcttacatcaaattcacctgctgaaacattttcctaaacaaatacctatttctctatgtagtacactggaataaaagaggacacatggtaagtctgtatcatttaaaatacagtacattcttgtatattaatagtaggaatgtgaagatttttggtcataaattcaattgtagaataaaattaacttctgatattagtctgggtaaccaaaaaggaagtgcaattgcaatcttacataacaggtttggtacatacccgccgtctgcagctgtacttaatacgtatcctttatataagtggtcaaggaaaggcccaagggattttggcagcatgtaaaatgcacgtatcctgtggcatgaataaacaacactgacaaatattgatataaataaagcaccttctcactgatgtcaaacgggaccatggtagctggcaactacagtctgttcctaatgacttggctcagagtcccgagaaaaacacacaggaatgacctattaaatagtgtgagcaattttgtgacagaattgctacaaagaaagagttttcaagggaaaataggttataaagtgattaatttgtgaccttacactaatgtaatttatggtgcttcaatttcttttcataggaactatcttatgagaacagaaatgtggcttttgagacagtaactgggatgacaaagagaccagtccaacttactttgtcttaaaagaacattgggttttgaataatgttactgatggccttacatttgttctcaaccaaagttgagcatttttatttagctcaagcaaaagacaaaagacaaaaaaagttaggtttttcctctccaattcatcggtcaaa

SEQ ID NO: 46882 - DNA, 1661 bp, Bovine  19866881045223
  misc_feature (1)..(1): n is a, c, g, or t
ngttggatctcctctcagtccaagggactctcaagagtcttctccagcaccagttgcatcagggagttccagtcctcgaagtggacgcgagggaaaggtgtgagacagccagaccactcccttgcttagggctttggggcttgtttgcagccatttgcaggcgagtcgggaccggagagaacacggccggagacctgggttggtggagggaaggacgattatcaagtgagctggcttctctttagagctttccctttttcctactctccccctcctcttcctctctgctttctcttctttcttttcgatcgtcattttttctcttcctctaacttttctcctcctgtttccttattttctcccagtctttgttcttatttccttcccatttattaccctctatattttccatttgatatattctattaacttatacataacatactatagaatatatctgaatatatttatagaatatataaatatagatattctgcactatacatgtatatgatatatacctattctatttgtcaataatttaactgccttgaagagagagtttcctttttttttttttgatgtggaccatttttaaagtctttattgaatttgttacattgcttctgttttatatttcggttttttggccctgaggcatgtgggatcttagttccctgaccagggattgaacctgaaccccctgaattagaaggcaaagtcttaaccaccggaccactagagaaattctggagagttccctttaataattattagcataataaaaaaagtcacacatcttgggaggattattttcattaagctgactctaggatgaactagaaatgcatgtttatgatctgttatattattgaacactgtcttatgtgccagggttttattttatttttagttaagcagtattttaaattcataattacatttaagttaatttataaaatttatttagtgcctgctgtcagtctttttcttaaattgagagccatgcaataaattagttcatactgctaattttattttctgaaattattgaagcaaatcaaaactagaatgtcaaagtatttctcaaatgaagctgaacccaactcataatttaggtttgttgctaattctaggtgcatgtaagccctccttataatggatttctgtacttcttctggaccttggatctggagctatggaatactgcaattaaaaaagcatcaggagcaaacctttcaagaatctcattgtacaggaatatatgctagagctcagggaggtgccctgatgggctgaggtcagagagcaagctagaagcagaggtgggtttggagggagaagtggacagaacgcaaacttaacacactctgtccgctacattccaggcaaggcagggattcgatacatcctcccatccgctctctcttgtaggtttttctctgtgtgctctccctgtctttctctctttctctttcagtccagaatgaaggaaagagagcaagaggactgcttctctaaaaaccatctagcatcagaaagaaatttgttccttcacaagatgtgaaagtctcatctaaacctcctccctgctcaaccccacgctggaccagtcaccagcgctctcagctggcttcattttttctcatcagcaggacagt

SEQ ID NO: 46883 - DNA, 1263 bp, Bovine  19866881077864
  misc_feature (1)..(1): n is a, c, g, or t
ncccactgcacccccatctccatctgggagaccaccggctccaggcgcggtcaggtttccccgctgtccccgctgcacgtggcctgccctgggcctgcagggtctcttcatttccgtttcaggagcagaccgactaggagatatgcttacctaacggtaggattccaggcttaggagggcacctggtgaggggagatagttttatgctacttaatctcctctaatattactctggccctgataacatgcaacgcatttctaaacaggggatgcggttaagagtgatggggccgggagacggagaccagcaagtctaggtccgatttcattctgcactcatttgacctcagaccaactgcataagctgtttggggccccggcttcctcgcctgtgaaataagaagctgtggatgcacaaggctggtccccccaccccaccccatccactatttctaaaatctgctccaagttttagatagacaggtacacatttgttctggaacttgaaactgctccccgccccccaaccaatttgattttattacaagacttttacttcttagaaatatcacaagtgctcatctgtttttcacatctgatttctttggtgttttccttctttgtaggtctttaaatttgactaggccaagctagtaacagagaagaaacacacacacacaacgtgatgtgtgaggtgattctatcacaatttactcacaatttactcactcacagtttcaacgcttaccctttatttcctttgtgacccgtgctggtttttaaaatgctggcttgttttgctaggacccagatactttgttaataggttaagagcttctttgtgagcatctgcggaaagctctgatgaattactccttaggagataaactagaggatgatttgagaaacacatcatcttgttaccaatctctaagtgacaacttgggagcagaaagatagtggtcacagaattgacacaactggcttatctctgcagtattttcagctacatatgagaaaaataggtatttggtgaattcctacgctcttctcatgccactgatttataagaagtcaatctgattttcttacgagtgattctcacgttttatagcttctgatttgtgaaacacttggtgctaaagaagctacactgcacccagtccaccagtttttactgacaaagtaaactcatgggagaaagacaaagatcgggactcggataagtgttaacggatccactcatagtaagtaattataagt

SEQ ID NO: 46884 - DNA, 1777 bp, Bovine  19866881148708
  misc_feature (1)..(1): n is a, c, g, or t
naaatgaaagaggaaaaactaggataagcctgggccagggaaattctcacaaatgaaaatcatagagcgggagagttttgctttgtttcgaaatagaatcacttgatccctagttgacatcacagcccagtgtttggcaaatacgtgaaaatctaactaaccataaccagctctcaagctgtgctaacctaagcatgaccagctcggactccaggcttggtcccgagctctctccgtgtctcccaccgatatgaggatttggtttctccctccccgtcgttgcgtgtgtccgcaaagactttgaaggagatgccgcatgctcttctgcctttcctgtcctgttgacagagaaaccgtcctgtcagtccctcccagatgagcctccaccatctgcgttctgtcctttctgagatgtccgtgccttttggcagcaataggcatgttgacttcagctcgaacacaaaacccactttgcctggagaccacactcattcctggttgagcccactgtgtggcccttgcccagagatgcctgccctctctttgctcactctgtccttcctggtctctgcaaacgccttctagagtttgcctcccgcatcacaaaaggctgctttcacttccctctccgtgcacccaccgcacttctgaagggctccagcttaaatctatctcatggcttccctgcgggctcggctgtataactcggtctctggcgatgcggtttacagatggcatctgatgtccttgaactctggagagacaggagagaggagcacgtgaagtaaagggtatgctgaaaccagctgatgggcagagggggagcatgcagcccaggcagaagaacacagcatctcttcccgttgaaagtcaagtggacgtgaacctcctgcaagcatttcagaatttatgtctgtaactgcacatttatatcccagttactcatcaccaggggaaccaggattcttgactgacatgtttaatataataaagacaaaaaaagaaaaagaattgccaagatacagatcccctctgggggtaggttattttctcggtggtgatgtaatgaggtgacgttttccaggaatggttcatattcactgtatcccctgcctgaccaccagaccttagtttggtggtccttcaacggatgggcttcagaaggacctggaggcccgtgagaacccagaccctttggacctctcccagaatttccatttcagtgggtttggggagggtccgggaacctgcatttctcacggggctacagatgcagctgcccgcgaccacactttgagaacggctgcttcactcgcaaggagcagggcgctggagaactgagattcctcactttgccaccgcactaaactccctctacagcctctcatggggaagcccttacttggtttcctcttcatgtgagtgttcgaaactcaaggacttaacaaaatgacattccagccaaggaaaacgttgctctgacaacattctaaatgatctcaaatagacccaccacgtatttaatttaggtttaacagggaggtttcacatgttaattaaataccagctgattatgcaaggcatacccactgaggattaactatgtcagagacgcagacttctgacataactgctaaatctaggacttaacgggtaataacaagctgtctcattagaaatcaaatggctatggaagaaaccatttttatgggtattttttactgtttgacttgttgatacatagcaacaaacagactgatttgggatcaattttcca

SEQ ID NO: 46885 - DNA, 4160 bp, Bovine  19866881149546
  misc_feature (1)..(1): n is a, c, g, or t
ntaacaccaagagacacatacaccccttaaccatcccccagtgttatacagctgctatgtctcgcacaactgcattccgcctacgaagctgattgctgccatcagttgacctcattcagagttttcagtttcacaagcacacagttgtgtgtacgtgcatatgtgtattcagttccataagagtgcatcacaagggatccttgtgatgatgtgttctgtatcttgactctgattgtcacacagattaacacatggtaaaattacatatataatgtttttatacttctcacaaatacgtccccctcatggtgtctagtgctgctgggcacaccataatcgcttaataaatgtgtgtgtgtgtgtgtgtgtgttcagtcgtgtctgactcattatgaccccaaagactgtagcccaccaggctcttctttccatggaattttccaggcaagaatactggagtgtattcaccccctccaggggatcttcccaggctagggattgaacccatgtctcctgcatctcctgcattgcaattctttaccactgagccaccagagaagccctcaacaaacatagtgttggtaatgcatatcttattccttagagaaaacagcagtgattcagaaagcatgagccctggtctaacgctgggccttatttgagagcatgaggtggagtgaaaataaccatggatctgcagcagaagacttgagctcagagaccggttttgctccattccagctcagaggatttactttaaacctcagacctcggagtcttgatctagaaaatgaggaagccggattagtaatttttatggtcccttccaaatttgaaaactagatgcatctaggaactgtgacatcctttaatctctcagttctgaatttctctccttaaacatttctgtcttgtggtttgagtttatcagctcagagtttgtttcattttcaagttttaaaccgtggacgaacaataatcttctccttgatttcttaccgactcaagagatgacctgaaagatctcatttgcgtgaagattcaggagacgcagagactcttggctgcgtccgtggaccgcagcccagcctgggcaacagggtgccttcccgagatgtccacttgctgagagggtgtgcaggacgtctctcctgcccagccctcagcaaagcaggtcctgcatcccacagcccaggtgacgtcttgctgccatgagaccagcactagcatctccccgccccaggaggcactcccctctcacacacggtcctctaacagccttccttcccaggtaggtgtcctccttgggggctggtgtgacccatctatcagaccctgtccctagcctcccaaacgtgagccagaaagtgaccaaagggaaagagagagaagccgaacatgctggccaatcagcacgtttggctgagcctactgtgtggagcgggtttgcaggccggggacacagcttgtatccaggctctgctttgtaccggggggtgacttccggccgctcccagtcctcccctgcctcagtttcccaatctgtagaatgggaatgtcccctgtctcaaagggttgcagaatggttaactgaatcaatacaggtaatagcttggactggggcctccctgatggttcaagcggtaaagaatctacctgcaatgcaggagacataggagactcaggtttgatccctgggtcaggcagatcccctggaggagggtgtgacaacccactccagatgccgggaaaatctcatggacagaggagcctggctatggcccatgggtttcaaagagtcagccatgactgaagtgactgagcgcacacacacacaagagcttggactagtgtttgacatgtataagtgcttggcaaatgttacctgtcttcatgtggtcatgctctttaccttctgacttggctgtccatccctggacacaaaatgcctttggcccctcatcctgtatgattgcaggagtgtctggtggcggtactttggggagaaaatgtgatgattggcacagatcctgtctggccaagtcccacggagcagcaggggctcacgcggggacaggcgtgcacattttctacaaagctatggaggcaaagcctgtcctgggctctgacctggggaggtcctctctcctaaagacgaagcctcggaacaactttgaaaggctggaacccagagcaaagggctttgggcagtgggcctgcaccgtctggaggaaaatgaatggggtctcaaaagccgccttcagccatctgaggaccccgtgctcttaggtgagccctgcagacacgcaggcggccttcacacattcagactctccgaccaaggcttctcatgacttgtgcattcatacattgctgctgcaaggctatgcattttctgatttttgtcacactctgataagatggaaaaaacagttttgtgtgctcttgctgactgaattgcaggagtaatttctcatacgactgaaatctcagatttggtagatgccttgcccagtgggacaggaagcaatttatcaattcccattagcttcagtcaccaatcaggagcttgctctggcctgctttttttcctgctcctgagcagctcactaatttctctggctgaacgagctttcacagagcagttccccttgacactgagcctgcggcccctcatcagacaggagctcttgcatcaggtgggaaatggagactcattgtgcgctacaggcctggcaggcaggctgtgtccaggaggagcgaggtcttttaggatttgatcttccccttgaagaccctgggaccttcccattttgctgagctcagaaacacccaagaagaagtctcctttgtctttgaacttccatttgggaaggctttgctcagaggctgtgtctgtgaattttgagtttgggtccccagagtcgagagatcttggggggccgggcacctggcctcatgttctccttgcaggctctcctttactccttctctgcatatttcccttcaaaacaaatcctcgtggtaacagggtctctgtgagtgcaaatgctgatgtgagcagttttcctgaggggaaacatgagtgtctgaggcactccagctctgaggccctgggtctatggatcgttccctccaaggaaactgggagagaccacatgctcaccacacctttccagggggctcagatggcaaataatctgtccacagtgcaggagactggggttcaacccctggattggaaagatcccctggaggagggcatggctacccactccaggattcttgcctggagaatccccatggacagaggagcccggtgggctacagtccacaggttgcagagttggacacagctgagtgactagcacacgtgtatttaccaaaacacagaggctttaaaacagcacagattggaaactctctctttcatctccagtgcttctcattatagaaaggaagaccaaaggctatcccaagagagggctttgatggagaattcctcccgtcaccagtttcagtggaattcagctgggagctgtcaccaggggcccatggagggggtgacacatgaaggggtgttaggacagttgtcttttccagcaggggcttccagtctccagacaggtgggcaggtccacatgctgctttcaatgcattaaacagaatgccctctgatttgggcaacaatacagagacatcagctgcttgaggcaggtgtgagggatactgtaggccatcattttgatggatttatgtacatttatatgggcttccctggacacagcatctctggagctgcctgtgagtctggctcaaggtgtgcctgaagaaggcagggccctgagggtgggcagacccggccccttgcatcactgccgaccgggcgcttgcagctgcccagggatgaagcagcagcctctgtgcacggtcacagcactgatgtcagagccgaggatgcaggatgggtggggatacagggaggcgagggaccaccatggcaggggccgtggactgcctccaggcccagtggagggcaagaggagggttaggaggcccttgggcccggaggtggctcaggttggagggagtgggggtggttgggaaggggtgctttcctctgcccggggcaggtactgctggggacggtgcagggagca

SEQ ID NO: 46886 - DNA, 946 bp, Bovine  19866881185772
  misc_feature (1)..(1): n is a, c, g, or t
ngaagtaaacatataacaggtgtagatggacattccccagtcaaattacttttacaaaatacttaaccaagaaatacaactgatcatctcggatatctagaacacggtgcaaagtgttgagaggcacaggaccagagaattacaagacactggccaatgaagcctgaaacttgtaaaagctatacttgacgaatttattataaaactttaaaaatgaaaaaagatgattttgtacatatgaatccctgtgaatgtgtgtatgatctagtacagtaataagtaaatatgatatcatatactcaagaaattccaaagagaaataaagtatatacagaggcatccttcattactgcttaaaagtactaacttttattttatacaaatgttgctgttctgtgtcaatagtcactatgttatataaattctaaattctaaatatataattataaattacaaatacataattttaattataatttataatttaattttaattataatatatataattttagaattacaaaatacatataattattattaaattcaaataatatttaatgttcatgtgaaaccaccaaataattctacttaattttgaaatcaagttgtagttttatcatgtaaaataacttttatcatgtaaaatatcttaaaatacaaagtgcaagacacatgagatttggtaatggatttactgcttttctcagggactatttattcatagataatttggtttagaatagacaatctgtgaaatatatttctctgtggattctgttctaactaaaacccacaaaaggaaggtagctagccacgatctatcctatattcattattttatttggcatttattatataatcatattttttctattctgtgctataacaatgacattaatttgaattgctttagaaagatacttctgaaatataaattatttat

SEQ ID NO: 46887 - DNA, 4234 bp, Bovine  19866881204411
  misc_feature (1)..(1): n is a, c, g, or t
ntcacccaatccaatctcttcatcttgtaaatgaggaagcctggctctttggaattggaaactcatggaagtcttaaaatctgtgataggcagaggaaggatgagatgctagatttcaagctcctggtccagccttctgccttccgtcatcctgatctatccccacacagggctcagagccctcatgatcagacatggccacagagcaaggggaatacagatgtgtcccttaggaaaactgtgagtcctctggttgcagtacagacacaagatccagttacagtgcagactgagcgacaggaagggaaagggaaagtgaaagtcgctcagttgtgtctgactctttcagacaccatggactgtccgtggaattctctaggccataatactggagtgggcaacctttcccttctccagggaatcttcccacccagcgatcgaacccaggtctcccacattgcaagcggattctttaccagctgagccacaagggaagcccaagagtactggagtaggtgagacttttccttctacagaggatcttcccgacccaggacccaaaccggggtctcctgcatcacaggcagattctttaccagctgagctatcgggggaagcacaaatacaggatggctcccctttatcggcagctcagagaggcggggactttcagagaaatgagggagcttcttcctggacctaatgaaagctgggcatagcaggggttaacaacagaggcacgtggaagcccccgtcccaatccctagtgctatttgtatggagaagaatgattgtttttggtgttggtgatataaaaaactttatccagtaagattcactttggagacaggttactttccttttgaccagtattttctagtaaagtattggccccgtttctctgcgcctgtgagatctggggtacaattctggaggacgatgcaccgctgccgtgaacttccaatctcaagaaaggtgattgtgaggaaatctgaggctgccacatcttagtggtttctttttcccgttgtgtataaattctttgggtttcgacactggtttcctcccaaggcgtttgggaagctcacttacagatctttgtaatactgctgtggttgtgagcggggggtgcatcggctcgttgctggttctttatctataatgagtgacttcacaggttacacagattgacagtagggcccatgatccatattttgtaaagggcagaacagcagcccagataggtaggagacacaggggtccacaaatcagtatcagggctccagacagaagttcgctcctgttactgcttgtgcgattctttatttacctgcctttcctctctaaaacccatgtcaagtacaactcacacataaaagccttcaccaggaatgctctgcgacagaaaagaatgttcgggctttacaacctgaatgtgggttaaggaaactgccaagacaaagtgagcttgcagaacagctgcggggactggaaccaaactatcagttttcataatcaagtaagaatgacacccacgtctttacccaagcttgctcttcagtgcggggatattgaaaaacgggatgcatttacaaaacccacagcctccgaaacaatcactgaattacggcaccaggacaccctctggttgattgcttcagtgaagaaaatatggcttaggtgacagggcaatgccggtatgaaattttgttttatgctgtaatttttacctgtttggggtctgaattgtgatgagaagtatttcactcctttgatttacagtgttcagaacaaggattaatgacaggcaactttaactctctcaacaactttcaagagataaggggctgtgaaaagacaccatggatgctccaggattgctcacaaagttgttctgaaaagaccactaatgagaagcattttcttaatctgatgtccagctggcatggttctccttgggtgaggaagtggtgaggggtgaaaataaatagagaaggatacgggttttgaaacaatataagcatattgtgctggttacaaacctacaaatcctcaagaaaatcaaccctgaatattcattggaaggactggtgctgaagctgaagctccaatactttggccactgatggaagaactgactcattggaaaagaccctgatgctgggaaagattgaaggcgggaggagaaggggaaggatgagatggttggatggcatcaccgactcaatgaacatgagtttgcgcaaactcagggagatagtgaaggacccggaagcctggtgtgctgcagtccacggggtcacaaagagtcggatacaacttagcaactgaacaacacaggtcagcaactctatgcttcactggtagctgagattcttgccaaatgagacaataggaagcaggtgagccactgcaggttcaatgcgaccagcctacttcaaggtaaccctgtgtctagaagcttgactatatgccccagacatcgctctgaaataccaatgggttcttcgctgatactctatgcaaactgggctcacttatcctctcattatccctcagccatgtgtggcatttcaaggcactttggggggcaggtggcttctgcacaacctggaggatagctccgaaacagctgaagatgtcagagctggaggggtgcctggtgataacctgctctcaacttcttttctttcagaagagaaaactgtggccatcctcacgggaaatcgaactcacatgagaaggaggcatgtacacggcaccatcccctgccattcactcattaactcagcaatgccacgtgcaagcttggtgcagggcactgtgagtcagggctgagcagcacaggcgtgctcctctgtcctcagggagctcactctcctttggaagacatgtgaggaatggagtattcccagccgtatcactaaagaaggatgccacggccatcagcagttctggccttccaaatgtgaatttttgagcccaggaagaagaatgtgtactatgcagaagccatcagccactccccactgtgggcactgaggactcctgatatgtgaaaaacacggtataccggccccagatactgagatgcatacgaaaggaatgatttcagcgagcccagactcatgcatcttccttcaaagagaagtgctacactccttgagatgcctgcatgcgtgcatacatgctgtccaactctttgtggccctatggactgtgacccaccaggattctctgcccatgggattctccaggcaagaataaattaacaataatctttggacattcagactacctgccccttgttacaaacttctaaacaccctgactcctccccgcccctgcccttcactcttcagaacaccccgctcagagtcactcgagaatgctggctcccaagcttgaagtcctaaaactttccaccaaataaaacatagttctcaactttagggtgtgactgttttttaagtccacaattgcaacaaacaggaaggcaaataatggccattagtgataaatgctctaaagcgggcacttctggcttaattcatagcgtttaccttaataaattgcaactgagattaaaaagtagggacagaaatggcaacaactaaccaactaagagggctgagaaagatcgtttcctttcagaggaggcacatttaaggtgagatctaaacagtgggcaagagccagcactttcacacagagagagtggtgtagaggtccccaggccttcacgaaggacatagctcagagaatccaaggatggaaataacactgaatgggtagaactcagggagttagaggaagccagggtccagaaaagagcttggtttgttgaataagtatgatgaacagtcattgcatccccaccaacagcggtaggagggctcgcttctctccacaccctcaccggcattcgttatctgtagacgtttctgatgatggccattgtggcctgtgtgaggtgatacctcatgtagttttgatttgcctttctctaataattagtgatgatgagcatctttcaaaatagtgccctctgcagagacgtgactggacctggagactgccacgcagagtgaagtaagtcagaaagagaaaaacaaatatggtatattaatgcacctatgcagaatcttcatgggaaatagatggggaaacagtggaaacagtgtcagactttgttttttggggctccaaaagcactgcagatggtgactgcagc

SEQ ID NO: 46888 - DNA, 3157 bp, Bovine  19866881216971
  misc_feature (1)..(1): n is a, c, g, or t
ntaaaagataaagtctcatgtaataatctactactgaatgtgtgcaggacatcctcaggtaaaaataactgctatctatcatctcttgctttacctggttttgaattttatttatttatatatttactttggctgccctgcctggcatgtgggatcttagttccccgatcagggatcaaagctgtctccctttcaatggaatcacaaagtctcacttaaccactggaccacgagggaagtcacttgcattaattacaaatgtgtgacatgttatctgttggagagtttactctgggaaatagaaactgacttagaagtcagacttttaaaatgaggtcttgcccacctccctcccccacagggagggcaactagcttctctgtagctgggatactgaaaaagggaaacgggacagaatgtattttcctctgttaaaacttccacaattgcttaattgctctgtgatttgttagcagctaaaatacttttgtttgctaatgctgaaaatctcaagttctgcaccattagtgcttggaaacactgggctgtggcactgttcgcttttactatccccaaagcttagatcaaagtgaagaattacattggcccctgaatgagctgctatctttggagcatagatgttttgagaaccacagcaatatttcatgctgtcctaaattagatgcttaaagtcacagtggtctgctggacttttaatttccagagttagagtcggactcactgctcttgaacggatcagatggggccttgaaggatgaagtatagtcagggccgggcattcttctctaaaaatggaagatgaacagcatggaatttctttagtaaatggaagcacatgacaaaggaaggcaggttattcctatgacaagagggggtcttaaataatttttacaagagcaaggcactgcagtgttctttcagtgtctaaaatgtgcacatttaaagtccccttggcccaatattatagaatgttaaagaaaatactagatgattcaaagatagacttttggttaagctcatacagaaaagttccataaatcagctcaactaaaacaaaatatatcttaaaaaattaaggaagagatctaagaaaggaattttccttgcagaagaaaagaaacgaaaaaccaccctctgaaaacaatttgaatttatagtattaaatgaactagcctatcttgttctataaaatgaaatggaaaatatatttcagattaaggtactttgaccttatttgaaatacaatcacacatgacagtaaaagcgttgaccttgacgtcgctcagtcgcgtccgactctttgcgaccccatggactgtagcccaccaggcttctccgtccgtgggattttccaggcaggagtactggagtgggttgccatttccttctccattatactatactccataatactaaaagcattagcctttgttaattactgaatgaacacacaaatttggataaagactttacagaaaaaaaactcaactatagtcaaaatcagagactacagatgtaagaacgctttgatagatactcagatattaacatatgtttgcttagtctctgcttactctgactacacttaattttttgtacagactttaatcatgagccttgaataagtgtaagatatgtcctatagcttcaggtactaattctcagtggctcagccttgggtgcccagattgaatctctatttttgtaaacattaacaattaagacaagtatttatcttaaattagatataatcaatttttgaacaagttagcatttcaagatttgactcaaatttttttttttttttgatctctaagcatcttcagctgttttggaggatgaacagatgaaaccagatccagaactcagaggataccactggggtggattagatggggattggaaacccggggaaggaagagctgaagtggtggcccagcaggcccacctggccccaggacacgtgcacatagattgcagctatctattcagtcttatagattaaaaaggcctatttctccaaacacagagagaaatttgagagcttgttagtgaagagataacagccccaaagtggagtcccttctgctcaactccacatccgcaaaccaacacttaatacctaaccaattgtaatttccacctcttccaggaatataacctttaacaagtcaacctggaattacctggtcagtactagtggtgtaatccacatgagatacccctccatcctcaacaggaaggtgatcttgcctgaaagcaacccactgttaaaacttccatttcccactcccttctgcccataaagaaagaagtgaagtcactcagtagtgtccgactctttgggaccccatggactgtagcctaccaggctcctccatccaaggctccaagtctcctccttggaaaatcttgggatcttccaagcaagaatactggagtggattgccattcccttctccaggagatcttcccaacccagggatcgaacccaggtctcccacattgcaggcggattctttaccagctgagccaccagggaagcccaagaatactggagtgggtagcctatcccttctccaggggattttctgcccataaatgccttttgtttcatacagctctttagagctttcttttttctagctgctagatgggatgctgcctgaattatgaaccaatgaataaagcaaataagatctttaaaatgtactcagttgaattttgttttttaacagatgtggtggcagaaagacactgttgatggctttgggtcaaaagaaactcaggcatggaacctgtaaaccctttttgagctctctttgtcaccatttctgagggccatgagtaagttcctctcagttctctttgcactgagctcccgatacgactgggtttccagtctggggctggtcagcttgagtgagtagccagttccacttggaacccaagctctagtccttggttcaagccactattccccatttgactggaaaccccagattcagattcagtcccaagatttcatgtgggacctgctgtcagttcagcctgcagttccctattgtgttgagccccagcctggagtcctcgtatgttgaggtctgctagtatactcctttctccagtcccgagt

SEQ ID NO: 46889 - DNA, 654 bp, Bovine  19866881234091
  misc_feature (1)..(1): n is a, c, g, or t
nacctgctctccttgagaagcagacaagaaggagagctgcggaggcaggaccagtgtcaggtcagctgtcatggcgctgacaagactgatagaaaacctaatttacagttttaagaagcacatccattatccttctgattttaaaatagaacatacatcagcaaaatgatagaagaaagcgcttaagaattatgaaagtcaaggactactttatatcataaagtcacaaccctttttgaatattactttaaattatagcaaagtctaatgatatccatgtgtcctgtttgctgaaagttagcatcacagtattccaactgctgatgacctaatgatcatggatttactattaactcctttttacgtttaggtgagttgatttatgtttaggtagatgatgatgtcaggattgatgcaatagatgttcaccagaatattcttagaataacttagtttctgttggtttacattaaaagctcagcactgttttaatgtttattatatgttgaggtatttgcattggtgtgttagttttcagtgtataacaaagtgggttttttcctaaaaatattttttctgcctttaattctctgacacagctactccaactttcttctgtttagtggtttcctggaagggactttaaatctttta

SEQ ID NO: 46890 - DNA, 1046 bp, Bovine  19866881306604
  misc_feature (1)..(1): n is a, c, g, or t
ntttgtcccctttaaaaaaaaaatgacctaattcaaattgtaaagagcagaatctggtttagattgttgagcaaatcatttttgtataaatggagcactgatgatgggattaggcatgagccagacttgtggcttttggtattttccttatttttctgttatggccacagaagtaacactgagtcttagagagggtttctctcagggtgatgatacaaggactccaagtcctttgctctagaaggacacatgaacagataagtttctatttagagtaattagaataagtagctaattaaaggcttcttggcacctaagtacagagaacagactgaaatggctctgctgtcctcaggcttgaagtactgccaatgtgaacacatcagacaatttttgatgctaggaaggcagtcatgttgggttctatttaggtctgggaaataaaaccaccttgccttgtaaactaagcaagaataaagagaaatatttcatttatcttgaatgaatgcagtgtgtaactaggtatttgacttccaattttgctttaaattttatttttcttaagtaatattaacattggtaatgcaatagtaagattaatttatacatgatatttataccatagatggataagagcaatctccttagctttaaattcctaaggacccctgacttttattttttgggttggtattataacatttattaaaataatactatgagttaatagaaacagcaaagaaccaaagaattaaaatgaaagttatataaatcccaactaaaacccaaaagtgaaagcaatgggcaaatcgctatcaaaactgctatcaattatcaaaatttgggattttgcattttgtatccttttctcagtcaagaaaaacattctttttgaataatatataacatacatataaaataatatataaaaatacattacaaacttactataaatactaaaacttactaaaatacttaacttactaaaaatactatcaacaatggctgtaaatacattatcttacatttttcttatagtcaatagg

SEQ ID NO: 46891 - DNA, 1417 bp, Bovine  19866881308903
  misc_feature (1)..(1): n is a, c, g, or t
nttttttctattctcctatagaatctaaaatttccaagtagcattttgggtccccagccttttcctcactatactgaaacaacttaacacgcatgtgcgcacacacgtgcacacacacacatttgcccacacacacacacacacacacacacacacactttcctttagaaatgtttgacagtttccatcgacttaactcaaacacttgattatagaccaactttgttgacagcctgctgctgctaagtagcttcagtcgtgtccgactctgtgcgaccccatagacggcagcccaccaggctccgcagtccctgggattctccaggcaagaacactggagtgggttgccatttccttctccaatgcaggaaagtggaaagtgaaaattgaaagtgaagtcgctcagtcgtgtctgactcttagcgaccccatggactgcagcctaccaggcacctctgtccatgggattttccaggcgagagtactggagtggggtgccattgccttctccatgttgacagcctagatctctctaataatcgccatacagattgttccattggttcaatgaccatatctggtttgtccccctggcatttcaaccataacttgagaagaacctaattccaccacagggtcgaatatggtttattcggaaaggtttcttatgagagatgaggctggtgcttagtcctgaaggtggttagtagtttcaggagaaaaaggaggataaaaacaagtaaagggtggagagagaatacaggttgatcagaagcaggatgatggagacccacgagatccgggcatgtctgaggactgccggtgtttactataatttttgcccaggcacttgtagacgaatgctggggagagcaacagtccgcttgcaaaggtctttgtgtagcatgtcaatgggaaatcatttatggattttaagtagatgagagatatgatttaattagtcaattaaaatattcattgtgcagcggacaaaggagtgatctaaacaaggcaaagctggaggtaagagagcaagtaaagagaaagagctttcctgtaaaaaatttaagcttttaagtgctaaataaataaaaatgaaaaataaaatgataaggagatgtttattgtaaatgcaaatatggttcatatcttttcatataaaaagctcacacaaattgattttggtatagaaaatacatgaacataccttcgcaaacatattcatgtagcatttgtaccacagtgtgaaaatgttcatcctcacttgttaaacatcataatccaaactgatgctatggacggaatgtttgtgtccccaaatttttatgttgagcccccaacccccagtgtgatagtgtttgtaggtggggccatcgagaggaaattaggtttagttggggcttcccaattaaaccta

SEQ ID NO: 46892 - DNA, 1228 bp, Bovine  19866881434035
  misc_feature (1)..(1): n is a, c, g, or t
natgtaacaatagctattaggaaaagatattttatctcattgcaaccccaactgaattaacatgattgtgataactgtcaatgaattgataatgactcacaataaaatgcctgaaatgttactcttaatggcatctaaaatggaacagtgagtcatcctaaatgaccaggtaatggctctaaaacttctgcaggagctgtgaaatagagccagggtacgaagcttccagtggtaaagaatctgcctgccaatgcaggagacgtcacagacatgggtttgacccgtgggtcaggaagatcccttggcggagggcacagcaacccactccagtgtttttgcctggagaatcccatggacagaggagcctggcgggctacagtccacggggtcacaaagattcggaaatgactgagaaactgaacccacgcgaatgcactataaagccccttaactccacccaagagattttctttttttttaatattgtccattcccatgtcagttcctctatttctcttcctcattctcatgaaattaagaaataccattaaattggaagtctttttgttcttactgtcccaatagaattaaattaaaaaaaaaggtttctttggaaacaaaggtcttttcttttgaaaaagtatgttaacagatataaagagactatgattctgtagcttgaaagagaagaaatgtgtttatttttgtgttgatgggtctgaaagcaattgtcaagatgtaagcgaggactttgaacttgagatttaaggttttgaaaagggtctagcatgagaaatcgactgacattatagatcaaccaggagaacctttatattcagaaaattggatttctattgtaccgtttactgctttcaagtataatcaacaagacagagcttccagatatatagaaattgttgaagaataagggaaaaataatttaaagtcaaagtggtaaaacgtattcatcttagatggttataagttacatgtatgattttctcaagcataaaacccattattgctatgacttttttgcaagatgagaacattttctactattagatatgattcactactgcagatcagatagaaatatttctatttcttttaaaattggatacaccacacaaaatgcaaaagcagacaacaaattctaaaaaatctttttgacatatgggataaatgttactatcctttatatacaaatagctatcacaaaccaaga

SEQ ID NO: 46893 - DNA, 1612 bp, Bovine  19866881492502
  misc_feature (1)..(1): n is a, c, g, or t
ngaatttgggattttgagctttcattttacttgttagatcagtaatgtttgggctcctagttatgtagttttctatagaatccatccctggtttctggacaaactccaccctgagcagggactgcagagggtgcagacacgagcagccctgagatatatttcacgtgtctcattttaccttggtctttgggagagggtaatgagtagacctgctggtcaataaatgcttctcactgatctccatcaacagctttctttttcttaatctacagcattacatcttataacaggctgtaagcacagaaaaagtaaaagaaatacccagatagttcacaactaaaggtcagatgtactaaaaaatccaccaaataattacatttaccctgattaattgaatggaatgtccgttatccatctgaccttgcactggctccatgctaatcaggctcaaagtcctttcgtaacatttacttttgccttaaaatctgctgtccatgtaatatgcgactttcttccctccagaaagcttcgtttcattgttgagttggagtgagatgtaaagactttttttccccttgttattcactaaaaagggcccgcaagttaatcatctgacctcaacacaaaatgaacacaactgtgcttatttgtgcctaaaagagatagcagtacgcccactgaaatgcgtctccagccagaggtcaccgttaaggttattggcatggttttgtgaggaggctcgtgttgcagctgtctgcactgtccctagcctgaagataaatagcagacttcagtttccactgctactagtctcttaaccttcagtaagaacaaatgccccggctcacctccgcctgcttcctcagaatttacctcacaacccctgcccagcctccagcctgggcttcctggcgccacttccatcctttggggtgccccatgcagtgaaaagcggagaaatgccagcacaaggctaaaccggttgtagtaagtcacacgttcaacgtgtcacaaattaacgctttccacacacaaaccaaaatagcgacagttttccatgtggcctcatttgtaaataatccaatttgaaggtgactcccaaagtcatgatttaaggcgcgtgcatatgagagctgaccaaaccacacacgtggttgtgcctgtgcctaccctctggtggggaacggagcctggccctccacaggatgacccaggaagccagggctgggtgggtggcggtctggtggatgggtgctcacaagcaaggagtgcaaagattttttagaaatctaaccattataaatggccctccttctgaaggtgataatcaattcaattgttgctgttgcttaatagctcactcgtgtccgactctttgcgatcccatgaatcgcagcacaccaggcctccctgtccatcaccaactcccggagttcacccagactcacgtccatcgagtcagtgatgccatccagccatctcatcctctgtcgtccccttctcctcctgcccccaatccctcccagcatcagaatcttttccaatgagtcagctcttcgcgtcaggtggccaaagtattggcatttcagctttagcatcagtccttccaatg

SEQ ID NO: 46894 - DNA, 1112 bp, Bovine  19866881514995
  misc_feature (1)..(1): n is a, c, g, or t
ngttgtgaagattagatgagacgagatgaaatacacagcacagtacttggcaagaagtaagcactcagttaatgaaaactgcttttatttttattcttcttgttattgtttgactaggacgtgcagataaaagacttggccaagaaaaataaataaggtgccttttttttatatatattttatgagtcccaaaaataaaagatcaggaaagcaggctttttacatttccaaaatgattttgattccaaaataaagaccaacacttgaaagctctggaatattgtctagcaaatttgggaactctgaaaaaagagatgagaacagctgacacactacagcttaaatataatcagtcactgaaattgctctgcaatttgtttcactgttttttctgtggatttctttttttaaccatacatgtgtcctaaatatataattatatggcggaatataatagctcatttagagttattgaggtctattatataatccagtagtatcatggggcggggtttggcgaggagtgatggttattagcttgaatgaatactgaacacaagcccagatagatgttaatagatggtcttagtacttttcttcttgtctttgccaaagtcagatcattttcttgcccaaaaccaaattgttttaaattgatgttacatgttccttcaaaaggtcaagaaggcgtctatgtaaaatgtcttgagggcagagtgtaagtgtgggtctgtgtgtgtatgcatccatgtgtgtgtgtgtgtttctctgtatgtgtgtctgaagtctgtgtttctgtgtgtctgtacggagcgtgtatgtttcaaaagttaaaacctgcgtcttagacataacagacaacttttcaaggaataaataagtgatgcaaattcccccctccccagacaccttccctttgcaccagcctgagaaatgtgagtaacttttaggccaaacaggaacccacattcctcctaccacactcactcagattgcaaaaagaatcagccagagccgtgatcttccaacagagttaatcattttgccaatatattcctgttgattaaccaatggattcaatgcaggcttttttgtcaatttccattcctatt

SEQ ID NO: 46895 - DNA, 1265 bp, Bovine  19866881724625
  misc_feature (1)..(1): n is a, c, g, or t
nacaatgacaacaacaaactttactccacggcagtggatgctacaacaagaggattttaggggccagaaaaccaagatgtcagcggagtggataaagggtttgagaggaggggatcatggcagagcctcgacccatatgaacaatccaggacccctggttccctgaagaccatcccagcatccactgccttccctggactggggaagggaaaagagaaggacagaggtaggttagtttttacttcaacaacacttacatctactggttcaactcacacacaaatactgtgcctgcactgatgttagtaaatgtaaattaatagtaaaattattatgacataaacaaataggagggcggagacctggatttaaaacaacaaccaaaaaaccctgagattttattattctgtgatataccaaagaaaatgcatttttaaagcgtatcaggacatattttggtctacaacagccacagaacgaccagacacgcccctagaactttcatttatgtttttaaatattgaacgaaatccttgtaaatcatttccttcaaaacaatgtcttagtgattcccgcaggacccactagtcgctgcaaccttaggataagatgccagtttctcagtgttttactcaattaacttcataagctttcatttggcttcacagcagcagacttaatgaaatgggagcttgtgcccagatagcaattggccgcttcctgcccagacactgtggtttcacatcagcccttcactctgctaacacgaaatccccattaatgtgattgctttaagtgatgctgcagggagcctggagcccagggtgcccccagcccccacccccagctcaccatgtccttgcaggggtaagtggactgctggccaggagatggtgaaaatagcaacacacagttgtcttggaacaaagctctcagtgtggttagcaccaggctctgttcaccatccacaaagcatgtccaagctcactgccccctggacgttagcagatttgcagtaggtcatacctgtctgcccacttccccagatctcagctcccaatttggagaataaagtcgaatctgccttgatattatgcaacctgctgatacctggccctcatgacaggtagggccaagccgcggctgtggcctttccagcagccgggataataagacgcccactgtgaagagccatgtcttttcgggtaattcaggaggaacctaaagaagagccctgtctcccacctgtacacatctgctaacac

SEQ ID NO: 46896 - DNA, 924 bp, Bovine  19866881844186
  misc_feature (1)..(1): n is a, c, g, or t
ntatggagccaagagactgaatcgaacagttgagggtttaaagaagttggagcatcgtagccattattataatgaagttcactgatatataatcatgggtctgggtgaccaggcacgattcttttaagtctgagaaattgtaaatgatgcagaggagttttttatggttaccaactagcctccccaaaacttgtggtcatgaccaaccgtcctcaggtctccgatctgggcgggggttgggggggcacacctactctcaacttcatcactgggtctccaacacctctgtcctgaagctttcaaacccggcagatgagaagggaccttctcctccccccgccctgtgggcgcaaggtcccggagaggccgaggacggcaggacagtaagaggaacgcgctgctggcccctcctcccaaggcctgttcatttgtctatctcttaagtttggttccgtggcataaaaaataggatttatctttctccacagatgccacaaacagatgctgagaaccagagaccttgcagagtcaataaaagataagttataaaatctataaaactgctgaaagaaatcagaatttcagcaacttccagggtgctatttttttttcccccagactgctcctttgatcaactatagggagaggggggaagccagccgtgcattaattccatctgctgtttctcatggcacgcgtggggccggaagaggggcccgaggtcacagtgatgctggagctgaggtagtgacagagtagaaatggagaatggtgcccttgatggagacaaagctgtcataatcagttagcatttcacttttgtaaagatctcggaggtgatggattccttagattttaatgtacgtcttcaaagtaattttgtaagctatttaagcgatgctcccttttttacaactctacata

SEQ ID NO: 46897 - DNA, 982 bp, Bovine  19866881885244
  misc_feature (1)..(1): n is a, c, g, or t
nttatacgtttggtttttagtagattttattttctaaagacttctcaataaagataggagggaaaaaaaaaaaaagaaaatataatctgtgatttgaaaactaaagtgggaccatgaaaggaaaactagatgcttgcctcttattggtaagatgcaaaattgtctccagttttctgtttggcatgagtcactctgtaaacctccaaacacggcagcctggcgtgcaccccaccgctgcctacacgtgaggtgggatggctctgattccaggctggtctggagtctggggtcaccacacgtagaccctctactggagaactgatgagagaagatcaggatgagttctcaccgagacccgcctggacctggcacccaccctctgtgatgttccctgcacattccctacagaacctctaccagcccactgggcacctttgtgaaaattaggagaagacatcctttcattcaagtggacgcagcccagggcccaggtagagagagggcagacgtcagcccaaccagctaacataaccaccatctgcacccaccagctaacataaccaccatctgcacccatcaaaaggagccacgatgtcactgcccacacaggattccaccgaccatagaagcccttcccagctccctcctctgccaccaaattctcaggccacttagttcaactaacaatgcaacattgcaattatttgttggtgagtctgtttccccagataaactctgagcattttatgatacatttaataggtagaataaattatttgattgacattttatggaattgaatacagcttttcattttaaaggacagattacaccaggtttgactgttattttatttccaggggaaacccttcaggctttctgagcaatttaacgttttccgagcagatttacccaaatatgaaaatagccactgtctagaagcgagcactcaccccagcgatcaggtgtgtgactctcatgt

SEQ ID NO: 46898 - DNA, 1046 bp, Bovine  19866882021275
  misc_feature (1)..(1): n is a, c, g, or t
ncattcccacccccacccagcagcctttcccctgaggccttcgagttattcaagaaaccgagcacgtagcagaacaatcagatgcctccccctcagatggcttggctaatggccacttcctgtggttgtcaaatgaaaagagaaaaactagcacatcccccgatgacttactgtatcgcttcccgtatctgactctctggcagccggcggtaagttcacatcgcttgtaaattaagagccttttggcgtgggtgccgcagctgagccctccgccccgttatgctgattataaggaaaccctgccaggacttccattacgaatagtcatttcctaaaatgtggctccaacagccctgacatctaatcgtgcgttaaatgactgaggagctgctctgtgcacccctgtagacccccggcgcgcatcctcaagaagaaaaggacctcttcaggattcttccaacacacacactgctcacgggatctgctcttcaccacgacccccaggccttctgcctcgcagcccctagacctccggcctccgggccaacccctgcactcttctgcatttctgggcttgcccagatcttaccccacatcacagcctggcctgcgagaagagtcagcttgaggtccagagctgctgaggctggaccgcttcatcagggccccgccagcctcatcaagctcgggcacacagctgggcgggctccttgctgtccatgttcacagagatgtctttgctagcctgactgatgcttgagggaaaaagactctcctagtgcctggtagctcagttggtaaagaatctgcctacaatgcaggagaccccggtttgattcctctgtcaggaagatcccctggagaagagaatggcaacccactccagtattcttgcctggagaattccatgggcagaggagcctggcaggctacagtccgtggggttgcgaagagtcagacacgacttagcaactaaagagagaaagagagagtgcctagatggtatggtgtgtgtgtgttgtctggttgctcagagatttttttct

SEQ ID NO: 46899 - DNA, 945 bp, Bovine  19866881032336
  misc_feature (1)..(1): n is a, c, g, or t
ntgagaatatttattcgttggtaaatattttaaactaaatgtgtaaatgtataatgttaaacatagaatttcggaattaactatataaatatctcatatttacacttagtacagctttttatttgatcaggtcggaaatacttaccactcagaagaacatggctatgcataattatacctgaccatgggaaaaataagtacctcaaatgcatgtatttgcactggtgattccaactgcacaaacctttgtgccatctgtgtgtatatgtatttttcacatgaattgacatgcacaccattttcattcagtatgaaccttgaggctgctgccattttcccatttaaccaaaccgatacctgtgtaaatagcctaaaggtgatccttgaaaacttgtttcatatatatttcagaagttattttgcataaatattaaaattccaaaaagctgcagggtaacttaatgtataaaatattacaagtatggattgcagacttcatacaatagatgatagtgtataaattctattgaatgcatgctttctgttttaagcatgagactgtacacgtttactgtaagtccttgcatctgtggtgctaggtgagtgtgagaaggtgtcaaggactgaaaaaatattttgttgcctaacaaaaaaaaaaaaaggaaaaaaaagttgtctgtaggcatgttaaatatgcttaagtgtgtctctctctacctattacacaccattgctttgtggatttgttttatgtatgtgcgtgtttacagtagataaaaccctgtgcaaaaaataaatgtcctgaattctcattggtattctttattggttaatgaatgtcatgcatgtaatttatttagaaatgtagaagatgctactatatgtgtatgtgtattattaggattatacaagggtttcttttattagaagcagattgttttggca

SEQ ID NO: 46900 - DNA, 1784 bp, Bovine  19866880036615
  misc_feature (1)..(1): n is a, c, g, or t
nactttatttttctgggctccaaaatcactacagatggtgactgcagccatgaaattaaaagacgcttactccttggaaggaaagttatgaccaacctagatagcatattcaaaagcagagacattactttgccaacaaaggtccgtctagtcgactatggttttccctgtggtcatgtatggatgtgagagttggactgtgaagaaagcttagcgctgaagaattgatgcttttgaactgtggtgttggagaagactcttgagagtcccttggactgcaaggagatccaaccagtccattctgaaggagatcagccctgggatttctttggaaggaatgatgctaaagctgaaactccagtactttggccacctcaggcgaagatttgactcattggaaaagactctgatgctgggacggattgcgggcaggaggagaaggggacgacagaggacaagatggctggatggcatcactgactcgatggacatgagtctcagtgaattctgggagttggtgagggacagggaggcctggtgtgctgcgattcatggggtcccaaagagtcggacacgactgagagactgatctgatctgatctgatctgatgtgcattttcaagaaccatttctggctgcattgttgtttcgccttttctctaagtaacttctctctgttcactctcaatttatacaacatggttctgctacaatttgctgccagccatagtctgatttgtctctttattatagaggccagaatgtgagaacaaacttcattttggctctggcaagccagatcttgatatgcagtggctcccctggtagtaattcaaacatgtttcagtgtccttccatagtatgtgaatataggtgctttatacatatttttttcacctgtggaaagtagagttttagataatacttttctcttggtaaataacacatttcatatgaccagtttatgctcccatatgttattcatgatgatgtctttctattagggacttcctgagcagttacagccctgcttcatcaataaacacagatttatattgttttcatgagctctaaagtagtaaattttctctaaacaaggattatggtaaatataattgaattatagattcaaaatacatatttataaaggtcctgtgttcctggaagcccatgcaaaatgtaactgatgatcactaatagaatatttcccattaggaacagcctcaccagcctatatttctgcctgatcctaatggtgacactctctgctttcctgtatataacttccaaaaagtaagactttaaaaattaaatctcatatatttctcctttatgttttagctcctcctttgccttttgcttcaacatgccactctgtgggatctgttaatatggaggattaggaaaagagtccctgttgatacatttcaagtctgtttaaactataaaacgaacagacagttttatttcattccttgtgtgaagctacacagtctaatatgaaatgtaattcatataattacatataattacatttataaaaatatagaacagtctaatatgaaatataattgctctagtaatccttgaaactgccctataaggaatggcatttgaagatctcagtgggacattaattcagttgaaattgttgtatttttcaggtccgaccctaacctcccagttttcctttagtgatatagtatgacactatggaagaatgtccacaatcaaatttccttttctaagcagatgatacagcaagtctttttttactcataggt

SEQ ID NO: 46901 - DNA, 1882 bp, Bovine  19866880216374
  misc_feature (1)..(1): n is a, c, g, or t
natactaacgcatatatatggaatttagaaagacagtaccaataaccctgtatacgagacagcaaaagagacactgatgtatagaacagtcttttggactctgtgggagagggagagggtgggatgatttgggagaatggcattgaaatacgtataatatcatatatgaaacgagtcaccagtccaggttcaatgcacgatactggatggttggggctggtgcactgggacgacccagagggatggtatggggagggaggagggaggagggttcaggatggggaacacatgtatacctgtggcggattcattttgatatatggcaaaaccaatacaatattgtaaaattaaaaaataaaataaaatataaaaataaataaataaataaaaatgtaaaagatagactcataataggaaagtagcatttactgtgaaggattctaagcaactacttagaagcaaaacgtggcctagtgacatggcagcccatgcatacatgttggtagcttattttccaagcccttctttacaacttcttccactgatttcttattttggatctgccttatgctagccagagaaagccaggtggtcacagaatagacaccatcaccatatcccaaagctctgtgaacaatatgcatattctgaaaccaatcaaactctattacaagaaaacctgaatgaacctttttgtaaccctcagtcctcatacaccctgatcttttgataaaaggtattatttttcattttagttgctgatgatctatcaaagatggcaacagtttccacagttttctctttgatcttctctgcagagctagaattctagattaattctaccaggtaccacgatataaacccagcattattgagtcataagcattaccctttcatttctaactttccatatggggaacatatatcttttcttgcaatgatttaaagttttgatcaaatgcatgccacattaaatgtttgcagccatatagtgaacgcattttggctgtttaaaactcagccaagatttacaggataattccattgctgaagttatccgtgacaaagtcacagcaaagccaaaactcctaatacatattgtaaagtgtaatttattatggttcatttagactttcaaatatgaggtacaatagggttctgggtggtgggtgggggtacaagattttgtagttggcaatttcttctggagaatctatgatcttaatatattaaaaaaactcctgcttctgtctgtgaatgttggcacaactgtcagggcttgtgcacaggcctggaatgaatgtcccacaactcagatgatgctataagcagcatcaggaggaaagtcagtttccttccgtacattacgagagtacacaagctttgtctcatgcttagagataacagagtttgctctctttaaattatttatcaacccactaaagaaggaactaaaaataacttggggttgtatgttcctgtaaagaacagtgactccttttatataataatggctatatttgaaagcttttcattcatttacagatatttattgaacactagctatgtgcagggactctgctagacattaggaatataaagaaaaaattcttcaaggtcttgtttaactgtttgtctttctgcctgtaacaggcagcctatgcctatttaactcatttaatgtttccatcaaaatcaacttctcaattgattttgttttccattcttgagcacttttgcctttatggaaatgtctcccatgtgtagatgcctggaacttaatgtcaaagggcaggtgtgttttctgttttggccatatgccattcatcatatgggcacatccatatttcatcttggacatccgtattatacgatatgctca

SEQ ID NO: 46902 - DNA, 1212 bp, Bovine  19866880386467
  misc_feature (1)..(1): n is a, c, g, or t
nactattatcaaaggcagtttaaataatagtaagttactatgataggctattgtactgaaaccttaattacttgaatgaatgcaggtaagccaaagagtagaaagaaaaaggacctcttcatcttttgtttcactttggtgaacatgttctgccccacaccattcagtacttgattataaagtacttttatacctgtggtggattcattttgatatttggcaaaactaatacaattatgtaaagtttaaaaataaaataaaaaattaaaaaaaaagagaaaaaaaatattatctaattggtgcatatatatttgttctatctcaaaagaacccactttctaaacagtctctgtttttaatatgatgctgattaaccagttgggacttccctagtggctgagatggtaaagaatctatctgcaatgtgggagatccgggttcaatccttgggttggggagataccctggagaagggaatggcatctcactccaatattcttgtctggagaattccatggacagaggaacctggcaggccacaatccatggagtcacagaaagtaggacacaaatgagggaataaaggacaagcactttcacttttaagcagttgtgctcttgcttgctgcaaaagaaaaaaaaaaagagaattggctatgtctaattgtctatctgtaggtgtgtatctttctttatctatgatctatctatccctatacttttatatgaactatgatatctgaaaataaaacaaaagtaatataccaaccaaaactagttttcataccttcgaaggcatactcattggtaagtttgataaataatttaattcccaggcttctcacttagaaattctgatttggtaggtcagcagtggtgcccagggctgcatttaataagctaacctatgattccattgcaagtgtttcttctaaccatgttgataaaacattgatttagagaatctgtgttaaggatgattctggtttgagtttatcaattttctagctattcaacttatacttccagagctggtatttggctctgactatctgaaacccaagtttatcccagaagggcattattagcctattctgaaccccgcattcaatcctactttcttttttattgactcttgcttgacccactcaaaaataactattatttggtccagtgaggccccaggctgttacatatttagcacttccttct

SEQ ID NO: 46903 - DNA, 885 bp, Bovine  19866880437342
  misc_feature (1)..(1): n is a, c, g, or t
ncagtagtcatttatggatgtgagagttggactataaagaaagctgagcactgaagaattgatgcttttgaactgtggtgttggagaagactcttgagagtcccttggactgcaaggagatccagccagtccattctaaaggagatcagtcttgggtattcattgaagtactgttgttgaaggtgaaactccagtactttggccacctgatgcgaagagctgactcatctgaaaagaccctgatgctgggaaatattgagggcaggaggagaaggggatgacagaggatgagatggttggatggcatcaccaactcgatggacatggatttgggtggactccagctgttggtgatggacagggaggcctggcatgctacggttcatggggttgcaaagagtcggacgcaactgagcaactgaactgaactgaacagaatttaagatgaaaataaactttaacagatactcatggtggaactaggagaaagaatcttccaggggatcccaagctctccatgagaaggtactgagagagcaaggtgcagggagagaaaaacagaggtatggctgactccagctctctatcaagcagctggttctttgaaattcctacagccatggatgtctcacaaacacaatagaaggcacacttcctgagtacttctgagtatgattggaaagtattgcattattctaccaagcaaagatgccactttcttttctgagagatctactgaatttagagatcactagaggaaagttttatatttgaaaagatgttccaagccaaagctttcactctctgaaatactgtatctaccctggttcaaatggaagaaactccactgacctccaggaaactggatatgtctcaataatttga

SEQ ID NO: 46904 - DNA, 1580 bp, Bovine  19866880479605
  misc_feature (1)..(1): n is a, c, g, or t
ntggaggaaatattctctgttctgttaggatgatcagtcaaaatttagtagccaagtgtataacatgccatgaaaatgtgctgctcaaaaagaaggacatccaagtttattttataaaagcctctgatgaccccagtgatagttaagaggctttcggaaatgaatgcttttaataaggctaaacagttcacaaaagtggacagctattattttgcactttgagttatacttaatatcttctgttaaaaagaatttctatgaaagttacatttacagattgacaggagggggctcataacaattttttaaaatttatttttaattggaagataattgctttataatgttgtgttggcttctgctatatatcaacatgaatcagccataagtttacatatgctccttccctcttgaacctcccttccacctcccaccccatctcacctctctaggttgcatgacatttttttttaatagtacttataacccataaatattataatgggatgtgatctacacttgcaagtcatattatatggtttagctatagctgtggggaaagaatctaagtgcctctttttccttgatgaagaatttagctaacgttccgataaccttggccaatcaggcatactgttctctgatcatggaattgcagttactcaatgttctactgaaagagagcattaaaaatcgtcttgtcaggaaactcacatagctgagaagaaggatccttcatactgaatggaaaggacattttttctgacacagtctggaaaccaagttacagatgattgtaaccatagtctcacttaaaaagagcttgccagaggcagcatatattgactgatttgcttcttgttatcctgaaatgggaatttgactaaagttcaagtacttttgaaattttgtgcatcatttcttccttcaaacttgttgaattttaagcagataaattgttgaggaaatacaattcttttgcttctagccacttactaaaaagagtaaatgaatcctgccaaaaacaaaacaagacagagtggaagaaaagcagaacagttaaaaatgaaagaacaccaagaaaatctcaaaatttatgttatttgtccttcaacacctatcagatactggtgaggatttagaatatttcattggattttagtcccaaagaagtaggactttctctgttctgaaggagagataatgatcaaaggctaaggaagatgtttctcttttttaaaaaaaaatttttttaagaactttttgtaacgctgctgctggctaagtcacttcagtcgtgtccaactctgtgtgaccccatagacggcagcccaccaggctcccccgtccctggggattctccaggcaagacacctggagtgggtgaccattgccttctccaatggccagttaacacacaatgttatgatagtttcaggtgaacatcaaagggactcggccgtacacacacatgtagcctttcgcctctaaactcccctctcatccaggctgccacgtaatattgaatagagttccatgagctatacagtaggtccttgttggttatgcattttacatat

SEQ ID NO: 46905 - DNA, 1330 bp, Bovine  19866880568330
  misc_feature (1)..(1): n is a, c, g, or t
ntagtttttctgtctatattctctggcaaatagtaaacaaaacaattatttacctgtattcagctactgatgcctaactagttctactaatatgatttgttcaaacttttactataaagatgagtgaatgagtataatataacaaaattttccatattcacatgacattttaaagttcctttgatattgaattttctccatttttggtaaagactgctttacttcatgttaagaaatatgtaatagtttattctcaattgcaaacaattatcttattacttaatttttttttgccttcagatataaatgaatctcttaagctggaaaataagtaatttaaagatcctatatgaatatttaagtaacttttttctgccttcatcttttttcgtgccatttagtctctttcacaaacatctaatttgccttgatttgaactaagcaggcagcatgatttttggtacaaactttggttttaatttttccatcatcttctttagaactttagagtattgctttactgcattgcaggttttaaacatgactcttactatagccaaattttcatatcatgctgtccacttctagaattctgtgaataaaataatgctaattgtgttctggctactaagtagtaagtaatagtaagtaggcaaaagagaaccctaaattttacataatatcacttttagctctcatcatatttaccacagaatgctgataagttgatatatttaccctacctgtaggtattaattaatacttacaagttggtactctcatttaggtaaaatgttgataagttgatgacagttcagaaataggtcattgctgccgggagagaaagcatttttttttttttttcccaaagaaattctctaagaaacacttcttacctcaaacccattattgaatgggcacagctgcaaaacctcagcactcacgaggggctttgctcattactccatttctcagatgtcactcacagagctccccgcacagagaaggcactgtaatgactctcgccttcctgaaataagtactttgtgcaaacagtggagcaggtgtacttaggccactgacatgacaaagtacaaggaagatgccctgttcaaggatgggctgatttgcacacagggaattgatgccacttaggagtgcacattggttgagctaatccaattgttgtttctccttgaaaagattcagaaaaattggtggaaaggatgagggctttgtaagagctcttggacagtgtcctcacacttaagtaatgggcagagcaagtggaagccatagcaacatctgctcctgcaaaccacgctctagt

SEQ ID NO: 46906 - DNA, 928 bp, Bovine  19866880602793
  misc_feature (1)..(1): n is a, c, g, or t
nttttagtagcattgtaatatgaagtcttttagagtaactattctgtttccttcactgttagaaagtgaagtccaagttcatggtaattgacttcatagctcctttgtatctactgactaataccgttcattaagtagacaatgaaaccagcagaatagcattacagctctgtgcgtgtatgttgtggaatgtgttaacatgtttttgacttaaataactgtatataccactttggagaactaaagttgatgaacttatttgtctggggactattcaaatcctgaaatttttatctgctggatataatgttgtgggaatgttaagatagaggctgctgctgctgctaagttgcttcagtcatgtctgactctgtgcaaccccatagatggcagtccactaggttctgctgtccctgggattctccaggcaagaacactggagtgggttgccatttccttgtccaatgcatgaaagtgaaaagtgaaagtgaagtcgctcagtcgtgccggactcttagcgaccccatggactgcagcctacgatgctcctccgtccatgggattttccaggcaaggtactggagtggggtgccattgccttctccaattccattatacatatactcaatattgtggtaagtcttaaggtggaaaagtatagaatgtcatgaaaacaaatcacaagggcaccaatataaactaattcctacctggatacttcccatctctttatttggttcagacagtaaagaatctgcctacaatgtaggagagctgggttcgatccttgggttgggaagatcccttggagaagggcatggcaacccactccagtattcttgccttgaaaattccatggacaggggagcctggcgggttacagtccatggagtcacaaaagagtctgagaaattaatacttttcatct

SEQ ID NO: 46907 - DNA, 1876 bp, Bovine  19866880638891
  misc_feature (1)..(1): n is a, c, g, or t
ngctaaaatatgttttcaatgtgatttatttttcttccttttgcatccctttgattatttggacctgacttttaaaacaatgaaataggttctctttattgcatctcctttacatagctctgttaaccattttctgaaatctggcaaaatagtgcagataagcatacagtagtgtgggaaaaatattttaaagcaatcaagaatattttatcaataatattagtttatctttttccttctcatgcttaattactgcatactttgcaatatataaaaaattttaattccatttaattccagtggaaatctgtcaactgccttcagagatttcttaataggaaatctaataggaattcatttggaaatgtgaaacataaaagactcagtgatattctcctaccaaagcaagactgacttttgaacagagcctctgggaaaaagaaattttaaaaaattcacaaagtcttctctttctaattctagataaacagattgggataatctttaggatcataattaatgtcatactaactttaaaaaggcatacacaaaggatgctagttatcttttaagttaaccacttaaaatatttttcaaattctagtaagagcaagtgatagtaaaataaatccttatattcaatattaaaattttcactttagtaattttcttttagatacatttattctctcctaatgacaactataaattaatattaacttgaaaaacttattgcctgtttctacagacatcgactaacttgtccatattaattagctgattgttttttaatcatgcataagtgagttgtttaaattaaccataatatgttgagagaggaaaccatataattaggaggcaaaatgagattcctttaaacccagttgtcagttgacataaaaagtaaaagattatgattgttttaattttattattaaaacccgtggaagagcagaacataccccttttagctgttagactgttttctcttaggtctccacaggatcatcaaaacagcctcttactcaaacaagagagagcagttcaaggtggtatcatgtataatgtctataggtagttcaagaaaggtgtttctgtatgaagtggaatggacagatcctgattgcaattgtgcagatttttagatgtaatagtttaggactcgtggacacagccaggagagagctttaaaataaaccttcaagatgaaactgttgcttgataaacccagctgaacaatctgttgtctgcaaagggactattactctgatgaggcctactggagtggctcaggtaaataggttgcctgaaatttcctgaaataaacaaaacagttatttgtaatttcatctttctgggacagacattaatattattagaatttgcatcaataaacttgaagttctattttctaattagttgattactatctaatagttgtcatcactaataaagattatctaataagatctatcccagatatatgtatatatggagacatgttaaccaaatgaaagactacaaataactgcacatagtcacagatacagatttatttatggtttgggtggaacagtgtggtcaaattttgaacaaataaaagaacttaaagtttttgccaccccccaccccaccttagaatcttttagccactagaaaatgtgaaatgaagaattatccctgttggtcacttgaaaagtgattttctttggcccaggttgaaaacctgaagttagctaggtggcaggacaagaagcgggtataatataaatcttcagtttttattttaagcattgagcagcagcattcagcaagtctatgacttaatattatgtgtttaatgttatgtgctgcaccacctgtagcaacgtagatg

SEQ ID NO: 46908 - DNA, 1441 bp, Bovine  19866880649148
  misc_feature (1)..(1): n is a, c, g, or t
naatatggagcttttgacacaactagtaaatccatttatgcctgagatacagccaacaaactgcaatatatagaagttgttcattctagcataagcctgggattactttgtgattttttttttaaattacagaaatcataattactaaatttgcatcttggttactctcaatctgtccatggtataaattaaatttgccctttgacttgtgtctaaatgaaagagcaaattttagtgaggagcagctctgtattcagaggtaaacacattcatctttgcattagttctgatgaaatctatccacaggcaggttatatgccaggacactgatatatgccacgaggatgcactgctatgaactctatctcagcaaagtcctccagatggaaaataaattggaaagcttcctccagagaaaatgagctaacaggaaagatttgagtctctgagtttaggagctttgcctagagttagttcctcttggggaaattcagtgaatgtgttcctagcaattctaggaagtcttgagatcttttaagacaaacattatggtcttatgtaaattcaagtaaactttctttgggaatatagcccggggaagtaaacttgcaaataagtttgaaagagttcattgcaacttgactattaaaagaaaaatatatgcatatttactcttccttgctttagatgaaatctaactgggagtacaggagacatgtaaaataaagtgaagaaaaaactggaaattgtcttcaagttttagaaatacataaaagtagcaacatcatgaaggatgttctcagagacataaagaaggatgtgttagaacaatatttacaccctccaagtaggatccagagacatggcctaaatcaacagttacccatgagcaaggaacccacaagcatgtcattctaaacgagtgattcctaaatgtgtcaaagctaaattcaagcaatgacagtcttttagcaggagcatgccatttcccctagtttttcattaggctgataacaaacactacttcatatatcctctcatgtgctatctgactcacacagactcacattaggagaccacaaaccaattatctctatttccattcggcaaggtaataaaatgtctttatcctcagaaataacttaacaatagcatcagcatcaatgacatttttcatattgactgcagcataaattcagggcattattaacaaggcataaacagagatttaaaatagcaaaaaaaaaaaaccctttcaataaaaatatattaaaggagaaagatgttgcagacatactttttctatatttttattgctaaatataactacaaatcctgcacattgtatataacacaaatataagaagagtctgaaactggagaaagtagacagtttatgcatctcagggccctgaaatcaacacaatggtgtgctccccag

SEQ ID NO: 46909 - DNA, 1418 bp, Bovine  19866880661038
  misc_feature (1)..(1): n is a, c, g, or t
naagctgacttttaaacttctcttactgtcccaggccaatgatcacaatgcattacctttaaatgaatgaaactgcatataataatttatgagaccccccattatatattgtttataatactttggatagataagctggaccagatatgtcttctgagtattctgcaaaggaaatgtgtcctgtaaaacactattacataagtagaccacttgggagatgtctaaacaatgtatgaatgtacaaatactcatgaagcacacaggataatttataagcttttatttctaatgcaattgctgaaagttaatgtagaagccattcatttgagcaaaccctttaggaccattacatgcaacagtaaggtgaattctgcctactatcttctgaaggaaagttcagttgaaacaaacagcattatgaatgacccccaattcatggtgaaacagatttccataaagactttgggttctgtgtaattctcacacattgatattatgatttaatgcatttcatgtgtatctagctttggtcacactatctttcttttatttttattttcttctctgtactctcctctcctttgtatgttttactccgtatatgtaacaggcagattctttaccactagcaccacctgggaagccctcatacctaaatcaccctaccccaatattgtctctgaattggaagtttccaaatgaggagggactagtaagcaatctctctgctgggaatctttctttaccagtcttagcaaatagaagcttgctttctttctttcctgctatctatgtgcagcacaattctgttcatgaaataataaaggattctgtcatggttatattgtgatacaataattttgatggccatgaatatgcacaccatgatataatagtgttcagtagggttgaagttaataaaagtgatacatagctacttcacaatggcaacagctacaaggatttctctcttttcaaatgatctcccaactgtagtcctcttgaaggtttaagggaactgctctgtaggaatctgttcagtcattctgacacactcttagaaaaggagactggtgatgatcaaacctgcctgctagatgataatagcaacttctgcctgttctccagaggcctatgaccatcagcagaagcatttggctttacgagctatcaatattgtgtcatcctctaaagtcaaatctctggaagatagactcacacctttttctcttacataaagtttactgcatggagcaacactaaaaattattcatacatgtccaatgtcacattattaatatgagtttctgaacccaagaggaaagtgttctgtcatttagcttgaatatgttttccattgctttgcaagaattttaaagttactcagtgggaattcctttgggaatcatttcatagtt

SEQ ID NO: 46910 - DNA, 2819 bp, Bovine  19866880696721
  misc_feature (1)..(1): n is a, c, g, or t
natatttaaataatatagctgagagttgagtatgagaatttggcataagcaattgacatggaaagacagggggtgggattgggaaagagtataaggaggtcagtttggggcatgctaagtttgagatgaccatgatttacccaagtaggaatgtcaagtacacagttggataattgagtctggacttcagggaaaggtctttgctagagagaaacatttaagaatgactatcatggagatggtagttaaatccatacaattggatggcttcctttcttaactcagagtgaaagccaaaatcctgtaatcaccaaggaaaaagttataaatagaaaatgtttacagacaagagacattttggaatctaaagattaaagatttgaaggaaccagagaaaagactgagaaagtgttagtcggtcagtggagtctgactttgcgtcccatggactgtggcccttgggctcctctgtccatgggattctccaggcaataatactggagtgggttgccatttccttctctggggatcttcccaacccagggatcaaaccctggtctcctacattgcagacagattctttaccatctgaggcaccagggaagcaagaatgagaaggaactgccaatcaagtagtgttaattgctcagtcatgtctaactctttgtgaccccatggactgtagcctaccgtagcctaccaggctcctcttcaaggcaagaatattggagtgggtagccattcaacaaaaccaaagatcagtgtcctaggatagtgattaaggcaagttagtcttaagtaataaaatgacaacaaatatttaatggttgaaacacagcagagatttgtttttccattacctaatgatttaagccagatgtcctggaatagggaatgcctttcttacatgaaatgagtcagctattcaggatttcactaacttatgcctggtgccaccatcccctggggattcactgttattttcagttaacagtttaggaatattgctagagaatgtatatccacttcttactttactggacttggaaatggtatgtacctttcccacttatgcttccgtatcttattactcagtcttatggtcacacctacctgcaagtgaggtttggaaatgtggtattgctgtgtgtaccataataagaaatcgattttttttttttaatgtatgaatagctagcagtccatgtcatcaccaatgtagaaatttttccaagttgccactctctgaattttaattttccttcaattgctattttcccaaaatggagtaattgacagcatttattttgtatccctgatggctttcacattgactaggcacttagaagttcaacaaatattgttgagtataaaggtgaaggcattcgaattggaagatgtttatagtttacaaaataaatgagtaatcaagtacagtctccatttctttgggtaatgtgaggctcagagaagtgtctggctaaaacccacatagctagtaggtaatggatttggcccttaaactcaggttctctgatttcaggaatatgaataactttgatcgtgcttctctgttttgattcagttgcaggaaacctaaagtgaaaatgaaatatttaaatagctaactctgaggtgtaatttagtgagagttttactctaccctctatataagtattgatcttggattatgacacagacaatgagctattctgtttctctaatgacattatgttgagcggagagtctggtggcacagacattggcattaaaatttaaaattactgaggcaagctggaaaagaaaacaaatgaaattcagcagggacaattcaattaaaggactacagtgtagaaggaggaagaatataaacagagaaataatcttaaaacaaagtagaatgcaatgcctaataagagaggttcatgtgaagtgtcaggaaagctcagtggagaaaaactacatctcaccttgattcaagtcatgttatgctaaagtcgcttcagttgtgtctgactatttgcaaccccacggactgtagcccaccagactcttctgtccatggcattctccaggcaagaatactggagggggttgccatgcccttctccaggggatcttccccacccagggattgagcccgagtctcatgtgtctcctgcattgcaggtggattcttcactactgagctaccggggaaggcccctgattcaagtcaaggctgcagcaaatgctgtgctactggaggagcgcatattccagtttttgtttgtggggccacgagtgcctttcacaagaagtatactgggttctgtttcaggaatcaggaaaacttttatgatggctcttgaagtatcagtagtatcttacagggcagtgagtatttttcaattataacatcattatttgcaagtgacagaaaacctttcttaaagtgatttaaataataaaacaagataatttgctcatgtcattaaaaagcactgaaacaaatgcttgatcaaagtctcaaagtaacctcctcattttagtcttgcttttcatggatcagtgttggctgcaggtaatcagtctctcttgtggtggttgagcctttgtagcagtttccacgctccagatgtcattcctcagagtgcatagcagaccaggacatgtgtcctgagattccttgcctaaggcctgggattccctcagggtgcctgctgggatcaaatgtttgactcctagacctcagggaggagccccatctcttgaaccaagtgatacccaagtggaaataatcagtgtttaaaagtaagggagacgcctcagagtccaga

SEQ ID NO: 46911 - DNA, 1263 bp, Bovine  19866880771477
  misc_feature (1)..(1): n is a, c, g, or t
ngctccgccgtccctgggattctccggcaagaacactggagtgggttgccatttccttctcaaatgcttgcaagtgaaaagtgaaagcgaagtcgctcagtcctgtcaaactcttcgtgaccccattgaccgcagtctaccaggctcctccatccatggggttttccaggcaagagcactggagtgggttgtcattgcccctgagctctgattaaatacacaggtaagctcaaatggtctaagtgaagacttatccaaggtggagtaatttaagaaagaaggaaagggaaaagagataattgggcaggtgatttggaaagtgacggggacagaactaataagccagcatgtgttgaacatgatgtggttcagaactagagtggaagcacctatttggaaggaagcatacaagccagggaaatcaaatgggcagcaatgatcccactcagcaaatgctgcatggaggcatcctgtgccccatgaggccccagtgatggcatcatgcagatgtggcccccgggtcccttctatttcatctttgtcaagaaatgtcaagcatttcctatggagtcagtataaacagatgcaaggggcccatataaactcatctttcctttcctttttctccttcccatcctttcctttccctccctttcccttttcttttcaaaatatgactgtctaaacaaaatctgtgcctttttgtcttctgaatgaatctcctgtttggcattttgacagatgcattatcttttgccatgtcagccttgcctgttctctttgccatgcccttctccattcctcttttaaatacatacttctctatatatattttataggggaatctgggtagaaggaaatcagggctatttttcccattggcatgagtttggacatttgtggttgctgcagttgagactgtgtcgattattgaattgtatatcagtctcttttaatgtgatttccacataaaactgtccacccaaacatatacatttatatattttattttatatgtagggaataaaggtctttcagctctaaagcaacaactggcaggttatggttgctgcctgcctactgaatagttcattgagagcacagttagattaacacaagccttgtcataacactgtaatttatctttggaacaggattcatgatgtgcctatcatttccctcctcccactattaaacatattttcattctgtgaagctcactctaggcttaattcaattagtaacttggacatgacatcatac

SEQ ID NO: 46912 - DNA, 839 bp, Bovine  19866880800818
  misc_feature (1)..(1): n is a, c, g, or t
nagagaatatggcaaataataaaatcatcccagacagcagagaagtaaaattgcagaaaatcagcctgaaataccaaaacctgtcaagcagagttgagaaagctaggaaatgcctacaaaagaggatctggaggaaaaatgaaggctgaggataatacaaaccattgttcagttgaaaggttttgcaaagcaagtgtgctggctggtaagaaaatattaagcttttccagaaaattgttacttcctaatttctaatattttagttatgtttgcttgcgataaagcaaactttatgtctttgaactgttgggtcccattttattttgataaaagaatagacttccaagagatattcaaaacaagtccgggtttaatagcctttaatttgtcatttgggatatattaaaagttagaaggcaaataaacatagcttggcaacatttacagttaataaagttcagttcatttttaagcagttgctaaggtgattttgactttgatttttcagaggttactattgcaactctagcaatcaaatgtaccaagctcctccaatatatattaatagaaaatcaaggagaaacaggtatatatagaaattttttgaagtgacctaagcttcatctaaggaatgaaaaggcaaattaaaatgagttcatgttttaggctgtagaccatctctattcccactccaacccctcctcacattcacaattctatcctaaaagcaatattgaaggtctctcccatatccttaaaagctggaagatgaaagcatggaagtaaggtatttgccaaacagatttaaaagtgtgtgtgtatgtatcttttattaaata

SEQ ID NO: 46913 - DNA, 1386 bp, Bovine  19866880853879
  misc_feature (1)..(1): n is a, c, g, or t
nctgttttggatagattacttagcgcctaaccacacccctctgcaatagactagtagcaagatggtgagtgagagaatgaaattcttttccccgctgcgacggatggagtgattttcagaaacaatgagattatcacccgcattcccaaatctagctttcaactgaaaatccgaatgaagaaccaacagaaaaaggtagatccttataaaaccactttagaacgtagcaatcagcatgtaagctttttaacagttttctgttgtacgttgccactcatgctgatgagtctttatagttttggtgcattgggaaccataaaataaacataaagagttcatgtgattattttggccatatttcaatctgtccttttagtctgcaggctgtaggtggtagagctgtcaaattaagctataccagcaaatgaggaaatgtaatacaggtgtaagaagaaagaataaatttcatataagacagtaattctcaaactttttagtctcaggatctctttaccactcaaaaattactgaggacctaagaacttctgtttatatgggttatatctttccatctttactgtattagaaatgaaaccagggagatttaaaagtatttatttgtttctttttaaacagtattacatttgttacatgcctaagatttttaatgaaaaatgaccattttccaaaatgttcctaaaaaaatcagtgagaagggtgacattatggatttttttccttgggtttgtgtgtgtgtgtgtggtaaaatatagataaaatttaccattttaatcatctttaggtgcataattcaggggcattgagtgcattcacattgttatgtaaccatcgccactgttcatctccagaacttttttattattccaaactgaaactctgcatggggattaaacaataacttttcattatcccctcttccagtctctggtaatcactattctctctccctctttgaatgtgactattttaggttcttcatactagtggaatcttagaatatgtgttcttctgggactggcttatttctctcagcaatgtgtctttaaccttcatccatgtcgtagcatgtgtcagaatatccttttttaaggcagaatacattctgtagtacggatataccacgttttatttgtccagttgtccatccatggacattggggttgtttctacttttcggctatttggaataatgctgccgtgatcgttggtgtgcacacatctgtacagtgtctacctttcagttctccagaatgtgtgcctagaagggggattactgaatcatatggtaattttatggttaatttttgaggaaccagcatactattttccacagcagctataccattttacactcctttggcaaag

SEQ ID NO: 46914 - DNA, 740 bp, Bovine  19866880868442
  misc_feature (1)..(1): n is a, c, g, or t
nctcttcttttggtgctaatctcagtaggacatattaattgctccataaaaattctgctttgcatctttggtctcaacaatgagggagatcctattgtaggttgtgagaatttcctggaagtcatatctataccacggtggctaggaaatgctaacatatatacttggacatgactgtgatccatatgcgcagatataattaaatcagactcaattgttcccagctcaactacttcatagccactccaaatgtgatccgacatgagtagaagtatgttggagagtaaactggaacagaaagtgacaacaatcttacctaattttggttaaggtgccttgtgtttgcaaatcctacaaaaacatatagaatgtattgctagaaggggtccatgcaaggaggagactctgacatttcagcttaattaccatgttggttaattcacatctgaactaaaggcagacatgaaagtgacttgatatttgacttgatatttgaaaccaattcaggcaagtgtaaatgttataaaagaagatcgtcattaccactcatattaggataagcagatgtcctcagaatacacaagatgaatctttagggaaaagtcctgtgcaattttgtaaattgaataatacacttagggagtttacattaatgttcataattttatgtgagaagtatttacaactaattatctttggtagaagcaagaataagagaggaagtcattccctcatttcaa

SEQ ID NO: 46915 - DNA, 939 bp, Bovine  19866880881344
  misc_feature (1)..(1): n is a, c, g, or t
ncattgaatggttgtatgtgaattcactttcagaaggcagcatagcttctgaacttttggctcatgtcactaaaatgaacttaatctattttcttttagcacaacatatacaaacccacagaaaatttactaaattcatttggaacatccataatccaatttaggaaagtagtgcttgttttttactaaggtatccaatcaaattatatactctaccccagattcagctcacttaggctttttagaatgtttctcttagaatccatttgtgctatttatggtagacatttcatgccaggaagtagggtggaaagaaatcaaaagagatgaaagaaacattttttctcgtctaattaactgaatttacaaatagtttcatgatggtctgatgtgatctagtcccttttgttaggtaaccaatggacacagaattcgccagtgtgatgaggttcttgtctaagtactggtgattttcttatcaacagcctgttgacagaaccctaaaaggtctcaggttgcccatgatctatgatctggctgttatgagaatgcaaaatgtactttctaaactcaggaggtcatgaggcaatggtgggcagagttattttgttggagtatatggacccatttcttagaaagctacagatgctttggggaagaccctagatttgcttcctgaaaacttttcttgtgttcattcagatagtaagggatattgaggaaaatcggtgtggtcaattttcccatatgtcttttcataaatatgacttctattttcttgctgataacttttacatataagaatttatatgatatgcatgcctagatgatacacagaagcacacatacattaaaaacaaagtcactttgttttgtttatggtttcctttgctatgtaaaagcttttgcatttaactaggtctcatttatttttggttt

SEQ ID NO: 46916 - DNA, 1230 bp, Bovine  19866880931870
  misc_feature (1)..(1): n is a, c, g, or t
naagggaaatataaaagacaagacaaaagtctgtaaaaaatttctttaaaacactacttttttctataggtcccagtttcttaataaaaagtactgagttatgcaaccaatgtgagttgtttttttattttaaataatacatgtaaagccaatcacatttcatcattcccctgctagcagataaaagtctgaaataatatctaaccatccagcaactttaaaccaagaatctagcaataagcagaactgctgaaacattaaaatgtctcaggtttctttttttttttttcagttaaaaaaataggttgctttttatctgaaaatgtaatggagtacataatcaagcataatttcctaaaaggaaaataatgaaatggcatatattaatcctagagaagctataaaatatctttagttggtcaagacttgaaaaaggcactgcttgtgaaaagagaaaaataagtctttaagtaaaaaaacacagaagaaaaacaccaccagaaagtagcaacactcagatttatttattttattttattttaaaactttacaatattgtattagttttgccaaatatcgaaatgaatccaccacaaaacactcagatttaaatgcagtctcctgtctcacagttcggatctctttttaccacatcacaagtggaaaataaggctggaaggatggtacaaacatatgaaaagtaaatacaaatagaagagtcttaattacagagaaaatagcattttgaacaaggtttttataaggagaggtcaggatagactggagaacagaagtcaaccttgaccagtacctacttgatacttttatttaaaattagaacttgaaataaaaagaggccacattaaaaaaaaagattttgaaatatatgccagtgtttttcatccatgaagagatctgggagttcatgaaagtcggcaattactatttgtctgagacttgaagaaagtactctagagcttatgtaagaagtgccttttgaaatgaagttgagtcaagagaagtaataacttgcaggatccaagaagtcctcaaaagacatattaagaaaaatcttttgtaacagaacataaaagagactttcttagccaacagataggacaaataatatttagagaaaggaagaaaagaacaggattatttcccatcattttattacataaaggatataatatcatgtagtctagccaaataaaaaatgtagttccagag

SEQ ID NO: 46917 - DNA, 1278 bp, Bovine  19866880988202
  misc_feature (1)..(1): n is a, c, g, or t
nagacttctcttttcctttctttctgtggcatagttttgatcgtgccccaagaactagatgatcctgaagaaatctctatagacttggaaataaaatttaaactgacctctgactcaaagtctcgtgcaaagcaaagatgactttaaacttcttctgcattgaatggagtactgtattgatctccgcaatgaaatataaatggaacccaatggactgctattttaatgcagcagagaaaattcaatgaattgtccaattctctcaggccctttagaaaactacccagtgcatggttttaatggagaaatggcgcaaggaaattgagtacagggtctcccagtactcatccattaagtccttgacatctgaatcactacggtaaattatataggcccttaataaaagactggagtggcatctgatatttaaaccataggttatagatgcagaacaactcattctgccttggaaggacatctgcatccagtatacctgcctcaaatctttgtcactgaaaaacatcctatctcaaactcaaaaccaagatcaggacaagatgagatgaaagaatacagtgtttgaaaactagctgattccttaatatattgtttccttggtttcaggcctcagttttgcccagtgacctattgatccgcttgtgaagatactcaaatcccttaagtgtcagaatattccatacagattattctcatactctgtcactgttgaaaacatacatagcaaacttgaaaggacagctagctttggggagtcacctttggagtgtcaggttagtatatgtgggcttgtgttagtcgctcagtcatgtctgactctgcaaccccatggactgcagcctgccaggctcctctgtccatggggttctccagacaagaatactggagtgggtagtcattccttctccaggggatcttcctgacccagatatagaaccccagtgtcctgccttgcagacagattccttaccatctaagccatcagggaagccccatatgtggacttactttctatctacattacagtactcatcaacttagaccattcagaggaatggaatgagtacaattctggccatctaacacaagagtgcattaatttggtttagcatccctatgatatagcattttaaaaacagctaagatactatataattgattaaataatgtatgtgtgtctggggatttgatgctgctcctgtaatatgctacaaatgccttgaaagtaattatgaaaactgcatatgtttattatagaaa

SEQ ID NO: 46918 - DNA, 1737 bp, Bovine  19866881031809
  misc_feature (1)..(1): n is a, c, g, or t
ntactgttgaagcctggcttggagaattttgagcattacttttctagtgtgtgtgatgagtacaattgtgcggtagtttgagcattctttggcattgcctttctttgggattggaatgaaaatggaccttttccagtcctgtggccactgctgagttttccaaatttcctggcattataaatctactactacttcaatttaaaaaaaaaaaaaaagttgagtacctctctaagggatcagtattagagacaaagccatagtaccaaaaagcagtgctgctaacatctctggtttcaagaacaaattatagctctagagtaaaggcatattcaaaacatttatttttattctttctcacagctgcaacaaatggtttctctctgaggaaattattactgagagtgttttaaaatctcttagatcctaagagatgtgtactgtaaaatatctgaataggacacccatctttttaaaatatatggacattggcttacttaacattaacaaccagttgttcaaaaactggtatgcaggttaatttttgccagagcttaagtgtctggttcacagatttggccttcagaatcatgtggtgcttcacttcagaaattgcttttatttataagaaaaagactaaagatagtctggcagccagaaataattggtttaataaaatttcaagtgtatattcatggtatcttcccacagaaagacagaattagtcaattcaaactgagtctccgtccaatgatcctttaggaaagtggagtctcaaaaaactagactttaaaattctgttggaattttggcataaaccaaatgcagactataaacacaagtcatctgccaatagtattttactgcttttagagaactgctagcatgttgaatgaacaattatcacactgatgacaagtaacaagtgctttcttgaaattttaaaactcgtgcatctagtttaaagctatctgttccttgctcccttcttccctccctctgactctcaacccttcctacccaatccttccttcctagctttcttccttccttccttgcttctttgctttcagataggaatatagaagtatatcaacaaaaaatattttctgtaagaaagaaatggggagattaccaataaagttgctaactgataccagctaatctactggtgtggttaagtaactattgagtaattggttttttggtttcatattaggccaaacagatgggagggcttgtcaactaaacacatatttggattaccttttaaaggcatgaatttatttaaattttatttgtaaatagtctccatgattctaatcaactaatgtctaaaccatgctttcaaaactttagggcacttatttatttctgacaagatactcaataaatctctaaatatggcctctcgggttatgaatatctctatgttcttgtcaaaacaaaacctaaattactgtgtgcataaggaggggaatagcaacaggagtacacagagatgattggatttagaaatgtgtaattattttcttgcttcccccctcttctctaaccagaaccaatatgctaaaaagtatattgtttgttttttattttccaattaagttagaagagctttctgctcctcagaaccactgctttctataagatatgaaaatgggatgcccaatcattttattcaagcactgggaaacctattactgatgaagtctaatgttaaaagccaagatcgcagta

SEQ ID NO: 46919 - DNA, 1264 bp, Bovine  19866881032426
  misc_feature (1)..(1): n is a, c, g, or t
nggaaagtggcattcactcatcatgtcctaaccattctgcagagatggttgtttgattccctggtcaattactgaagacaccgtgaatcagaaatctattgtcatatgtcgtctcactatggtctatttgtatattcagtctcagtactgattatttaatagaattatttcttagaattcaaaacaaagtacttaggctatgattagctgtataaatccaataatatgcacaacaggatgtatttcttgctatattttttcccatttacattcccatgcttatggcaatctttctgaattctcctgtctttgcaaatttccaactcctagtcctttgtcatcataatttaatggatttctgagtttcctatttttctgaggtgcaattagagaccatccagaggttcctactactttccctccccaccttcctgcctatgcagccacacattccgtgttctctcctgttactttcaatcagttgtccatgctgacatctgaggccaatcctgagacttatgcccctgaatttcattccctttcacctactcaaggatatctcttcaacagccctaccccttcctctcagcgtgcattttccatctctgctgtatcatgtctattagcatactaacatgctctaatttctcccatctgaggacaccctatcttagaccttctattacccttcagcagccccacttttaagatcctcattatagcaaaattgcataaagaacatttttttcctgcattctatatcttaccattcacattttcatgaaaccacatctatttgatttttaccaatgagtgctcatttcctgaggttacatggttaaaaggccacttgtgtctttgatatacacatcaatgaaatggtatagacattcttagttctttcagaatgtaagcagaaaaaaaaattttaatcagatgtattaaaaattagattgattatgaaccttcttctctccagttattggttgttttttattccagtgtacacatagggcctaaaattatatatcaagtggaagatgttgaacaggttggaaatttctgatattctaggagagtctggagttcaattttttaaatgtactttctctaaaatatgagaaacatttccaacaagttttctaggtggaaagcactagagcatgacaaaacacccaaaagcatagagatggtaacaatttattatattccctggggcttgacatcttattagattcattttccatgtaaaggactttaaaaa

SEQ ID NO: 46920 - DNA, 1436 bp, Bovine  19866881049332
  misc_feature (1)..(1): n is a, c, g, or t
ntttctgtgctctctatgcaagttatggactacgtgattgctgctgttgcatctcactcattatttttcagtcattaaattttgctttctactagagatatagtcttaacttctggcttcagcatggagtaatttaattttctcagagtgtctgaattacaggtcagagttgagaggtagtaaataaaaacgtgtgtgctctgttgctcagctgagtctgactctctgcgatccgtagactgtagcctgcaggctcctctgttcatgaagttttctgcgtaagaatactggaatgggttgccatttcatactccagggaattgtccccacccagggatcaaacccgtatctcccgcattggcaggtggattctttacagctgcacaatctgggaagcccagtaactaaaagacggctatttaaatatgtttaccctttaaaatctcctctttctatatttgaaattgtgatcattaacatcttcctcttactgtcttcgttcttcatctatcttattatcatactcttttaagtactcttaaattttagactgttatattaaattcctgacattttaatgtttgcctttttcatctccttttctaaattttatacacagctctttatattcatttctttgtttcagtctgaagacacaaatggtttattttcacagttttcctcaatatatttagtattttccattgtttaatgaaagaatcttaactaaacatcattatttagtttacaagataatcatgaaatgattggttagatcacaaataaatggtctttaattttgttggtcaaatgtgtttccaatcattttggtatgttaattttttggggtctattgtgtatgtagcatgtttaagagcagcaacaaaaatggcaaaaatttgtctttgctgtaaaatagctggactggttggggactcagacaattttttggtgctggtcagtgtaacacctaaaggacttcctgttgtttactgaagttttttctttggaattttatcctgtctatgggtcaccttggagaaggcaatggcaccccactccagtactcttgcctggaaaatcccatgggcggaggagcctggtaggctgcagtccatgggatcgctaggagttggacacgactgatcgacttcacgttcacttttccctttcatgcattggagaaggaaatggcaacccactccagtattcttggctggagaatcccagggacgggggagcctggtgggctgccgtctatggggtcacacagggtcggacatgactgaagcgacttagcagcagcagcagcagcatgggtcaccttctcttccccttttaaggtaatgtgtgagacaccaacttggatatattatgcccttcagaagagaatgactcctcacatagtacagttaaatacaatgagttgctcttgt

SEQ ID NO: 46921 - DNA, 1164 bp, Bovine  19866881050637
  misc_feature (1)..(1): n is a, c, g, or t
nggatttgatttaggtcatacctgaatggtctagtggttttccctactttcttcaatttcagtctgaatttggcaataaggatttcatggtctgagccacagtcagctcctggtcttgtttttgctgactgtgtagagcttctccatctttgctgcaaagaatataatcaatctgatttcagtcttgaacatctggtgatgtccatgtatacaaaatgataagttaaggtgatcaggaaaacaaaaattaggatgtaagcagtagggagatggggggaagaacagtctagtctttgaagagtaagtgaaagtctttaaggaagatgtgagcttattgtgttcgaagaatggcaggaaggctatgcaagaggcgctttggtaggatatgagttgagataagatagtcaggggttacatatcaaggtcttacctggtttgtttattagtgtcttcccatcatgggttacggttgaggggttataaagagcaggagagcataaaaggattgacacaaagggtgggatggctgtggctataaatcagccaagagaagatggtagtttgtggaagaggatcagagactacacaggtattcaaggtacagccaacaatatttgctgatggattaggtggagaatgtatgtggagagaggatggaaagcaaaactaaccttgttctgggtctctgcagctaggtgaatggtgatggcatatgctgagatggaaaagattgggaaaagaatgggtttgaagagaaattaagtatcttatcatatcatattttgagcattttaccatgtcagggtatgcattcagacgtgcctgttaagcctccaagtagagatttgattatgaagttgggtacgagtatggttgcattttaaaaatctctgtctttgacacagaacagattgttggggaagcactcttatctcacaccctactcttagtaaccaaactgtagtcaaagtgtgatttaaatacacatacttaaaggaggaggtggtttaagaaggaggtgtagtcatagtgaagagttccaaacataatttgggtttcatagtggagttgggtgtgagggtttaaatatttccctaggtgttagctgtctgccaaattaattggttcttgtttcctgaggaggaggaaaatagacatcctccg

SEQ ID NO: 46922 - DNA, 1566 bp, Bovine  19866881051379
  misc_feature (1)..(1): n is a, c, g, or t
nttgcctggaaaatcccatggacagaggagcctggtaggcttcagtccatgaggtcactaagagtcagacacaactgagcaacttcactttcacttttcactttcatgcattggagaaggaaatggcaacccactcccatgttcttgcctggagaatcccagggaagggggagcctggtgggcttccatctatggggtcgcacagagtcggacacgactgacacaacttagcagcagcagtgtgtgtgtgtgtgtgtgtgtgtgtgtgtatgtttgtgtgtgtgcgtgcgcgtgctaagtctcttcagtcatgtccaactatttgtgaccctatagaccataacccgtcaggctcctctgttcatggaattctccaggcaggaatactggtgtaaatagcctaccttattccagtaaataaattcattcttaccttcttctaacaagtttataaattaaatctttacaattaaagctttactgcatctgaaatgtatttgggtatattaagaaagacatatataaaatgaggtagctggtcatttctctatcctatgtatagaataatcctcatatttccccacttatatgaaatgcaacttgctcacataaagtacattcatatttactgtcaggaacaagacatcaatccccattgtgtccccactgtagtttaccctttctagaagatcatgatggaacttgacaagatacagaaataagaaatataaaacttatacaggagtataaaaaatgttcactttctctcagataatttgactgcaatactagaaatttccctcataaaatcaactgaaaaactattcaaaacataagaatttagtaactggcatggtgataacattagtagtagtttttcaattgcctcattctctaaagtattgtattagttaccactgagtgatcttttcttttctttttttattttattcatggcatgaactttaactggccatgatatactgacatattatacttccgcatcatttaattcaatttgctaatacaggcatttctttatctgaatgaattctgaaaagtcattgaatattaaattttgaataacaggagtctttgttctattattttaaatgtgaaaaatattttgttccaaatctatttcaaaatctcaaccaattttccccaaatactacttatatatcctaagtacttccataataacttactgagaattccttcactgtgtaatacatttaaaacactgattatccaattattcaataattaaacacacaaaggcatatatatgtgggagataaaaattctgtttagaatacaataatacaactttagatacaaattatgttttgagttgataaggaaaaaataaaacctttgatatgtaacaaaaatttacctgaatttattgctagaaaaagcaggaaaactttaatacaacacagaagggttagaccttgtatgatgaggttttcagggaaagaaactagtaggatttttttttttttttttttagtgaatatctcctaagcaaacttaaatcatattaggtctggaatatcactt

SEQ ID NO: 46923 - DNA, 1935 bp, Bovine  19866881118675
  misc_feature (1)..(1): n is a, c, g, or t
naaggaaataagtcctgaatattcttggaaggactgatgttaaagctgaaactccaatactttgaccacctgatgcaaagaactgactcatttgaaaagaccctaataactgggaaagattgaaggtgggaagccaaggggacgacagaggatgagatggttggatggcatcactgacatgattttgagtaggctccaggatttggtgatggacagggaggcctggcatgctatagtcaatggggtcacaaagagttggacacaactgatcgactgaactgaactgaacatttttggaatgttcattatattatagacacctgactgacaattgagttaccaatttccatccttctacagggaattattattcccattttaaagatgggggaaaagtagtttcagaggagttaaggaacttgttcaaattggcaaagcaggcatgcaagcccgagtctgtgtcattacatttgataatgtagtggaaggagcagaaactcaagagttggtattatactgagtctgaaattgggtttctggggttgcttagcaccacagggcaggctgaggtggtcttcaggctctgcatatgcctagagagctaggcaccctggtctcttgcaaggtggaccaaggagtaatccaaagcccccttcgtcatcccaagctgtgcaagactcagagttacaacctccattcgcctgccagtgtcttttcttctgcaggaagctttgccctgcagggccaggatcaaaacttggtctccacaggcctcctcccacagattgttaccaagaaagtaaacaatctaaaataaaaaattctgccctggaggaggcaggaaagataagaggcctgactacgcttgcttattgcaaacaagacaggttgggctgcagctggtgcatgggaaactcattacagccacttgaagccttgacaaatgcagtgggtaacctgagagcccagcacagagcctcctggcccaggagtcagtcagcctgtcggcaggtcaaagcagacagctcacaccagagtgaggcagcagattaggccccagcagtatgtatggtcagctaagtaggaaaacagggctgggtcatgatcagcagcgatggcagaagcagctcagcacagaatgatcatcaatttctctgaagcagagaccaggtttgatgaagtacccatgagaagggtggctccattattaataactataataactatgacaatgataataataataatagtatcaatacaataagtactttacagttattagtcaagaccctggcaataaacagaactctgatcagacagattcatcaaaaataaaaaatataagggcagatttaagagaccctcaagtaatgttgagatgcttagaatttagtaagcctgaaaggtaaaaggagaaaacaccgtgctgctagggatcagtgatagctcaggggagctatgattgtgcaggaagcagccactgtcaggactgtgatgctcaaagtgggagggagtaaggagaatattccccaacttctttttcctcccatggactgaagcaacccaaaagccacaatggaaagaaagtccagctgatgcaatctgtgcagatgagctgctcagagatgggcatacggtgtttctgagtgagaaaacacattactcatctaccatgataaatggttcggtttttagaacagtggcatcaaaggcaagtatcttcagaggatacacaggtatgcaaacaggaagagaaagcagcgtgggtcagtaaagggctactgagtgtgttcatctaagagtgtatggataccatccacatcactgccttccagcctcagggtaatatggatccagcactgctagaagatctaagatctatttttagaagtgaggcagaaagtccagattactgtgtgaaatttccctactttt

SEQ ID NO: 46924 - DNA, 1381 bp, Bovine  19866881251516
  misc_feature (1)..(1): n is a, c, g, or t
nttgtgcccgactctgtgcaaccccatggacagcagcccaccaggctcctctgtccactgaattctccaggcaagggtacctttatagtctggttctaactaatattctgctattcctgtggttactttgccttccaggcatactaaacttttcacattctttggcatatcatcctctctctctctcttctatgcctttgtggttttcactacttagcctgcccactgccttatgtgtttgagaaactcttgctcattctataaaatccattttgaatattttgttccctagtagaggctgtaactccatcttttatgcacctacaactctttgtatttctagcatcacatttttgtgcattaggcaattaagtattggaggaaaagggaatgacagaggatgagatggctggatggcatcactgactcgatggacgtgagtctgagtgaactccgggagttggtgatggacagggaggcctggtgtgctgcgattcatggggtcgcaaagagtcggacacgactgagagactgaactgaactgaactgaatcagattcacttttagattttgaattctcaaggatgaggatcatttctgttttttaacctttctaagtattggatttcttttctaataaaatttattatatttgtaacaatctgctatactcaagctttgaaagtactttagatattttatagagagatgaatgctttccatagtatataatgtgacttttgcacacttactcccttaaatgtgtctatatcttttaatttacagtacatttttagagctttccaaaattatacatgtagcaaatcatgagttcataaatctcagtttcgttcattaaaatacattggataaaaaaatatcctttgtagccttgagatacctgccagtcacttgttatcactcagattcagtttgcaagttattttgaagagatatattatttcttcaaaagttcctttaagcagttgttttctattaatgaaccttgataggatccatcagagatccattctttcattaccttttctcccagttgaaccaaaaccatttactttttataagtctgccaagaaggagagtctatggcctgaatcatttctgtaattaacaatagtcactaccaagacaattttatgtatttttaatatggctcattctgtgtaaatccattttctttattcttgttttccaggactttctggaaaacaagaagttataatcctctgctttaacagtctccagacatagtctcagtttctttagctcctgaaacggctcctatattccaattgtttatcatctgtgtagctcttctctgaacactactctgacttccttaacagaaaggaagttttttgga

SEQ ID NO: 46925 - DNA, 1714 bp, Bovine  19866881267541
  misc_feature (1)..(1): n is a, c, g, or t
naacttaatcttatattagaaaatcagttattgcttcctattcccattgaaagaggttcagatacttacttcagagacaggctttctctctctcataaaatagattgttctgacttggggcttcacactgggctgtaacatgggagtagttcaaagaacactctctttgttgctttaaccttgacttttatcactgggtaacccttgcaaagccacttaagttctccccttttctataaagaacagtataaatgactgtcagaggcatttgggaggattaagagaaataagagctgtctgaaatgatggtgtcattgtgcctggtatatcttgagaaatcaatacatgttagttcttttcccatccatctgcctcatttctgccacttacctttcttgactctgagtcttcatgacctccgcctccagaatatttactagcatttaagccacttctttgccttgatctcttgtttcagtgtgattttggctgttggtttctgaatctttcctcttcttgccccattagttcaaatgaactcacaactttgacaccactatactattctcattgagtactgaacttaagttctgaatttgacactattcatacatgccaattaagaactctttagatggaattatagatccaaaaaccagagtaataaaaatgttatttactaaaaatctctattgttctgtaaactctattctacattgtcttaagtaggtctcctgtctagtggtctatttttttctgggaaattaaaatataatttaacacctctttttggtcttattcttaatcactgcttaacaaaaagtatctcctgcataaatgaagggaccctagtattggtcacaatgtcaacttggttcagttctctcaaagcccaggttactgcttcccccaaagaataatgtaaacacttataacctcttgcctcctaagagttaagcagcttctaaacagaacttgctttcagggagtactttgtgatcagagaaactagttcattagtttgaagtgaaagcttacatttcaaagtataaagacataataaatctatttttggtgtagttgagtgctcctaaagaaagttattatagagatgctacattgatttcaagactttaaaatgcaagtgtatatcatggaaaatgccaaaaagcattgcatgactaagtcccctctgctcagaagctacaaattatattgaactaaacaatcacactgtattgaagcatggggattttcatatctcaaatcttctaaatagatctatttgggatgcttgttgaatctgaggtatataatatgacatttataaagatacatgcacctacctatgtgcctatatatgttgataactgtgtggataaatgatttgattattcaacatcaatgcttttattcacccctgcaggcaagtatcacatgctggttacgtgccaagaagtataacacgtttttcaggaaatacaagaaagtaaagaaattcaagacatacacattctccaactctgttgatgaggctgaaacttggtacatttttgcaggatgactgggcagaattatttgaaatgtgtatttcttttattctacattgccactgccatttctggatgtttctttgatggtgaaatgtgtgtgtatgtgtgtgtgtgtgcatgtgtaaagagagaactgaattttaattatatcatgtttaata

SEQ ID NO: 46926 - DNA, 1275 bp, Bovine  19866881291416
  misc_feature (1)..(1): n is a, c, g, or t
nttggagaaggaaatggcaatgcactccgtgtgttcttgcctggagaatcccagggacgggggagcctggtgggctgccatctatggggtcgcacagagtcggacacgactgaaggcgacttagtagtaagtagtaggaatgcttaactgtatggttgactttctaggatcaatagccattcaaaaatattgatatctgtagattttacagcctctaattaaagagaagttacactagaagacaaggttggccaaataatgatcaaattttagtaaccaactaaaggctattattcttcaaaaaaatattaaaaatgtttgtgtaattttttaaaaagtaattattttatttttaacctaacatgatgggttggaacaatcacagctttagaaaggaaaaattatagatataaactttcaaagatggcagtggatagaggtctctcttgctttaatgcattacagtatgtaatttttcctttaccaacatagcaaatgcattaaactgtcaaggaacttaaatgtatccaagcattacgtttcacttggagcttggatggatgaggatgaaagatagaatgtgtttatttgaaaggactatatttatttactcttatttccaacaatgtttttatgaaagcaggaaatgtaacctgtctgtggattgtggtcaaatctttgcctcctctcagggttaaatttctgtgtggatatacctgaaaacctgtatttctatattcatagctcttactgctatctctagaagtccaccatattcctgtgacttttagaataaatgctagaaagtatgaagttgctgttctttgctccatcaccttctaagtctccatcatcttgaatcctttaatctgcagcatggagttcactgccagctaggagacttatgtttctgtgaccataagcaatgatctagtaatttgcccattttcctaagcaggcaggtagaaactatttctgttgtaaatggcacctgtaataaataataggatttattcaacaaatcctctttatatcctgcagagtaaagcagaactatcttaatgcagggaataagggggtaattttgttggcagagtcttgattttattaccttgcactctccttagattctctgagccatatccagctgaaaaataatccttttggttcagagcttgcaaaatctcagcgtgccaccttagcacagatgctctaaggtgagggatgaagatgcctgctgttggagactacacaggttaaaggcggcagattcta

SEQ ID NO: 46927 - DNA, 847 bp, Bovine  19866881320114
  misc_feature (1)..(1): n is a, c, g, or t
nttaagccaatggtcaaggcttgtaatcaattctctggagagaaacaatcaatagcccagcttctacctggaaaactgtaacttcaattaacatgattctgttcatagaaaggaatggataagaacaaacacttcatttaaaaaaaaaatagtgtgggttttgtttatatctaagccgacaacaattgtgtaactaagataatatttgtaatttctttttaattttcatgactgatgtacaattccctaggttcttctcccctccagaaaataattgactagtgagagattatcttttttcctaacaattcacattttgggttctggtttgctaataagatatgtaccataaagaattcttaccaacctgtaaagaggttttgagacgtatcaagtattaaatttcaggcatacttctgtctttccaaagcaaaaaattaatgttagagaagatatttcttagaaaatctcaacaaatatcttttatattttacatgaggcaaaatttgcatatgtatggacacttatcatatagacatccatgtgttatacttcaatacatttaaaattaattactggtgcttaaataaatagatatatttatttacattctgccttaaaaatcttgaggtgattttttctgacttatattcttggaaattactcttttgcttgttttagtcttgcagaaagatttccttaagtcctcaagtatttttgtatgtgtctgataggagttttaagaaatgattgttaatagttttatctctcccacatatgaattcgtattaacttcaaaggaagccagtttacatatagaagagataagtcacagagggagcagaaa

SEQ ID NO: 46928 - DNA, 851 bp, Bovine  19866881354793
  misc_feature (1)..(1): n is a, c, g, or t
ntatgtgaagagttgactcattggaaaagactgtgatgctgggagggattgggggcaggaggagaaggggacgacagaggatgagatggctggatggcatcactgactcgatggacgtgagtctcggtgaactccgggagttggtgatggacagggaggcctggcatgctgtgatttatggggttgcaaagagtcggacacgactgagtgactgaactgaactgaactgaactgaaccaccattaatgtccacaaggaatacttgtcagacaagcattttcatgtgatgaaagtgaacagtattcaataaagtgtaactatgcaagaattcttatttttttaattagtaagacatatggatacaaacatttcacgtattcttttggggatgaggaaaagaggatattccttgtacatgttattccctagtatatgaactgtgacacagcaataataaacaggataacaaagggacagggataaaatggcacaaataatgtcactctcccttaaatctgcagtgtatcaggggtttttctgtctgttttctactctgcagagatcatgaaaatcaatttctgataattatttaaattaatattctcatatggtacatggctaaaagtggcacccaggggtttgctgcctacggaaagaaggaaagacatttgaaaattaatagtgtcattgtatagtataaaggtaactgaaaagcaaagttgtttacataaaaatgggcattttaaggggagaaaaacattaagcagtaataaaagcagatgcatctgttcttatttttccttttgaatgtgttcttcctaccagtttcaacaaagaagagaaatttttca

SEQ ID NO: 46929 - DNA, 799 bp, Bovine  19866881409791
  misc_feature (1)..(1): n is a, c, g, or t
ncacatgtcctctgctctcagcatcacaggatggctgctggatttccagccatcacatccattttctaggaagtgaagggacacaacaaacggttctttcagccaagtctgagctctgtaagagttattttgataaccacattcaattgctttcaattatagctcattaatcactcttcaaggcaactgaggtgaaaaactataatcttccacctaacacactgctgttccaaatgaaatcaaagctctattactgcattttggagggcagtttatgcccaaatgggcagctctatttccaaagtaccagtttattaacagattcacacaaatctgatgtctacattttcaaaagccaaattctttttactagtcttaattgtaattgcattatactgcaattaatatggtctaatatagatcatagttactttataaacctttacttaaagtttataatttgagtttgtcacctaagtatttgttatgtattctctttgttatcaaaacagtgtcatctatgagttttagcaaactggatggagaaatttccagtcacttacctctctttcttatcaccacaggaacacacacagacacgcacacacacattctctactatatgcatgaatctagctagtgagtttcaaatatgcttagggagatgcaaattgagaaaaagtaaatagtttagagaaactaatatcaaattggcatttgagaatgctattttaaatatatcatcagtttaactcaatttttgcaagaaaattattttccatatctagagtgtccaggg

SEQ ID NO: 46930 - DNA, 2017 bp, Bovine  19866881413722
  misc_feature (1)..(1): n is a, c, g, or t
nattgagaaaaaattaaattagatagcaacaagattaaaaggaagttgaagtttaaatacactggtcaggaaaagacatgagacttaaattatataccatagaattggtcaatgagcataagaagagtgaaaatgatgttaaagaaaaacagattaaaaattgagcaatcaaatgacctgtttcctttaacacagtttcccttttatcagaggtgtagcaaaatcacatccattggcatttacaccagattgggcagctaggtgggttgaaagcactacgggagtccagtttctttccatttgagatcataactcttagtagaacactgtgcaattaataactgcttagaagtacctgtttatttgatctgagaatgttactggcatatgttgccttctctcttttatgacaagaatagttttacaataaaacacatagcctaaaatcagtacactgaaagccacagggaccattatttaaggcaagtccatggggtcacagagttggacatgactgagcacatatgcgcaccatttcttagcctaacaaacttgaaggtgtccctttgagcagcaagtattaaagtgggaagaaatagcttcatactgtaactttcctctagaaataagaactgtccttttagtgaagcaggctgctctgtctcacgggatataatttgggcctttgagaaggaatgtaaggctgctggtctggtttgaaatggttgtgtgtggttgtccaaatccctgaagaaacttttaagtttcttgccaaggccactgctattgaaaacagtaaatatattttcagaaagttagagcaatggagaatgaaataattcacctgtcgtcttttcaaaatgttagtttcctactgggagcaggaatttggtcttttgcctcatttgactatcaattttgagttgcttcattaattttttcactgggtgagggccaagttacagaggaggaaatgacagagaactgaaagggtgtaggctacttttaaggcatgttttcctctttacatttggagtttaatgcattttagggttttgaaaaaagagttgcagtacctgcaacaggacacttctaccatcaaaaacataaaataattcatgtataaattcagggaaatttttatttatatttttatataccactgtaatcgttagggtaaagagctagttggcataaacatttagtttctcaatctcaactttgcaagttgagctgcaactttgcagcttagctagtacaactctgatcattctctaaaggaaatccaattatggaaattcattggcaaataggatcatacattacctgtgggaactgagacagtttcagcctacacactttacttcagatattggtgtataaatcatcatcatcactatcatcattatcattgagattcatatgagagtatatgtattctatgaactattctaagtgctttatgtgtgttatctcatttgctattcatagtaatgttaggatgtgatcattttatggacatcttttatggatgagaaacacaaaggcttaaatagtttcagtaacaagccaaacttccaaaaattcccaaggtgtttgcaagataatttttggtatccattaaatagccaatagacagattcaaagccaaaggtaaagtaggaaagtttggctttcctttatgaatgcctcctttgtcccttgatagtctctattcattcgtttgagcaagaaactaatttggtggtcaacttaaacatattctctaaaaatatcaaacatttattctttacaattgctttttattagaaagtccattaaattcatttggcaggatgtgcactatggttatttttccttgtcaagaggaaagtggcaagttgtccttcctttttaaaatcacagaagaataccagaagctcaaggtgtcagcagtgtcatttctgaaaatgtgtacactgcagtcccaaagttaacatatggaatccttatcaagtcagaaaggaacagctgagtg

SEQ ID NO: 46931 - DNA, 816 bp, Bovine  19866881440551
  misc_feature (1)..(1): n is a, c, g, or t
ntgcaaaatctgaaaaggatcaaataaaaatctccagtctcccaaatttccaataatgctatatttgtgattttaaaaaatgaactgatctactcccttaaatgcaataacaatttaaaacacaaagcaaaattaaaacctcacacactaaaatatactgaggccattttaaaataggcttatagactcaagttttgcttagaatatgactttgcaagaattgaagctaattgaatttgggaagtgtcaggcactatttataagcaaaaccaaatggtatgagcttttcaagtttaaatctggtttaagcttcagtgaactcaatttacaaattcactttttatttgctgaataaaatgcatatagggtgtgggggacatgatttcatcagcaacttattgggagtttatacatcctattctgttttttccaaattatagaaatactttttaaccttgaagtaaagatttgaaggggagggatgtaaaaaagcaaatcaaacatgattcgatttgtctattagttggaaatatttttcaggaatgtaaatgggggaatgaaactctttgacatatttttcttaggaagtactttaggccatgactgccaaaatggttgatgcacctcggttgttaacctattcagattgcaattagaaggtgtcactatcatgaattaagatagtataagcaaattcaaaggagtcttatttctgtccctggacatctggctccaaagagcaaaggcttaggaacaacaccattcatgacgggcaagcaaaataacaggattagcaggagcccttgggcccacagt

SEQ ID NO: 46932 - DNA, 945 bp, Bovine  19866881784036
  misc_feature (1)..(1): n is a, c, g, or t
nggaacttagttttagcatcctccttcaatgagttgaattcaatctcctgctttggcaagtggttcttaccactagcaccacctgggaaacctggagaatacagtgaaagttaagtctctcagtcgtgtctgactctttgcgaccctaccggctcctccatccatgggattttccaagcaagagtactggagtaggttaccaatagtaggaatctcttaacaccaaattttaaaacacagcaaagcaaaacactttcctaaaaatatttctcaaacttagatatgtggtttttattgcacagacatttctgttacacatgaaaatctcatggctttctgattttgactcagattcaaagtacttaaagaggaaaagccagatataatgggatagagtacaagagattacattattattcacatgcagataactgcacagtgaatggactgttaatgctaaggagtgctgtaaacttcttctggaagcttcatgggttgaattggatggaagagtttatgaagcaaacctggatgcctgtatacattttaaattggcagaacaaatttgaatattttcctgatgggaggtgaataggtttatctgtggaaccttttatttatctctagattatgcaaacctatgattctgtcattagacactttctgaataattactaaaacataaaagctgcatcatgattaaaacatgaaacatagaagatgtttatcagaaaaattatccagatttctttgaacttaaaattccacaagagtagattcttttgagattacctcctggggaaagcatgactatctaatcataataaaagtttttctttctctgtttacagaattgactgatgtggttttcagaaaatcagacaactcagaagtgagaaaaagacaaaaaataaagatcagttgtaaaaggcctaaactttttca

SEQ ID NO: 46933 - DNA, 1172 bp, Bovine  19866881820448
  misc_feature (1)..(1): n is a, c, g, or t
nctgcaggctagcccctgtctatagtcttccaaagtatattgaatgatgaacattttcaaattacatggtctgcagttcttggttccactacatttacacctgctttcaaactcagtgaactgcatttgatgaggctgcatttggtccaaaatctttctttgggtaaataattgaaattgctctatcaaatctgtttcacttaggcagtctatagtcacatcattctgtcagccactgagaaatacctgtactgccccagacacttagcacttgtgttgaaatgccatttaatctctcttctagagcgaggatgacattcaacccaactgttcagtgacagttcaggatgacaggttccatgatgaaaaactgaatattctaatggctgaaatctctgggtattatgagtaagaatacagacatgaggatgttgcataagaagaaatatcaaatgctggtgtccaatttcaaaaaccagtgtctataaagcttaaagcgaagactaccacctgcccaggcagttacagctctcaactatttggctctctcttcctccaacaaagatggaatgaatcttcagagggttaaagagttgtgtaaacagatactaagtacacgtctttcaactaaatttttatatatttttactcatctacttataaaatgattgatgcatttctctagtcaggcacagagctataatggccagcttgtctttttgtctttattctatactggaagtagatctccctctaggctttcttcagaagtatacatttacccaaaatgaaaaaataatgttaccagttcactaggggaagtaataacagtgaggacatgctgaagcacaggacagaatgtttgttttgttaaggtggatgtcagggtgcatatgaagaaaagtagaccatgaccttaggtgagtacaaagtaaatgaatgaaaaatgggtggaagttgtccaatctttctttagaatgcacctaccatcaatgctaagaacatctcagcagagcctctggtgaaaatgtgagccgcaggtagaaattatttctcttcagttttcatttagataagggcctctgagaggtagtattatctttagtcatgataaaagcatggagtctagaaaagcctagagacatggcttctagacacggcacaagagaaga

SEQ ID NO: 46934 - DNA, 698 bp, Bovine  19866881934138
  misc_feature (1)..(1): n is a, c, g, or t
ncgctttaattgttggcatatgaaagtctctaggacttacagaaactcattaatttctatctagctttcacaattggctcagctctgtacacgcagcagccgtatttgcagcatctaaaacttctatttcgcagatccaattatacttaattagattcatgaaaagaaaaaattcaattctcatttgtattccatatgtaaactgaattactattcattatacatattttactaaattttagttaaaaatactcatgggaatgtatattgttacaaaattggtactttaaaaaatgatactatgatacagtttatatagtattattttttccacagatgccatagaatatggaatatgaggtgcttttattgatgcaataaaaagcaaactttttaaatggagagaaggggattcatttgaattttatttgcaaaatgtattttagtgagttttcacaaaataaatttctatgaactacccactatgatattacacatgtgcttagtcactcagtcatgtccagctctttgtgacccccatggattacagcttgccaggttcttctgtccatgggattttactccagatgaattctggtcattaattttttaaaaaaatgctatacaaatcagaggtatatttgttttttaatttttggttctctgtgctagtgctaagtcgcttcagttgtgtctga

SEQ ID NO: 46935 - DNA, 1356 bp, Bovine  19866880356014
  misc_feature (1)..(1): n is a, c, g, or t
ncatacttaaaatgtggcatttctaaatatggtttatgaagatgtgattagttaggataagttcacaaaagtgggcctaaatccaatatgtctactgtcataaaatggggaaattaggacaaagaaacatgtatactgagaggaaaccatgtgaagatgaagacaacattcagttgatgcttatatagtgtcaccaagaaatgcgaatatatgccatttggctttaaggaccagaagctacctaaggactgcagcactccaggataacaggtccttcactgtctcctggagtttgctcagatttatgttcaatgagtcaatgatgctatcaaaccatttcatcctctgttgcctttttctcctcctgctttcaatctttcccagcatcagggtcttttccaaagagttggctcttaatatcaggtgaccaaagcattggagcttcagcaccagtcgttccaatgaatattcagggttgatttcctttaggaatgactgatttgatctcctttcagtccaaggacacccaatagtttagttctgcgtatttgtgaaatctcttcttttttttttctttttcttttgtacatcaaattatatttcatgttacctgattatataaaaatgtaaagtgaaaatgattttcaattctctttaacattactagtaaatagttcagcaggaaatatgaggcacaaaatcttagtaaaatgtgacacaggaaaagcaataatgtaattctcacttaaatttaacttgtcataatctgttgtgaatatacaaagacaaacttttaaaacgttatatttactaagattctggcaagagttttatgtaacaagacacagcataccaggcctgccactcaacttattaatggtaagtctcagcttcaatatgaagctgttaaaaaaaaaaaaatcaaaaacctgctttttacatgctaaatagcttggcaagtatgctgttaaacacagtaaggaatttaagatagcaagaataagaagttaataaaaagctaaacattacagcctaaacaaaattcatacaaaaaataaaagaactatcactggttacataaaattttcctgactggtgaaaacttaacagtataaaacatgcattttagaatctttagctatcaagttcaaaaagtaccagtgtctatctgaaatgatttcttttcaaagccaaagtgtagtcaaaattagttcaaatgttataacacattctaatgctaaaaaacattcagtattatcgaagtggaggtaaatcccagagcttttggggcattctcatgctgcaaaaggctatttctctggttcactcaaagtagcatgggacagagtccaagga

SEQ ID NO: 46936 - DNA, 2057 bp, Bovine  19866880359869
  misc_feature (1)..(1): n is a, c, g, or t
ncacaggggaggtgatttttgagtcaagtcttgaagaataagcaggagtttgcccggcagacaaaagagaaaggttttgtctaggtaccataccataccacacagcagagcatgtgtacaaaaaagtgaaaagtatgtgggttggtgagcggggtgtcttgggagaacatgatcaaactgcttctttgtttttgggtttcgttgttttgtttttctctctaaagatcactctaatgcaatgtgatgaatgaattgataagaagctttggcatacattaagaaatttctggcagagagaccagtgtggaggctgttttaggagagatatatgatgagaggctgagggaaggcaagaaaaaaaggagatagaaactgtaaatgtagatacagagaaaactagggaaaacacatcacatgccgaagtctgatatgaaaagtaggagtgcagtgctcagtcgtgtccagctctttgcaagctcatagactgtcgcccgccaggcccctctgtccatgggatttcccgggcaagaatactgaagcgggttgccatgtcttgctccaggggatcttcccaacccagggaagggatccacatctcctgcattgacaggcgagccacctggaaagcccctggtatgaaacttaacttatgagaaaaaaaataaaaaggaatactcctttaaattgaaaactatccgtggtcataattctcttcgtagtatactgttgtcgataataatgtagtacacacgcttaatgacgtagcagccaatatcagtgtagtcattgccattgttattggcaatggtataaatatgtacggtagtttctctggatgtgatgagcatttccattcaaagtggactagaccatgccgtggaggacctgcataagacatctcactagtaattgtgtgaatcagaagttttctaatggtttaatgtatctcccaattgtcatttagatgaatctatcataaaatgactttttttttttttttttttttaatttacaaacagagccttttactgaaactttgtcttttcatcaggacttaagtgatacctgctttagcttattgggccttaaagacccagtacatagttatattgtatctaattagtcacctgtctttctgtttcaccttttccattcccataatccagtttttgctgaagttggcaaattacatacttcacatgtggtcatgatatgactaaaccctaatgagggttatgttatgtaaacagccacaaaatgcccataatttactcttttcattagacaacaagcaccttgaggggaaaaaccaggcatcacacatattatgctcatggaacagtaattggtaccgatatgcttttaagatgtttatgtccattataaaagtaatacatcctcattacgggcaaatttgtgtggtctcgttttatctccctctccattctcttggtccagcttgttcatccactaaaaaaaaaaaaaaaaaatggtaccatggatttattttgcagtttccaatgccagaaagtcaaagaagaatgaagctaataaataaggggtaaaatgttttttcagccttttgttagctagttctcctctttggacgctcagcttcagccttcttccttcactactcctgtggaatagcaggtttagaagttagatattggatgtcattccaccaagagtctgtcaagtttgagaattattttcaaactttaaataaaaatttcagcaccacatgcccccgcttcctccaaatactatacacttgaaaatggccgtttctcttagaaagaccagtgtcatttccttgaggctcgatggtaagtcagaagaatttgagcagatagcagaactttggaatgtaagcactgtatgccccactgttctttcttatattgcattggtttatcatgtgtgtgttttctatatctcaccaggtattggtgaataaatagttcacaccctcccaagagaataaggtctttcttttctctaaacagtgactccattgatcccgtttcagaatttcttcccttggttcattcttc

SEQ ID NO: 46937 - DNA, 2045 bp, Bovine  19866880381088
  misc_feature (1)..(1): n is a, c, g, or t
ntttgacttttactttctgcattggagaaggaaatggcaacccactccaatgttcttgcctggagaatcccagggacaggggagcctggtgggctgctgtctatggggtcgcacagagttggacacgactgaagcgacttagcagcagcagcaggaagctcaatatcaaaaaaacaaacaattcaattgaaaaatgggcagaagatctaaacagacatttctccaaagaagatatatagatggccaaaaagcacatgaaaagatgctcaacatcactaattattagagaaatgaaaatcaaaactacaatgagggatcagctcacactagtcagaatggccatcaccaaaaagtctccaaacaataaatgctagagaggatgtggagaagaagggaaagaggggagagatgggagagagaaaagggagccctcatacactgttagtgggaatgtaaattggtataaccactatgcagaatagtttgggaggtcccttaaaaaactaaatatagaactatcatatgatccagcaatcccactcttgagcatatatcaagagaaaaccatacttcaaaaagatacacatgcaccccaatgttcatagcagtactatttacaatatccaagacccagaagcaacctaaatgtccattgacagatgaacagataaggaagctgtggtatacgtatacaatggaatattactcagccataaaaaggaggcaataatgccattttcagcaacagggatgaacctagagattgtcatactgagtaaagtcagacaaattatcaaatgatattgcttatatgcagactctaaaacaatggtacaaatgaaattattcacaaaacagaaatagagtcactattgtagaaaacaatctatggttaccagaggggaaaggagggggaggaatcagttgggagatagggattgacacaaacacactactatatataaagtagataactaataaggacctatttatagcacagggaacgctactcaatactctgtaatgaactatatgggaaagaatctaagaaagagtagatatgtgtatatgtatatacacgttactgcacaccttaaatgaacacaacattgaacacaaattaactatattccaataaaaaattctaaaaactgtaaagtcatgcttaatgaacagcaaacaaaatctgtcacactgttagctacacaaaaacacagaatccacacacataagtagtaaatctatttggctaatttaaagtgtaaccaggtaggggtgtgtgtgtgtgtgtgcgtgcgtgcatgcatacgctcaatcgtgtccgaatcttttgcaaccccacagattgtagcctgcccggcttctccatccatggaagtttccaggcaagaatactgaagtgggttactcctccttactccaggggatcttccccacccagggattgaacctgtgtctcctgcactggcaggtgggttctttaccactgtgccatctgggaagccccgtaaccaggcatagtaggtgagaaagagtgtctgtcgactgctaggacatttgcaataaagaccaagaatggaataaaaactctctttcgtgaggggagagttttttattttttactaaagtaaaacttttcttcctgatatcatgattctgccctttttccacccaactgacagcaaaaattgcagttttaacacagtgggagatggcagcctggaaatcaaatggtagggtgtctttgtaattgcttgacaaatattgagataaaagccctttgctcattcagagatggagtatttaaaatatttgagggccaaaatgagtacacaggccatttgctgataagctccaatttcagaggaattcaagcttttgagaaatcccatccccgtagcttttgagtattcttttgggttgccggtttgttttcatttgtaattgcacattaaaactccactctgtttcacttagcagctgacagctgagaccacagatgacagaagatagatgatgagggagagttggggaaaatccttcta

SEQ ID NO: 46938 - DNA, 1318 bp, Bovine  19866880447325
  misc_feature (1)..(1): n is a, c, g, or t
nctgttagataatagatatgggagttgcaaaatggtagaagtttattttcctaggcagatagagtccttcacatacgaattttggttagttctgttttgtatttcaagaagctggtttaaacttaataatattaatctaaaagcttcagaaattagcagtttttctcagaatttcttcatatcttttgaacagtttattaacattctacttgttgaacgtatcagccatcatagaaaaaaaagaaagtgagactaacacacaaagagtttgtttttctcttgtgcaaagaagtttggaggagctcacagtggttagaccacgtaagcacgacgcaggccccttcgatcgttctctctgtcacctttagcctttgtctcctcctctcagatgcagggtgcttacggtggtgatagacgtcacatctgcatcctttcagcagaaggaaaggcatcttcttcttgcagggtttctccaccgttcagttcaggagagaaggcctcctcttgggttgctgatggtaattcgttggccagagtgcagccacacacatgcacacacagctccaagctgggaacagaggatcccgctccctgactacagagtttgcttcacaggaagcaggagagaatagggttggaatggttatcaagtgagctgaattatgctctgtgtatcactgggcatagaaaacaggagcatttaaaactttgccatttgtatgagtttttcttcaggccacaccatactcattgtatactgtaatgtcaagtcccaaacctgtgcctgtgaccatcgttttactggcaagataaggtattaaaataagaatgttaagttcaggtagtagaatatcgccactgtttgtttcctttcctctggcagtctgaagacgtaagtgaagaagacataaaaaactgtgttctactcatggctgcagcagtctgccactaccgcagttcctctcatagtatcagaggaggagtacattaaactggaaatgaaagatggtaagtatattttatttgttattttcatatttttcctattaaagaagtcggacaatttttcattgtttttccatcttgtgataggtatgaacaggaaacctaataatgataattaaacagtagattttatgtatcaaagaatccttttatttaaatgtaaataaatttaaattttaaattatttcatctcagcttcagtactaactacatttattactttctttttaataggggtgaaggagttttctctgaatatagttcattcttgggaaaaggaaaaagaagaaaatatttttctattagtaccaat

SEQ ID NO: 46939 - DNA, 756 bp, Bovine  19866880466184
  misc_feature (1)..(1): n is a, c, g, or t
nctgcctcggtaaatgttacaggaaagagttaaatattcactactgtaaacccggaagatacgactaaaacacataccccgttttcagggagctccaacagttgaccaaagaggccgcgagagtatctgctacctgagtaccggcgttcctcacactcatctccagcaaatgggtgtgaccgcagcctttcaagactttatttacattaactaggcgtgtgaagctacagctcacataaagctaccgacgacaacgaatgaaaccaaaatcactttaccttcacagcgcgaggccgtcggccctcccgatacttggctctcgagtcacacacagccctttggacgtggtgatccaatacgcccccaatttgccctccactcgacgccatcttgccggctttggccctcgcagagacgacaacatccgcctgttgcccttctgattatccaatcagagagagggatgggtcaaggcgcgccgagattggctgaaggagcgacagggttggccatcgtttcctgtgagcaagtaggcggcgagcgagctgccgccctccagcggcgcggcggagaggcccggcgagccggagtggacttgcttgacgctcccgctaccgaggcgcgacgggcgcgaggggcgggacctgggggcggagccgatcaagcgtatctggcccgcacgccctcggttccgcagttagcccggtccgctggggtgggcctccggcggggccctggcttgcggaggatgtgggg

SEQ ID NO: 46940 - DNA, 2853 bp, Bovine  19866880485764
  misc_feature (1)..(1): n is a, c, g, or t
nccttttttctgtatatctttcctattaaaggacatatgtaagcatatgaaagcaccttcctctctgtagaagtaaaagataacaactaaataggaaacatgggaagactgttttgataattatatggattacaaaaattcacttggggatttttttttatatgaaactgataagactcccaaaatttccatatttaaaatcactccacaagaattagaaaaaatcccaattgcttacatcatctccttacgcctctggtgttttcctcttccggtgcccacatgggtagcaattgcatgcgagcatgagtgccaggtcacttcagtcatatccaactcttcgtgaccccttgggctgtatagtccaccagactcctctgaccatgggattctctgggcaagaatactaggggtgggttgccacactctcctccgggggtcttcccgacctagggatcgactctgagtctcttacatcttctcctttgtcaggcaggtcctttgcgcctcctcggaagcctgtgggtagcgcttagtaaacacgaaagaaaccttgtggattcagaaagtctttgataacccgagggtagaaagttaatggagttgtgacattcagtcagcagatcctgatcgctttccacgtgccaagcactgtcggtgaatccgagggaccgtggggagcagaagtggacgaggtcttgctctcatggagctcaaaatggggaggcagatcttaatcagttagtcatgccaagaagtgtagagttagaaacagagaaaagtgcaacaagggagaagggcagaatgctgcaaagcccttgggtcagggaagccctccccgctcacgccctccaggatgggagatgctgagaggccgccagcatcctccctgggtgcaggccccatggaggtgcccgtcctgcactctgtgctcattttgtccgtttctgtttgggatagctcactcgacagctggcaccacgaagccggcaaagggaagccagacccaagatcagagaacaatgtcatcttttacaggagaaaataaattgtttatgcttgtttcctctccgtgcgtgttgtatttactatggagacctggcagggtctgtgcctcctcgggcagccgagttgctcccacagaagcctgcaaagcctgccagtgcatactgagtaaatcagggcaaaggcgtgaaccgagtataatggaaaaaacccaaagcctgtcgccagggcacctcggcgaaagggcaggacgcacctcgccaggctcccgtggctcccgccccgttcgacctccgctcgccgagagacagccaggtctgttgtgaacgcctccagtcgccagtgcgtgtttcccagctcacaatggagcgcttgtgccgccttcgttttcactttcaccagcgagggaagcggagcacaatggggcagtgcccacggcttgggaacaggacacgtttttccttagggttcccagggctggggacgtggaaaaggccagagccaagacaaacacgcgaagctggccagatcctccgttacgctttctcagtggcaatcaaacacatttccagttaccatctgatgggtagtctctgcctgtggggtaaaggcagatgctgttgaccacggtgagcaccttccctgaagaaagagcctgtattcctcaccgtacaggatgccgccgtggcgtgcctgcgggtgcctatcgcatcgcaccaactcttcttgctcagtccatcaaatgactgctttccttgtttgtaaaagatagacgttcatttgattgcagctccttcgtaagcgatcactgctgaaaattagttctggacaaaaacagtttaactgtaatgccactgcctggaaagctgttttgcttcctccatacatctgttcggccccctcatcaaggtatgatatagacagggtctgcttgtcacctggttatctacattcatcctgcccgtgtctaccctgtggtgaggccattcaggcctcagaagtaagttgaatgatggcttaaaggtgagtcactcagtcgagtctgactctgtgacctcatggactgtagcccgccaggctcccctatccatggagttctccagacaggaatactggaatgggttgcccttcccttttctggaggatcttcccgacccaaggatcaaagcctggtcttctgcattacaggcagattttttactgtctgagccacaggggatgcccaaatctcagaagctcgaggccaggtttgagtgtaaagaccaaccattgttttaacgttttggagtccaagtgctttagagaggttttgcaaacagagggtttcttagggatccagaagctggaaacatttcgttgcctcttccatttaatattcgtatgggaatgattactccatcgcccctaaattcccttaactcaagtgtcctgtcatgtcccttcagcagagtatgagacgcggtccttagaattgagtagaaacaatgtctctataacttggattttcacatcctctctaattcttaggatatgtcacttctggtgttttgcagataccgctgcttgctcccttgtaaggcggggaaagataggaatatcttcagtttgcttgggcttggctcgtctcctagtacaagttcctgagttgagaagtgtcactgaaattctgttacgttgaacactgccgtttttattcactcgcctgcggtgttgcactattttagagtttcctacagtgccctcttggcccatggtagtcacttgataaacacgtgatgaatgaatgaaacaaatcctcatgattctccattgtctaaagaattaattccaactcggtagcatggcacg

SEQ ID NO: 46941 - DNA, 2586 bp, Bovine  19866880501869
  misc_feature (1)..(1): n is a, c, g, or t
nttaccattgctacatcatttaagacctcttagaatgctaacagaggtccctgtacaagtcatccagtctaaatgtcctctatgacggataagaaagctgagaaaaagtcagcacccaccgtagtttcttcatcagcaaactggatgcattagtcaggttccagcaggaaatagatggcagactcaaaataagacaattcaaggaaggtttgtttacagagagaagattgacaaagaagtgggtttaggggaagcccagtggatggtatgaacgtgagtctcacttgcatcaagctgttaccattcattcccaggcttgaagggtgatggggagcagttaactggagttgggtggagtgggctgcctgggaaggacattgactttgtggtgacagccctgccagctctgcaccaccttgctgggaggaaatcaaggggttaaaaactcagcttcactgttctccttctctctgaactcctgccttggcttcccattggccaaacccaataagaggctgaaggcaaatggtcgacacaagtccacctcccaagaatggggcccctgtgcagagaggcaaagggaagctggcccagcacgatgtacttaccgtgcttcagtgctctttaagcacgtagccatagattaaggatgactcagagaatatctgctaaggttttcgggatcttggtgaaagggtacatgaattaaagactgcaaaatctaatattaagtaagaatgctttactctgacatgtattttgagtcagagttggccttggctctactttatcttatactgtactgaactgtttcacaaaattgtgaatagagatcaaagcagtttaaacagatacatccacttgtgtaaatatccttgaactccccttgtctttggctccccctcctattgccaaatccatccagcacctctagaggctgttaatacatgcagtgattgtaataaacatcatatttgcttgggttccagctggctgcaaccaccaaactctgtccatagttcctattgttatctttgcttagtagacaacgtcattgttacccttagaagccacctttgtcttagatttctaaatgttgatctttatacattgtactgattgtttacacagcatgtcttttaactgaccattatgttttgtttttaagggtatgtagaattattaaactgagagaatatgtgggtagaaattaattgattatattgttgaaagttttctatgttacttcatgcattaaaaccttgaacaaaacggatttttttaatgttttgtcattctttataaaactttctattaaaaattagtaaatctgctttcctgtgacttaaactggttttaagtgaggcagtcttccatcagaaatttttagaggtacagaactgtagtagttccttaggaaacagaatttatactttaatgtcagggaaatttgttacaatttgttctcagaagcttggaagttatgtatttgaaatcctatgaaattacagaagttgtcatcatttcagatattttaaaattacagtgacttaaagtgaggattgggagaaggcactggcaacccacgccagtactcttgcctggaaactcccatggacagaggagcctggtgggctgcagtccatggggtcgctaggaatcagacacgactgagcgacttcactttcacttttcaccttcatgcattggagaaggaaatggcaacccactccagtgttcttgcctggagaatcccagggacgggggagcctggtgggctgccgtctatggggttgcacagagtcggacatgactgacatgacttagcagcagcagtgaggattgaaggactatgggtcagaaaatggaatggccacatgtattcgcaaattaaaactagggaagcttacttgatacatgagctaatgttacataaatagggaataattgttagatttatatctattgcaaaaggcagtcatttattattttaaatgtaagttctgaataacatcagagaaggcgatggcaccccactccggtactcttgcctggaaaatcccatgatggaggagcctggtaggctgcagtccatggggtcgcgaagagttggacgtgactgagcgactttcctttcacttttcactttcatgcattggagaaggaaatggcaactcactccagtgttcttgactggagaagcccagggacgggggagcctggtgggctgccgtctatggagtcacacagagtcggacacaactgaagtggcttagcagtagctggacagcattagggttattttcctggagaatcaactagaaatgtatagttcatactttttgacattcatgcatttgaattttataaggattaaccaaaaagatagctctttagataaatgttgatggttcaaaaagactataaacataaacccagtgaatgaatctaattcctctcaccttgttacaatgatttaaacatagcccaattaaaaatctctaagacataatagagagttttttaaatcttaactttcactgaagttatcaaatgggaatttggtgaatacatttgtaccatgca

SEQ ID NO: 46942 - DNA, 1491 bp, Bovine  19866880534440
  misc_feature (1)..(1): n is a, c, g, or t
ngggaagatcccctgaggagaaaatggcaacccagtccagtagtcttgcctggagaattccaggaacagaggaacctggcgggctacagtcggtggagtggcaaagagtcactgagcatctgagcagcagacagtctctaggctctaatgagctatccctcatggcaggagataagttagttttgtcaccaagccctaggtagatcctgccgcccccgtgctctcagtcagctctgatggaaatttaaatcatcacctcaggagtttattggaaacactcctcacctggtgagtttataggagtgcttccttatagtaactaatttgctcctagaatgtgggtgctgtatgaggtttaacggtcttcatctttgttttaaattttaagcctttgataagtatttgcaagaattaattcatggatatctttttgaaacttaaactcccttagccttggaacaaactgttgtttctgtctagcctgtgtcagaagactaggccaactcttctccctaattataaaagtactacatgttatgtagaaaatttgggaagcatggaaaactataaacaagagaataaaaggtacccataactcccaaacctagagataacaaacgttaacagtttggatcaaatcttccagttttgtttcaaatctttgttttatttcagatctctatttttaacagaaatcaaggcctgcacacactggtagttttgtatactgatgttttcttacagtcttatgagtgttttattttattaaaaggtaattgtcatttttttttttttaaagttgctcagttgtgtccaactctttgccaccccatggattatggagtccatggaattctccaggccagaatactggagtggggtagcccatcccttctccaggggatcttcccaacccagggatcaaacccaggtctcctgcattgcaggcggattctttaccagctgaaccaccagggacattgataaattttaggttgattagtgttctgtcataagtttgccataatttaattgttcactggttgaacgtttatattgtattcaatttttagacattaaaaatgatactataattatattttaagaaaaagttaaaagtaacatatctttgtgtaatatataataaaacattgttttattttctggttaaaataggctttcagaaattattgagttagaaagcataatttttaaattgtttatttatttttggctgtgctgggacttcattgctgcccgtgggctttctctagttgtggcgtgcaagggctactctgtgtggttcaaggacttggcatctaggtggcttctctcctctcctgtggagcacaggctccggggcgcgtgggcctagctgccccatagcacctgggtctacccagaccagggagggagcccgtgtcccctgcattggcaggtggattcttaactactggaccaccagggaagcccccatgagtaattattaag

SEQ ID NO: 46943 - DNA, 3355 bp, Bovine  19866880534695
  misc_feature (1)..(1): n is a, c, g, or t
ntgcaaagtttgatcacggtgatgaaactgtgttgctatctgaggacatactgagatcagttggtgtggaatattctagaaaagctgagcaggaagcatgtctgaccctctggggagaggtcccatctgccagtatgactttggatgctcagaatataactgttggagccaggaataagtgaattgaggaggtgaaggcagaatttagaatttaagattcttctgagacacatgactggaaacacacacaaatgctgcatgtttgtggtcactgttgtggacagcaaaagggagcttgccagagacccagagaaggtggtgctgaaagctcaggtggaattggagaccaggacaggtgaccgttcccagtcttaatcgtagaagtcgggatgggcaggtgtttactaaggtgaggccttggaggatcagtggaagataatttttgtggttcctggaaagagaatgatccagaaggctaactgggaattttaggtgggccaggaaaaaaatttaaagactagaggggtatgttcaagactggcatcctcacagtgagggagggagaggatgggatgaattgagagcgcagcactgacgtgtgtgcgctgccttgggtaaagtgtgggaagttggggagttgctgtatagcccagggagctcggcatagcattctctgatgacttagaggggtggggcaggctgggggtgggggcatgagattcaagaggcaggggacatgtacatacttagagctgattcacttggttgtggctcagtggtagagaatctgcctgccaagcaggagattcgggttcaatctatgggtcagaaagatcccctggagaaggaaatggcaaaacacttgggtattcttgcctgaagaattgcacggacagagaagcctggtgggctgcagtccatggggtcacaagggttggacacgactgagcggctaaatcaccaccttgcgttgtacagccgaaaccagcacaacagtgtaaaacaattatcctccaattactttttttttttcctaaaaataataataaaaaaataaaagaccatgatcctgcatttaggggagaggcatccttaaaccagaacaacacttgctgtataaaatttacctgtgcttagtacctggctgctcccaagactaagcttcctagccttggtgccacccatctttccctagacaattcctattgcattggctactttaacactaacttgctgaattctttgtacagtaagatagtcgttagattctgggtgttttgtttacttttgccttggcgaatgctcttctgttccctctagcctaaagatcccctgttttctcttggcctccctgcttttcgtgtctagatatgaccacccagagtctcttcttcctgtccgtggacgaacttactagccaggagcgtttgttcctccttcccctggagatgcatttgccgcctctctcctaacaggctgccagcttaaaaactcagtccttaaaacaacacgaactagcaactgctgaagcgccgcctcttctgagcccccttaaacagctgtgcacgcggcttgacccagaacagataacacacacagatgtgtttatgggaaggaggcacgaacactctcagggtgttgttttcggcttctcaccactgcagggatttcttctctttttcaaggaagaggtacattgtggtaagcagtgttttatgacctataataaaaacccttgtaaagaccattttttggacccagagaagctaagtgttcttttcactcctctccgcctctctgtattgaaatgcacgcagttcagcattaatgcataacataagggaacaatatcacaaattctcattcttatttaagctgggaaagcaaccaaagttaattatgtaagaaaatccattaggaatgtgtttccctacttagtagtagcttctgaacaaatatgttgattgagtaaaaagctatattgcattttatagcatattgttattatctcatggaaacacccttttgagagaatgtcaacagaaaacagtccccgggaacaggctaaaaagcaacctgaagccaccttagaaagttgggtcttatacaaaaaagggacatgcaaaacattcagtgaacagtaacagatgatttctgaggacgcttcaggacctaaaatgctagcaatctttagtctttcaaaattaagaacaggcaacataacacttgatgtaaataaagtaataactgctttcaagatgcatcctctaggatgcacgtggtagtgtttgttgaccttggtggctgagtggtaaagagaccgcctgccaatgcaggagacacaagagacgtggctttgagccctggattgggaggatcccctggagaaggaaatgataactccctccagtattcttgcctgggacatcccataggcagaggagcccagcgggctgcaggctccagagtcgaacacacctgagcaactgagcgccaccaccagaatggctgtttggaaagttggagattgttcatgtcccagctggagaaactagatgagtctaaacctagggtgttgctggacaccactgctaatggcaggtcctctcttgattccatggcaccagttctgaacccagtggacaagccaggaaattcagtgtttttcgttctcacagccgccctcaagagagtgttatccccattttacagatgaggaaaccaaggctggatgcgagggaagggaaggtaggcgttaagtagcaggcccaagtacacccattgtctaactgggagatgtagcagagtcctcagaagatggccctgtaaagttgacctctggaaataagcattaacagattgcattcgtctcttggattgtctttcccctcttttcttctttagtgttctggttcagattcctgttatctcatgtcttacgtcttttttcccccttgtgttttgatttttccacatttaacagtgaatatgcgtgacacttctaatcagacacttagaatatctttcctttttgaagaacagtgaagaggaaggagggatcccatgtgaaatgccgaggcaggactcagttaggagtggaacttcttggttgtggcgagtcaagtgcttattggtgatcttgcaagagccgttgtgttcccattcaccgtttggatgtggtgtgggtggggaatgagaaagtgtgcaccctgaagaccggtggccaaggaaggaagggggttgctttggttgttcatggtcaagggacaagagaaggggaagtcccagatacagtaggaagggcaaggtagagtgagggcaggacttgaggaagcggaatgcaggcaattcagag

SEQ ID NO: 46944 - DNA, 811 bp, Bovine  19866880551134
  misc_feature (1)..(1): n is a, c, g, or t
naattgactggtttcatctcgcagttcaagggactccatttagagccagttcaacttgaaatcttgagaagttgacaaggtttacctagtagaatctaaactaggtttacctagtttgaagtgtccaaaaccagaagaatcattgttaacctacttgagcagccatttataatagcttgaaggtatcacttatatacaaattagggaaatggtaaaattctcaaaattagaaaataccttggaatgtcgtctagacattggacattacgtttaaggatgtgagttaaaaaaaaaagatgagtaatgtgctgacagtcatgcaatttggactagtcctagaactgtatcccaagccctggtattctggtccagggggctttccaaaaaccatataactgtggttttgttcttatttctaattattcactattttaaagacctatacttaaaacattttgttgttggtttggataagttactgtacttacttgcacattcctctaaaagcagtgttagtttgaactttgcccttgtttttacttacctaaccccagaatcctggaatgctttctttgctagaactttcattcttaacattttattctctttaaatacagcctcattccacatgtattttttttttttttcctctacggagagttggaatttgtctacctatttcatttcagtcatgttcatgtgctgtcaaaatccttgtcccttattctattttcctggtagcttcttgcgcaactacttacatatttgtcaagtaaggatatatgtcaactaagctattcaatccaataaa

SEQ ID NO: 46945 - DNA, 2071 bp, Bovine  19866880571876
  misc_feature (1)..(1): n is a, c, g, or t
nttaaagaaattatcttcgttttcttcccctctcaggaatgcatgtaaaacagttcctgtctcgatgcatgcctaaggcaaaaagttcagtgctcaattacctgctgtctgcagtctcgtattttgcagtgagccagtgaaacagcattttaatcagacgtcttgacccatgctcttctgttttcctttgcagccttgcaagctatttggcatatgaaggtcctgacctgagaaaaccatcttggataaccgtggcaaggagaaggaaaaatgcaacagctaggagatttcggtaaacagtagaatcatgccaacctaatctgtgttaaaatgcttggaatgtgggagccgctgatgatgcctgttgtctgtgtgtctgactgaatcctttcttttctcagagcagcaaagcaaagcctgggaaccaggccaaatgcctgccacttaccttaaattgatcagctactttgagattaaaacccctgagagctgccacaccgtgaaaacaaggcctccttcacattaaaggcaaattgcgactttgggtttgctgtgatctttttttccattttatccagtttttcacagtgcgcactttttttttttttcctttccatttatgctccaatgtagaagccaatagttacagcatcttggccaagcattcattaaggtttataagaacaaaatttatggttatttagcagttggcacaaagacagacttgctgaagaaagaaaaaggaatacaggtgggaaatataagccccaacaaaggcccatactaaactgcagggctgtagtgtgcgagctgctcagaactggtctgggagaaaaattatatcatattcaaaagcagtcacttctctattctgaatccatcccattttatggctctgtggatgactgaagcaagtctgcagatcattccaagagatctttctgtcttgtgtaactgctaccatttacaggagctggcagttgtagagataaatagattcgtgttaatctgggtgataatctgtcagtttggttaatagatgaggtacatataaaaatatgtatgttatggatcagaagaagggctctcccatgaagaggagagtcatgttagccttgtgagtagaccttacataatggcaaggcctatgttcccaaaaatgtagggtgtgggcaaaacacacccttaatctttgaattcaggcagtaatgtggaattctggcaccatctggaagtctatattcttcctcaggaaacactgttaatgaatcttgggttttgtgtggtgtgtgtgtgtgtgtgtgtgtgtttaatattctctgatttcttgaccgagggggataagaaagcatcgtcttctgtcatttgcactacttgtaaaacaaatattttacgaatatatttcagttttttacttgttgtttagggagtatctgggagtacttgcatgcattgaaaaatatacagcttcagtgtttcatgatgtagactgtttccaaaatatcatttgttttagctatgccagtaacttgctgtatgacttagggaaagttaatttaaatgtctgttgctgctgctgctgctaagtcgcttcagtcgtgtccgactctgtgcgaccccatagaccgcagcccaccaggctcccctgcccctgggattctccaggcaagaacactggaatgggttgccatttccttctccaatgcatgaaagtgaaaagtgaaagtgaaagtgaagtcgtgtccaactcttcgcaaccccatggactcagcgcaccaggctctttcacccatgggattttccaggcaagagtgctggagtggggtgccattgccttctccaatctcctattatcaaatgggaacattaatactgttacagggtccaagcttaccatacaaccgggcaatgaatcagagacaggtgttgaggcaaggaataggacttcattaagagagctggcaggcccagaagatggcaaactaatgtctcaaaataactgtcttgtcagggttggatgtcagggttatcttatggattggagatgggggaaaggtgaggaaacaatgta

SEQ ID NO: 46946 - DNA, 680 bp, Bovine  19866880600120
  misc_feature (1)..(1): n is a, c, g, or t
nttggaagacagtaaaaataagcagaaatagagtataaaagtaagcttaaagcactaagtgaagagcttcatcatttgcgaagaataaacccaagtatagtgaaaatgaaaagttcagtctttgacgatgacaagacttttacagcagaaccactggaaattggtgaggttgtcgagaaagatacaacagaacttatggaaaaacttgaggtaaccaagcgagaaaagttagagctgtcagagagactgtctgatctttctgagcaattaaaacagaaatgtgacaagataagttttctaacggaagaagttaaatctttaaagcaagataaagagcaagttttattgagatgtagagagttagaaatcataattgaccacagtaggacagaaaatgtaaatgtgcatgatgtccatttaagctctttgaaagatggagtttcagcaagcagggatcctggagggtcagttcctaaaataaataaagattttggtaaagaatcaaaaataatggaggtaaataaaattccttttgaaaatatgactctggaaaaagaaagcaaacaagaacagttttctgctcacttgccgtcggtgacaaatgaatcatcacttgggattactgatccaggtgaaaacgataaacttcagcaggagctcagtgcacttaaatcagaaca

SEQ ID NO: 46947 - DNA, 1190 bp, Bovine  19866880636998
  misc_feature (1)..(1): n is a, c, g, or t
nccttgactagatggacctttgttggcaaagtaatgtctctgcttttgaatatgctatctaggttggtcataactttccttccaaggagtaagcgtcttttaatttaagaaaagatatcaaactctaaatattttctaatctaaggtcaataatttggtattaaagttcaaattcatgggttctagcatcaaacagagacggagtctaatctcatttctgccagttcctagctatataacccagggcaaccactctgcatctaaatttccttatctgtaaaatgggtataataacagcattccattcacagcactgctgggagaattgaatatctgaaaattttgacaaggtggttggcacacttcaagcacacagtaaatgtaaactatcaccactgtacacatttttaaataaataataacggtatcaaaaatactacttaaaggcatgactcagagtataaagtctctttaaaaactgtcagaaaggtgactaggctattccaacttgtcccgtactgaccagcagaagaggtgtcctttcccacagtccacagcaggagctctgagcaaggggaagctgagcgtatcagacccagaggtgtctgatccttgttttgtcagtctgactgctctttcacagcctggagtaggacaccatttaatggcaggattattttcaacaaaggcctgtttaaacagcaataacaaaacataaaaaaatattttaactctcaattctaatagagtgtaaatgtcaatttacttcagaatgaatgaaatgaaacagaatgaaatgaaaaaacaaagagtagtcagtttcaagaaatacttaaaacagtactggaatgtattaaataagaaggaaaaaaatgtggcaattaccttagtaataatttttaaaatttatgtattcttttttttttatttttaaactttacataattgtattagttttgccaaatatcaaaatgaataatctaagaatcaagtagattgatgacggagtaaaaatgcaactattcatactgaaatgtgtaatttaaaaatgttttctcacaatatgctacttttctgatggaaaataattagtaagtaaacagaattttatttgaggattagctgtattagaataatgaatttctacagggtactttaagtaatacataaaaatcaatattacaaacaca

SEQ ID NO: 46948 - DNA, 1420 bp, Bovine  19866880657349
  misc_feature (1)..(1): n is a, c, g, or t
nctggtgtacacattctgatgagagaggtgagaatgtatggctcgatccacaagcatggtaaaatctctagccacaaatccttcggtttctttagctatacgctgcagatcaagaccggtgaacctcttccatgtcacagtccagtttattttttattatagcatgcagaatttcacatctttgatcctaaggaaaaaaaacacgaaattcagatttataattttacttgagtgcaaacttttgtacacgtattttgaggaaaatccggttgccacaatctgcagggacagaaagcagactgtttgctgcaggcagactgggggaggggtgaccgcaaaggccaaggagacacctggagggacggacgcgtttgctgccttaattgtggggatgcttcatggtatatgcctatgttaaaaccgatcaaattgtacatttacttttgtatgttttggtcgcaacacgtggcttgcaggatctcaattccccaaccagtgactggacctgggccacagcagtgaaagagctgaatcctaatcgctattccaccaggaaactcccaaactgttcactttaaatagtgagtttgctgtcttcgatttttttataccttaataaagctgtaaaaagaattacattgataaatgatggctctttctttctccagtaaaaaggtttgtattttggctcctttaagagtattttgttgtcgttattcccataaaacataattctaaaagcatttagtggtcgataccgctatgttctgttatgtttaataataggtatatttttatccttttcttttccttcagctttgagatataattgacaaataaaattataagacatttaaagtgtacaatgtgatttttattttttaagtaaactttttatcttgtattggggtatagctgattaacaggacaatgttgtaatagtttcaagtaagcagtgaagggacacagccatacatacacgtggatccattctccccgaaactcccctcccatccaggctgccacacagcactgagcagggttccctgttctatacagtaggtccttgttggttatccattttaaatatagcagcgtgcacacgtccaccccaaacaccctaactacaataacagttaattagcataggggctgagtacttttagcgtagatgctaggtaagaattttaaacagaaagttaaaatacggttgcctgtctggaaacattcctggagtgcactgccactaaagccatcaggactgtaagcccccaaaaggagacgatgcattgtatgtgcttatacacatttggtctttgtcacgcttctggcacagacctcctaaaacccttaaaatgtcccaaatgataagagtgataaacgtgtcttgacattcctaagaaacccctttcagccacat

SEQ ID NO: 46949 - DNA, 1062 bp, Bovine  19866880670531
  misc_feature (1)..(1): n is a, c, g, or t
ntagaaatcactgaagagaaaaaaactattatattaaatgactgaaatgacataaaattacttaaaataggtgaaaggatattaacccccccacaaaatattaaaacactgaggaaggagaaatttaagctacgtataatatttctggaaattccactttttcatgtgactgaattcataaaggttatttacaagttgtgtggataacagacttttatagaggcaggtatcaatggcagcgtaagtatatgaatcatctcagtttcttttccacatcaccgaacaaccatggtcccaggactaagacaactttatttaagtaaaaaaaaaaaaaaatcccttcaacttcttagatggtgattaaagaactctgaagttttaaaaaagaaaaacaagaagcaaacgctcaaggtaataagtgctttcttgttaccagtgctcatatcccagggcactggctggagctaaaggacaaagagataagggcaatattgctagttactaacaaatggcagataaaagagctcttctgggttctgattaagtgacagcattctacacattcttttgacttgagaaagacaggctaagagcagcggctaagttccatgtgaagcaccgctaaataagcatatctgcatgcttccacattccagcaggatgggatctctttcctttccccgaacagaaacacgttctctgtgctcccagcaagaacgcgcctttgcttcagcttccattaaaaaaaaaaaagagcataagtgtatatgctgaaagcacagagaagttttgtgctgtgggacgtggtggccgggagccaatgtttacaatcccctgggtgggaaaggcagggtgaaaggctcaggacggcaggctttaaaagtctttgctgttgccgccggtgaccttcgcctccgttctcaaagcagctctcaggttaaccccttggatactgtgtgtgctggggccgcacaaaggaaatacctttctttggaggataccactctcaggcgcatcggtttctgattttggctgaggcagctcagaaacactgggctgaca

SEQ ID NO: 46950 - DNA, 1452 bp, Bovine  19866880761691
  misc_feature (1)..(1): n is a, c, g, or t
ncaggtgaaaatttcatatctaagtaaaacatgcactgaagggttgatttttaagtcttaagatcacttaacataaggcattacattttaataaagttataatcattaataaaattgataaataatttatataaaaggggacacatttcaatactcttcacaagtagtagttacctggtcaggaggttgaatatgctggacacactgaaatatgtgaattccttgagcagaaacaagtaaaggatgtagagaatgttgtgactggcttgtagcaatcagcgcaaccaaacttcccatggaaataaattctttcaccagatcgttcaaagctggaattaagcaacacagtgtaaaagcttattatataaaagtgaaattttaaaatcatacactaattaaaaataataacctaaacttggcctttaaagtagagtataaatgatatggctcctctttacctagactgaggaccgaggattggcaggttccagttactctattagaggcaaaggaagcaaggcaaatgctgtgtactcagaaccatgcctagtgaggttggttcttacgaggtaaacttctgaatcttaataggtacatgaaaaggagtctctgaaataagtattatagaaggatgataaactttcaaattgttgttctactgagcaagcaaaatacagcttatatacctatggctttctggacaatctctttctaccctagctcaagaaaggtttggtatgaggtaagaaatgaaacaggcattaataacatatatctgatcctgacctagaaattcaacacgagactagcaagtctttcagacactacaagattccaaatgtgaatttaacactaatttatggtaatccagccattatggttgcattctgtattcatctcttaagaaccctgatgcagatgaatgctgtcaaaccctccaagccctgatcccatcctctcctagaaccccaagctccactggaatttcttggacttctgcacctttgccggaggatcacacttccttcgtgccttcattagcctgaagctgctccgtgccaattgctactcctccatcaaaactcatcctagttatgaacagctctcagaaaccttccctgataacttcttacccaaccacctccagtttagtgtatgtgctcctatcgcaccctgcacacacttccagcagaacatacccacccatctcctagttgtgtcttcctgggcaaattacatcaccttgaatttccacttactcacctgtaaaaccaggagagcatctgcgtggggatacaaagcaacccttgcagtcagcacatggtagctaccataactatgagtcttctgtactaacactgtctgtttccttttatttcctctccaagactctgagactacagactgtgcacgagcaatagagaagtatttgtcaaatgagcaagagtaaag

SEQ ID NO: 46951 - DNA, 1843 bp, Bovine  19866880810385
  misc_feature (1)..(1): n is a, c, g, or t
nctagctgctagtcgtgtacctcaggattacagcaggcactgtcccttcactcatggagctcctaatctaatagggaaaaggggaaaaaaaaaccaaacatgtttccactgaacatgtctttcattcctttctacattctcaccatcactggaattgaacattattaagcaccacagtgaccacattacttcattgatgttccttagaagcagcaagcaatacagttggttatggttgatttcatggtttgcctgtgactgttgagaagacatgacagtgttttctaaagcatttcgtgaatgctgctggcataacccacatatgggttagaaatgctgagatggcatttctgattaacctgagcagccaacagtctttgataaaaggcctctgatttctaaagcagggcctgcttgaaagagcaaaactcttcaggaagtgagcagtctaagacatttgcttctggggactcttcctggtgacataacaggtcctttccctctagagctcttcctctgtgaatgagagcagagagaaacagcagaagaatggaggagaggaaagagagactaatgcaaaacagatcctgcggtatgtgagcgagaagtagaggagagagtgaggaaaggcggagcttaggagaaagaggaaaggagggctggggagtgaggggacgaggaaggaagggacaaagggagggcgggcggaaggaaggaaggaaggacgggaggagagaggaggggagggaaaagaccgagcttttgtggagcacaagtagcaagggctccaagggcgtggtggccgtacccgttggacacacagtactgtggagtcagtcccgggccgggtcccaggagcaaggacagtaaaacacttaagaagcgacagctgttttatcaggaggaatattagcaaaaattgtagctacttgcactttctttgtgccaatcctgtaagtgctttacatgaattatctcattagatcctcaggacaaccctagaggcagagagccttaacccggataaagaaactcagagcagttaagtaacttatccaaggagacaaagctgacaagtggcagagcttggatttgaaccaacatagctggccttcagcgcctctactctgaagcaccatgactgctgctcattggacttgcaagaacctgctgtaataagacggcagaaaggaagtgtggtggattgggatgtgaatctgaatcggggcatttctggttttcaaactgctcccctctctttatgtgaggagagacaaatattttaaacaaaacaaacacttgttacacacacatttcagtgtaagagataattacaattgaatatcctgattttatagtcttagtgattttagatataatttaacctatggtgcatgaatcaaattacccttaattggcacctttgtgaacaatcccagctgaagccccctaacagaatgttggttggtcgtgaaataacctaaatttaggaagactgcactaatgtatgtgggtttcccaggtggcgctattgctaaaggatctgcctgccagtgcaggagacacaggagtcacaggttccatccctgggtcgggaagatcccctggaggagggcatggcaacccactccagtgttcttgcctagagaatcccatggacagaggaacctggcgggttacagtccattggggttacaaagagtcagacacaactgaagtgtgtctaaggtatgtattatagatagttactcttaatgagtaaagttaatgaacccagcccaggactgactagttgtaagcctgggtaataggaagagagttcattttttcattcaacaaatat

SEQ ID NO: 46952 - DNA, 1919 bp, Bovine  19866880820824
  misc_feature (1)..(1): n is a, c, g, or t
natattgggatcgtcttctccaggaactcgagcctgaggcaaaagaaagtaaaattacttcaaaatttaaaaggaaaaatgattgaacccagtgaggtctgccactgttcttttaccaaacagatgattaatagtacctctatttatacagaagaactttttgacctactagaatcttattttaattttctccttgcccatgctaaagagaaaataaattacttaagtgtaaatctgaaatagaaaaatctttccctgtagtacagctctgaagcaaagattgtagaagggaagggagaaaaaggagagcaacagaagtaaaaataggaagccaggctcaagggagaaagagcaaaaggcaggggcgacgaagttgcccagaaaggctacctgaagagagtcctggttctcggagcgactggcgggtgtgtagtcacgcagggaggaggtgtgcagcgcactcatagatgcagaacttaccacggaggtgcctggcctgcggccaccgccaccttctgggagatctgtgtcaaagcaagcagtgccagagagtttagtcacatcaggcctcgtacatctttttaactaaatcaatgacttctctttgagcgctggtgaaaacccggggccacaagttcacttcatctttcagagatttttcatccataatgtctcaccacaagcaacaatatatatctaacacaattatttcaaatccatgatcaggctttacaactttagattatacatcgttctattcataaaggcaagtgctaccaagtgtttgtttttttccccttaggcaacaagaaaggtgttttagttttcagagttcttaaaactaaagaatttgcaagttacaatagcccccaaagctaatctttaaccctgtcgatcctgatatattaaagatgagctgctgacactgctgtagttggaagattttcaattaacaatttaatatttaaaggatgataaattatcttcactactaggaattttaaaaatgttgataggaaaactgaggttaggagaaaaatatttcaggaacacactaagagtaaccaacagctacaatctatcaagtgctcgctgggtgctattcgtatttaagggttttacagacactgcctcatttaatgctcacaacaagcccacaaagcgacactactgctgttgcttctttagaaggaggagaccaaagcttggagaggttgggggactaaagcttcacagtgacatgcagcagagctggaggcatgagctcaggtctgtctgactccccagtccatgtttttaatcgccctggttttctgcatcctgtgacattagaagcacctgcatgctgactgtatacctaaattacaaactctttcacaacatttagattcgccacttttcgaagacatgcaagagaactaagagattacaacaaacgcaatgcaaggactcacctaaagtgctttcacttggctcgtcggggtctggagggttactcagcagactgtgcacgtctcctcgccggcgctgttgtctgtgcctcctccgatactgaaattcagcatattcctgcataaaccacaggttataaaacacgggagagcatgcacattttaaaatgcaaataaaaccaaccatacactttttttccaggaaaaaaatgtgtgattttatacacagattataaaatcacttggctttagaaaaagaaacttcaggttttgccatgccaaggaaaacagaaaaggtaaaatggaaaagaaaaattttacatagccactgtagctgtctgaataaattcggaatacttgcaagctccaatgctagatcgtaactgagcctcatttcatatgcctggaccttgtcatctgaagttataactaatatcagaaagattttactgatatgagttaggccct

SEQ ID NO: 46953 - DNA, 823 bp, Bovine  19866880839851
  misc_feature (1)..(1): n is a, c, g, or t
ntttaattaagccaactgacatgagtatagccaacccaagtatattatacattcctctttttttggagtaaccaaactttctcctcttgctacggatgtttttatcatccgtttaaactccccctctactaatttatgtcttgtatttctttcgatgcttgatattcgtattctccatgaggtcttccagacgtaaccccagatcccaaaggttttgccttgcctcaccttccttcagtatttacataaagtctatgccatgtggccttcacttgcatgtacaatgctttgaattttattagttctttttcacacaggcaagtttataaactttttttatacagctgcggtactcactactgctttgtaatccataccaactacattgctataaatgcctgttgaatgaatggtgttttcctaaaatttacaaagtagaaacttgttaaattggaagttattatgataattggattactttctgatttcaaaagagagttagatttaaccagatagatactgaatttgctattgacttacccatttatcctataatttttttgtttgttttttcttaacatagacagacctagaaatggtcactgaagaccttgcccaaaaagtcaataggccttaccttcgcacaccccgccacaagatcatcaaggcggcatgccttgtacagcagaaaaggcaagagttcctggcgtctgtggctcggggagttgctcctgcagactcaccagaagctccacgacgcaggtaaaaaagatacacactgtaacctcacccagcaccagccacagaggcagcaagtgtattt

SEQ ID NO: 46954 - DNA, 1408 bp, Bovine  19866880869868
  misc_feature (1)..(1): n is a, c, g, or t
nccatctcttttgtgacaattactactgaaaattatagtgatatggaagtatatctcaattcttcctattattgattatttattattctattacttggggaactagttcctactgtttcacatacacatcatatacttcagtacctgtttgctaaataaatgattaaatgaagttacatgcatgcttgctaagtcgtaacttcaccatttaatcatttgaatattgtgctaaatcacttcaggcatgtccgactctttgcaagcctatggaccatcacctgccaggctcctctgtccacgggattctccaggcaagaatactggagtgggttgtcacaccctccttcagggaatcttcctgacccagggattgaacccatgtctctcgagtctcttatgtctcctgcaatggtgggcaagttctttaccactcagtgccacctgggaagcccaatttctggtcattcagaatatttgaaaaggtttcacaaaagtggatggccttattaagcaaaaattactacctatataatctgtatggattgatattagaacataaaatttaaaaagtcacaattatgttaaacatatgttatctcttttgattcaaaaaacacttcatgatctttaagttataaaattaggtccctttctccatcagtctgaaaggatgtcattgttgggccatcaaggagaaaaactaccatatccagttcttcgacaaaacctcagatgcatggctttctggccaagcatctgcaatttcatattgttggaacattcattgtctccctgggaactgcaactttctgtaactttgctatagctgaaccaggaaagaaagcatatgcagatttctatagaaattatgactccatgaaagattttgaggtgaagaggaaggctggtatctttcagagtgcaaagtgatttgaaatataaagaatttctttgcttgagttccatggaagtttgacacttacctgtgttcctgaagcatgaaactatgaatatctgggctgaagaatagtttctcaacaaataaatgatgagcaaatactgtgggcactaaaaaaaatgtaaaagaaaccaattaggcaccccaaaacgtaacttaatctatttttggtctacctgtattttaccaagactttaaaataaacctgctttttcaagttgtttagttgaatggattctgaataaaaagcgattttatattctggttggaaagatttaaagaggctgaattacctgagaaagacagtataaccctaaaccaaagtgatagaactgtcctttaatttttctttaatacatttgtatctcatcatattacatttctagaccaaaatggtttgtacatttctgttggtcgagcaggaggaaatcattataataaaagaagtta

SEQ ID NO: 46955 - DNA, 903 bp, Bovine  19866880921312
  misc_feature (1)..(1): n is a, c, g, or t
nccttccctcctgctggcaatcagattttcaccagacaaatctaccccaaagcacagaatgtgcttacaaaggttagtcaggactctatttgcatcacagcagcttaatcatttcaatctttaaaaaaacaaaacagaacagtttttggaagcctctaatttattttcgagtttcttttctcatcttggactgcccttctcctcagaaactggttctcatttcccaaaagctcttgcttgtgttctaaaagccgccatcactcttcggagaagacggcttgacaaaagtcagtcagcaagatggatctctttggaaatggaagccgtctggagtccaccgattttaatgactccggtttgaaccgaagaagagtttattgccactctagtccccttccctgtgggcagtaaattaccaacgattaaagagccagtttcccctcaccctctctgcccccaccaccctgctctgctcccggcaaaaacaaaaacgaaaaaagaaaaaaacactgcccgggaggacaaaacctgccaccaaggcagcagcgctgcggtaatttccccaggcattatgattgatgatgatcagcagagcgtgggataatggctccccttaatttaccggtccctttgaagggttaaaatatggcagatgttgatagctgacactccttgctaacaggaaagacgcatcgctgggggcccccttctaggctttcccttccccgcagctgtctgtgtagagcaaattgtatccacttgtttaacctcggggaacgtctggaggggacccagtgccacaagggtacctttttttttttaacggtcatttcctctctggtgtaacttgcatgacagtatgtgacaagcagaaattaatggggacactgctggccaattcct

SEQ ID NO: 46956 - DNA, 1433 bp, Bovine  19866880950042
  misc_feature (1)..(1): n is a, c, g, or t
natctggctatgaagtatatgtgtggttgttggtggtgctcactccatctgatttaacttaattatagtgtttaaagtttactttagatttagagagaagtaccaaagattgtggagcccatcgattgctgaaatgcagtagagtggcatggtgaaccagctaggcattaaaaatttaagtggtaatgtacaaagtggctaattgtgagtcaactctgcattatagtacttgggttacacacacatttatagttaatttctttgaagaaagtgttgtttcattttaaaacttgaaagaaaataatagaatagaatttttattagccttttcttagtatttatatacattcttgtcctgaaatttatttccagcttgtttatgtgtggtgtgtttaattctttatatgtttggtgagcatctcatgtcctcccctgcccccccccccccacaatgatgtcctttgactgttgaaactaaaggaggatcagtcctttggcttgaaaattcttttgattactgaaggctttgtttttaaaacaaatttggaattagttgtaggattttatgggataaattgaattctcccatcaaaacataattataaagtttgtcagtctgcctttatcatcttagggcagaattagtttgccaatgcaatgtctgcatccccctcaaaaaaaatgaaaaattcacaatttttattagcatgatatttggagttttaaaacaaagaattcatgccctttccagggagatgactggattgaccaggatgagaacactttcttagaaataaaccagatttttccgtattccattttaattactttcatagacatgatttgaagaccttaaattccaggaaaatctaaattgcagagtccagtgtccttaaagtatgcttagtctctgtctcttcaataattcttgacctatgagctaagaaccgtgttttttatggaggctgcagtttttgaaactctgtccagcagcatgttctccctaagaccttaggtaaggactctgcaagcagaccttctcgcgcggctttcctttcgccgtggtcacttttgtcaccagggaaccaagtgctcctctcctgagctttcacgttaaagggtcagacccaggtggcgttagtgatacggaatctgcctactgacgcaggagacacaagagacgtgggttcagtcactgggttgggaagattgcccggagtaggggatggctgcctactccagtattcttgcctggataatcccaagggcagaggggcctggcaggtgacagtccatggggtcccaaagagcaggacgcaactgagggactgagcactaacaggtatccttccatattatcacaaggaacgatccaatctagtctttccctccgccttaattttgtgatcaaaggatatgtgtcagacttactt

SEQ ID NO: 46957 - DNA, 1509 bp, Bovine  19866881033853
  misc_feature (1)..(1): n is a, c, g, or t
ncagagaatgaggacaatacagcgcaaaggcacagaaagccatccgaaggggctcctcctggccggacctggggcaacctgagcttcaaaacaactatttgatgatttttttaaaaaagtaaaaaatctgaaatcgcaatataattcttgacacctcaattcaaaggatacccttccacacaccaactatattttgccaacagtaaggtaaagtgaaagaaacacaccaaattcttcatgtaagtacaaattctctacaaagccagtaccccaattatggtacacttgactaaaggcaaacttctataaagttaaactcaagattttcaaaaataaaatttatttttaaggttgaagctgacactggactgctcgcatcgctgtaagacgccacagtaacagcctcctccgatactcacttggagcccgccggtcagcagtctcccgtgcagggcctccaactgggcgccgtaaaggagcgctttcagatcagcgcccgtgaaggagtcggtcagcgaggccacgtgctgaaggtccacatcgtctgccaggggtagagactcactgagcacgtttaagatttcaagacgtgacgcctgaagggagaaaaactcaccgacttaacaaataccattgaacacaatattttcaactgtgcatcttacaagattttccttatacattcacttcatgtatctaatcagttttacagatcagttgagcaatgtaccgccaggctacatctatcctccttggtccttttgtcgaacagaaggaacacagggaggaaaatgagtgaaaatcaacattctcaactattcagtgtagatcattgcttagtgcttatcttctagatttgggcaaaggagccaagaaatgtttcaaaaagaaaattaaaataatcgctacatgtgatatacatttatacctgtgactattgatctgtctatttcttctttcacttatccattcgtttctaaatttgagaacacaggactagagtggttaaaaggcatatctctacataaccagcatggatgcttcctacactactatgcttgattctgtatcagtcttctgttaagataatgagctgtgtgatctctgaacacagggaacacggacagcaatacttggtttccctcccttttttccatctggctaacacaaagttttcagatgggagtttgcatgggatgcctgggccaaagaaaggctttgcatctaattcagaatcttttcacgctgtaagaaaacagtgactagggcctgtgccgaaaactggtcttctaaggacaactgctgttacctggcagaagtaaagctcacaagcaaagagtggagcgtttgtaggtatatgaaactgtcacctggtcaggaggaggacagtatacacatttatctagtcggccgggcctgagcagggcagggtcgatcaagtcagggcgactagtagcagccagcacataaacacctgggggggaaagaaaacacttactaaccctgggg

SEQ ID NO: 46958 - DNA, 818 bp, Bovine  19866881171493
  misc_feature (1)..(1): n is a, c, g, or t
naatcgaaggacgcacgtgtgagataactgcctagggctggagctgcaggcttctgacggggagtaattttcttccatgaaagccacaggtaaattccaaaccttggtctgcatttttgctgttgtttagactctcagttgtatccatggtctgaacacttctttggccattccctatagtggccaagaaagcatatgccattcacagtcatttatgatttggggttttatttccatataaaaacgaggtaatttttaaggatttaaaagtcctttggatcgtgttagggtagtaatttatccctgccagaattagtttactggaattcttaagtaaataaccgtgaagaggagatggaggtgaaaaccgtggttgtagaaaatctgggagagaagagaagcaatcctatgtaacactgcttgccttaagaagagagagagaaaaaaaattgcaccagagctttctccatttgagcagtcggttttgttccctgactaggctccccacatatctaagtgcactgagtacattcccaactccgactgccaagttaaaatgaaaacgttctcagtctagaaatgattgaggtggttttctttaatcaaattagagcggccaaatgttcctttcaaaggtaactgtctactctgcagctgtatgcaaactaccacatcaaatgagagagggggaaaaaaaaatagcgatagaattgtgtccttacagtacagtgctggaggcaagggtggagaaacaaaagcctgagtacagcgaagaattacactcacagtgagcttccagaaatatgcgacttcacaaa

SEQ ID NO: 46959 - DNA, 1738 bp, Bovine  19866881258724
  misc_feature (1)..(1): n is a, c, g, or t
ntttttcaggggatcttcccggcccagaaatcgaacctgagtctcctgcattgcaggcagattctttaccatctgagtcatcagggaagctataaatgatggctatttattactaatataaatatgatttctgttacagaaatattaggttaaatgattttgaaggtctttgctttgctaatgctaagatataattcttacgacgtgtactcagtcactctgtcgtgtccgaccctttgttaccccatgaactgtagccttagaggctcctctgtccatggaattctccaggcaagaatactggagtggttgccatttcctcctcctctgactacatgttggtgtgtaatcagaatgtgccccctttcaagttctaagatgatgaatgatttataagtattctttgggccatctgccactaaatgctgcccttgtatcttgggttggtcttaatgcagcagttttgatcattagataaataagcatttgaaaatccattcattaaaaatgtagaagaacttgcaaagcattggggtaaacaactgttcctgtcctcaagcaagcccaatttttaaaatataaatagctgttactattcaccattagtttcaatctctatataactatcaaagagcaattgctttaccattagtgataatctgtgctcagagctgaattcagttgtcttatgcataggaacactctagttattctcctaaaatggtttactaacttactctgtaagtttctgtgtgtcagacctaagtatctcttggtcttagagtctgcctctgctcccttctgcccaaataaggcatgtggctgccaaaccttttatggggttaagtattaatatggactgaattgagttagtctcatttggtggctaaaataactgacttaattctacagttttcttgagcctttttgatagcagttaatttaacataaaataagatttaaaatgtggattctttcccttcctctcataactcttttatgctttatcaggagataatatttggtaggaaatggctccttatagccttcctctgggaaggatagttttaaagtgtttagtttgaaaatgtctggaaaccacgcagttatatctggcttagagaaacccctttcctttattttcatggctcacctgttttaagcatgcatcctgtagagcttaatccagcagtcttcattctctcttgacaaataaacatctatatgaacagtatttttctctctccctttgataattttgatatcaaagatcacaaacttagaagagcagttagaacagttcagagaagaactggaaaataagaatgaagaagtccagcagctacatatgcagttagaaatacagaaaaaggaatctactacccgcctacaagaacttgaacaagaaaacacattatttaaggtaattgttcaaggaaaactttgcctctaaatagttcattggtttttgtcttgtatagtcataagtattaagcatttgctaaatccagctgctacataatgcttaacagaggaataatagctgcaaatggatttgcatagagtttatgttcaacccaacatatgaaaaattttggagacctgtatcaaaacattttaaaatttattgatttacaataattatatagtagctttgaacatttttggggtgctgtagcttggtaagagttaattgacagaatggtctaaagatcacatgtaatgctctatccactgg

SEQ ID NO: 46960 - DNA, 1353 bp, Bovine  19866881274274
  misc_feature (1)..(1): n is a, c, g, or t
nagtctccctgtagtgatggagaagaccattctgctcagcagacatcagagtcttggctggaagagagaagagcttacctcagtacaatctcatctcttaaggatttaattaccaaaatgcaagttcaaagagaagccaaggtactcaaagactattgtgcatctaagtagctttatatgatttttatcaataataaggcactttgtttgccaaattaactgttgtcttttatgatgtttttcacataaatttctatgtattgtttaaatgctccaagttgcacacttgaaagtaaatttgtatcctcttagacttgcaatgctgattctggttagcagacagataccttgaacagatacctagaacagttcttagcttatttgaaagctaacttttgttttttgtactctgccaggtttatgatagttctcaacctcatgagagcacctctgactggcgaggtgaacttctgcttgctgttcagcaggttttcttaaaggagcgcagtgttttcctagccgcatttcagaccgagctgacagctctaggtataggagatgcggttggattattaaactgtctggaacagagaatacaagaacaggtatcaaaatgagactgtaagaaaaactttaaaacaaagaatgctttttaatagtaatgagaaaatgagttatttattagttgtttattagaaatatttatagttatttatataaaatgagttatttattagttttagagtaaatcttaaggttaaaattttaacaggagccactaagaatatttaggataaaaagtattactacagatattttctcttatgttagaaaataagcaggactaaaaattaatgagttaatcatccaatttgggaagttagaaaaagagtaacaaaataagtctaaagaaaacagaaagaataaaataccctcagttctcttcatttgcagcagtaagactggtaaagctgttgtgaataccgagccattgccagcagggaaagcctgtgagtccctggcggtgacatttttgtcaagcagtcaatgtgtaatcttgttttatgtgcatttctgtttaaagacaccctgttgattatgtattgttgaatctttaacattgaactcatggccagctgcactgtaacttaaaacttttctaacacatgcatcttctctgtcatgtgtctttcagccctgttgtgcttaggcatactggacagtacttcatgtctgtgtttgggaaccattttaaacagcaaaatcatcagtaaaaagcacaaatgtacccaaaatatggcactaaaaggatgacagaaaggacacttgtttacagcataagaaataaaaaga

SEQ ID NO: 46961 - DNA, 956 bp, Bovine  19866881278418
  misc_feature (1)..(1): n is a, c, g, or t
nttaagtactgctgatctaaacagaggactgcattttcttcgaatgtggaatctaagctatttattccatttgtgttaatctctccagctcttctgtttgtcagcgtaaaggggaaaagctatccaattaaatatagaagaaattccctgtcaggttaaaatcagaaatgaagctataccattcaagggaactccttcacatttaatcctaatgtcagtggtttataattagttggaattaagtggatcaagtctctgtaaagcatactccactagcataccatctgtacctgcaagtcactagagccccgagatgtgcagttcatactaagtgtacttgttcaggccagtcacttgaggtctgaggtgtctgacttgaaacatcggaaccatcccccttgctggcggcctcattaccactgtcgccagcttgagatgctgcttccccagccagaatatttccctccaaagcattttcttctcctctttgggttcctctaccttcactgatcgcagcatctccaaacactgaatcttctggaggcatcagttccacatccctcacaccttctgactcgtctttgacacaggggagctgagaatctgcactgacttctgtagctgctggaggaatcagagcaatactttgagggttcatgtcatgaaaccaagccatgatattgccaagaagattgtcattgatgttggcgtcctggctggctgagtcagggtcactggatgaggggaagaattcacttctcgcctcactgggagggtgggaactcagggtgtcagttgaaaatgggtctctttctgctcctagtctcatgaggctgtcaccaagttccaatagctcagagctgctcaatgcagctcgagggctatctgtgttcctgggggacggagtccagtctggaaggtaaagaggtgcctattgcccctaaggatgcttcatt

SEQ ID NO: 46962 - DNA, 1205 bp, Bovine  19866881311773
  misc_feature (1)..(1): n is a, c, g, or t
naaatctacaaaccaaatacctaatgagaatagaacagtcagtgggaaaatggacaggtgttaaagtatgtgctcatgaaagaaataaaagagtatccaataaatatatgaaaagatgctcaaataaaatgtgctatattattcatagcaggcaatactacatgacactgaaatgagtgtgaagtagagccaggatggttcaccaatgtatccagtgaaaaaagcaaacatgaatacagtatgatgccatttatatgaagttttgaaacacgtaaaacagaactgtgtatattttaggggtgtgtgtgtatgtagtgtattacacagagtgcatgagagtagcaccagacttagaacctagttgtttcttgagcagatggtgcagaggaccgtgtgttcacggagttgtgcccgagggacttcagctgtgtaggggctatttcttgggctaagtacatgcgtgttcattatattactcattatattttatcgtgtgtttaaagatttttgaaataaatgcaaagactaataatctgtaaagtaaatcctaatgatcaggaagagaaaattagtaacttttcccaaaattttagcatgtcatacttcttcagacttcctggtttgttattgtctttacaaccctcttgactttttcttttacagggtattgaatatcaagcagctatggaatgcctccaaaaagcagacagaaggagtttgttagctgaaattcaagcactgcattctcaaatgagtattaagaaaacgactctgaaaagagagcaagaaattgatcagccaagccaaggtatgctataggacaggctcatatggtgacataaatgggtgaaagaaactgtttcattttgtttctcttgttattattcagttaaaacacatttcttctttgtcacattttttcctcattctcctatcagtatgttaatctgcattaattactctagggattaaagaggtctccagtttgttttaagatatatgtataaaagatatatacacacacatgtataatactaaaaatattttttagaattgaaatatatttgtttacatagggttttctagccaggcaaaaactcatactcagctttgggaatgagataaaaaatgctcagttatgctatgccatctaagcttattgctccatcttaaaaaaaaaaaaaaaaaaagcgatagttcttgaa

SEQ ID NO: 46963 - DNA, 1332 bp, Bovine  19866881367273
  misc_feature (1)..(1): n is a, c, g, or t
ncttttattactcatctaataaataaatgctaacgctttttattgattacgtgtttctacttatttacctattctttactaaagtagtaaatttatagcttatttccatattgctagacatataaagatagccctgagttttcataattatagaaaatactgcagggatatgttctggtgtggttttttctttgactcattaatcctaaataagtcaaaggctatctcagtgtactggctccctgctgctgttgccgctgtgaactctggagtggctgaatcagtttatcctgccattaaggacatacaggtattggtttcacccatagtatcgtcacattaggaactggaaatgattacagctttaaatgctgtgatgaaggtggtcacagagagctatcagctatctatagaactctttttgtacatgtgcattgcagttgtagtttatcttttctgtgaatccagagaagcgtataaaaactttcaaaacctttctcccccatttcttatttcttgaataaatagaatcaagctatagaagtagcctggggtcaccagcctgcattcttgagctgggtggaaggcagacattttagtgatgaaggtgaaaatgtggctgaaattaacagacaagttggtcagaaacttggactctcaaatggggcacaggtaagcacaaactgtaatgacagtgactttttaaaatgttatatagcaaaagaagtaaaagttcagatgtaggtcttagggaggtaagatgacacctaacttgtgagctactgcaaccagcataagatatccaagttatgcatactacctgtcacgtgctctgttaagtcagcatctaatagtctcccatgctcactagctgattttctagtctaccttttattgtactcagtttccaggttcctgaatttgttcagttattctttatgaattattcagttttacttactatgcttaaattgtaaactccaaagcttaaggactcatgtctgtctctactttatcatattcaccagtttatgtttttaaatattttaaactgcagaagtaacacatattcagtacaaatattttacaatcgaaagtaaaaaatgtttttccctttctctaaccccagcctcggaatgagtgtgtactgtggggtctcactagaccgttaggagttaaagaaggagatcatacatattttctgcaattttccccccacaaactgtatcagagatcctttccatatgttaagataatatgcattgagcatctctgtatatgtagaaagaaaaactttttttcggtgggggggccacagggagcacggggacc

SEQ ID NO: 46964 - DNA, 1091 bp, Bovine  19866881396537
  misc_feature (1)..(1): n is a, c, g, or t
naatttcaatattaaatagcagattaatccagttagctactcatatgacatcagtgcttccctaaagaaaaccaccacgatatttggtgatctacttcctacaatgtaaaggcaatattacaccattgtgccaactcataaaaatatagcatgttcttaataaatcaaacaactaataccagagactgtcccttagtctatgcgtccatgtgtgtatgtgtttgtgtgccaggaagtttgtataatttacttaactttaataatacaaattcatttctgggtctggaattgcatcaacagaaaacaaactaaaacttaagaaaaaattcacaggccctgctattttgaagacagtgaatgaacctgtctagaatgagtccctgaaatccttgtttttaagaggtactcagataattatgatgcaggagtttcaataactataatagtttgagatatactagcttattttaactaagtatcttaacatgtgaaaaatgttcaaagattacaaaaacacattttaagtaatagtgttatatatgctttaagtagaaaacattttctttattcagatgttgactttctgtatattttgaaatgacacacacataaagatatagcaaaccctgtatttttaatttcatcatattcccctctaaattctttatcatttaccaaaaataacttttttaaagcttactgttttgtctaatgttatacagactatcaatctacacatttttgtgtgtttctcttaaaaattaacttataaggatattatataaaactaattggtatatcacacaccaaacatgagtacagattctgtacaatgtaatagtatatatatatattacaagagactaaatgccttgttaaaagtaaggttaagaaatctttcatggaaaaaatctacatcacaaaatgtggtggcttgagtatcagctggtttcctctcacgaatttctttccatgggcattaactgtccatttagcttcatcagcagttttaccacaaggccggcctacaaaggaaaatacatgtcaacaataaatttgaaacatataaaaatgtgtaaatgacatacacg

SEQ ID NO: 46965 - DNA, 921 bp, Bovine  19866881425843
  misc_feature (1)..(1): n is a, c, g, or t
naacagagaaaaactggctctccagaaatccttgaagagggcagaagctgaagtgtacaaactcaaagccgagctgaggaacgaagctctacttcagaatctgagccctgattccgagcatgctgctataaaggtaggagacatcctccagctaacatacaacagagtcggtcctctgctcttgccttatttcatctctcactaaccctaatggtcggactaaagaatttgaggtcacactgaggtggtttctccgggtgtctcagtctgtcatgaatgaggtctctagctagtcacaaaaaaactgtggtaaagcatgccgggattgggaccaggttaagctcacagaggtcacagaagcagccccctgagctcatggtccccattcctacagtctcatccctaataaaccaacagaaagttagcttttcaattccgtatagaagctctgctactgtcaatattagaggatcatgctctgtaatggtaagccctctaaatagcgtctcttatgacttataatgaatactgtattaatagtacaactaccttaagcagttaacttaaaatccaaaaaaagaaaacgtttgtaatatttattccaactatggcatgaatgtaagtttatgactcttaaagagatagaaaatattaacattgaaaaagttaaatgtgatgataataataaaagtagctctgtactattatactctatactgtaaaagctttatactatttttggctaagacaaaaatatttgcgttaactatgattaataggagctaaaattcattgactaaatggaagtggaagtatcaaggtctagctttacttttcactttgctggtaaaatagaaaacagcgatgaggtaccagccgttctactcctgctactaaaaataaagtctagattatcttccc

SEQ ID NO: 46966 - DNA, 630 bp, Bovine  19866881533805
  misc_feature (1)..(1): n is a, c, g, or t
nctttgtgaccctatggactacagcttgccagtctcctctgtccatgggattctccaggcaagaacactggagtgggttgccgtttcctccttcagtacattagtgataacgggtagaaaatgcgctttgaatcaacagttataaatactaatcttaggaattttagaacataatattttggatgctttctcatctacaatgactctatctggaatcagcccaaagcaaatagtaatcactttggtgagcaataaagagaagatagatgctttaatataacagatcagactcacataaagcaactgagctaaacaagaactgaaatccctggtatttggcaggaggttaacaatctgtaatatatttatataaatcaataaggaatgtggccaggctgcctagagcccctaacacttgcaaaacaaaagggccagacaggtctgaacacttgaacatacagcctgggaaacaacttcagctgtctgatttcttgtgttgatcaacatctcaaggctttctaaacctttaaaaaaaaaatctctttgctattcagtaaactgacaaaaataccatttcagcgattgcataactacagggctgtaagagaaatataatcacactgtgtcgaa

SEQ ID NO: 46967 - DNA, 723 bp, Bovine  19866880233796
  misc_feature (1)..(1): n is a, c, g, or t
nagttggtaatggacagggaggcctggcgtgctgcgattcattgggttgcaaagagtcggacacgactgagcgactgaactgaactgatgcatagtttaaacactgtggataagagaaaaaaaagaagggagaaaaggagggaggaaagaaaaggaaagaaatgtccttagctttcaaaagttagcagcctaactagaaacacacacacagtttatttgctatggcagaaaccatcttggcaaataaattaactttattgtgtctcagttttctctctgtgtaatgaggaagttgaataagatgattgctgagattctttaccgctctaacatcctataggccattcaacatttactgagcaattgttgcatgtgaaatggaaagtattttcctagaagaaacaatatatacagcctgagtaaaactctttgggctttaaagtgattataatttactggccaaatgcaaacaactaactgtactagaagatggcatgaataaaggtgctggggacacaagaggaagacttgatacaaattcaggacagaaggggatggaacaatgagagaccagacaagctgctttatggacagcagagagatgaggctaccctagtatgaagggtaaagtgtgttaaaggaaacagcaagaacagtagggaaggaaactcagaaaatactggctattttaaaaggtcagtaacaagctaatcaagctcggtt

SEQ ID NO: 46968 - DNA, 816 bp, Bovine  19866880512460
  misc_feature (1)..(1): n is a, c, g, or t
ncccctttctgctttgctaacataagtttgtttcctatatcagtgagtctatttatgttttgtaaataagtttatttgtatcattttttaagatctgctatgaatgattcatacgatatttatccttctttgtctgaattacttattatggcaatttctaggttcatccatgttactgcaaatgtcattaatttttatgactgcataatatgtatatcacatcttccttatccatccgtcaataaacatttagtttgttgattgtctgggctattgtaaatagtgctactgtgaacactggggtacatgtatctttttgaattcaagttttcaccttttattatatatatatattgcccaagaaccagatcgctggatattatggtaacttagttttttaaggaacctccatactgttctctatagtggctgcaccaatttatattcccaccaacagtgtaggaaggttctcttttctccatcatctctagcatttattatttacaggtttttttgatgatggccattctgactgatgtgaggtgatacatcattgtagttttgatttgcatttctctaataattagcaatgttgagcatcttttcatgtgcctgttgggccatctgtatattttctttagacaaatgtctatttaggtcttctgtccttttgttgatttttttttttttatatggagttgtatgagctgtttttgtaaatatatatatacatatatgtatatatatatatatttatggatatattagagtttacaggacaggacatcttttattaaattttcacataaaaagaaa

SEQ ID NO: 46969 - DNA, 1385 bp, Bovine  19866880620940
  misc_feature (1)..(1): n is a, c, g, or t
ngtaataaataatactgaccaattctacttacacatataggaaatatatacacaaaatatatagttatacaatgagaaatgtaaatagaatttttactaaaataactttctataaactcatatataaaataccacgtaagatatctactattattgatcttttaaaagattccactgattacacaaaccattcaatttccattgtcatgggtattgccatgtactcagaactcactattgtttcaaaagtcaaactggccatataagcatatatgtgattattttactgaaactggtgacaggatgagaaggttctagacaggaggcaaggccctgaagacttaagacatggcaggccactgagaagaaaagtaaagctcaccactgtttggaaattcagtctgagatcctatgttgtttcttaaaaccagctgagaaaagaggtttgaaaatgtcactgcttttgagttaggtccagcttagaggttaaaaagaaaaagaaaatgtggcattttttaaaaacaaagtattggaggatgaaaagtgtgacttcttgctaacaagatatagttcctgtagctaaactgtccagaccagggttaatacaggcacagttcactggtttgttaatagagcaaaagtctggtatcatttgctcaccactctgaagaattctggtctaattaagtgcatcatgcttggccttcaaaggtaattttcttaataaattctttattttaaggtgatcctaatttgagagtgaatacagggttacctagttactttaacaactgtaatgggactaggggagttgtggagaggcctggagcacataaggagactgtctagtggatggggaggagggaacagaccccagatgggcctctggagtgagctctccacaccccaccattttgtttatgtttaccagcaaagacagagctgaatctctgaggaccacacaaaatgtggacacttcaagaatttctgtgccatctttgggcaagggccatggtaatcttttcagtatcattccaattttggtatatgtgctgttgaagtgagcacaaacataaatcttttgacatgaaaaaatattgagaaatagaaaatgtagtctttagttaaatctttattcttttagtcagctaatatagccatattaacaatgataggaataatatgaaatagcaactaaccttcctctgaattaacatgggcagcgaggtgaaaagggaacaggtgtaaagcaatgagaagggacccctcatcctagcagttcaattcccagggcaccctcccatcttcaactcagagaaggagacaggaatggacaaatagccataggcacacagtttacgaagatagtaaacatggaaaaaaag

SEQ ID NO: 46970 - DNA, 895 bp, Bovine  19866880663748
  misc_feature (1)..(1): n is a, c, g, or t
nacactagccgagctcgtccccaccctacaacaccattctggatgagcattgttatttaattaaggtctctccaccttgatctaagtaacacaagtttgtctgctgtctgtatgaagttctgagagcaaaacagttggaggtactgtcatattcatgatttcactttcttgagctaacttgtcagatctcttgagacctctccctgtctgcctaaatccatgaaattcttctttaacaatcagatggcagccattcaaggaaagaatgaaagtctagaaaaagtgtcctccttgactgctcagcttgaatccaccaaagagatgctccgcaaagtggtggaagagttgacagccaagaagatgaccctggagagttcggagaggaccgtgtcggacctgacagcttccctccaggaaaaggagcgagccatcgaggccaccaacgcagaaatcacgaagctgcgctcccgggtggacttgaagttgcaggagctgcagcacctgaagaatgaaggggatcacctccgaaacgtgcagacagagtgtgaggccctcaggctgcagatggcagagaaggacaaagtgattgagatcctgcgacagcagattgagaacatgacgcagttggtgggccagcacgggcggacggccggtgctatgcaagtggagaaagctcagctggagaaggagatcaatgataggaggctggagctcaggaagttaaggtctgtagagtgtcttggtggtttagcttctgaaatatctttttttctcccataagtctgacctaattgaccagaagtaggttctgtaaagatagttatagacactccaaaattgtttgcaagtgtttttgtcagtgtgcatgtgtgcttttgtgaagaaagtttccaca

SEQ ID NO: 46971 - DNA, 787 bp, Bovine  19866880700287
  misc_feature (1)..(1): n is a, c, g, or t
ntgctcagtcgtgtccgactccttgcaacaccatggactgcagcacgcgaggcctccctgtccatcaccaactcccagagctagatacttgtcataaaaagaataatatagacaaagctaaaacaaaataccaaatgtgagtgttgaaaatcattaatttttagaataattcattattaggcaaaatctgtatcaaataactatcaccacattctttctataggattgaacagttaataagtgaacatgaagctgaaataacaggactcaccgagaaagctagcagtgctcggagccaagccaacagtatccagagtcaattggaaatcattcagtatgtgtgtcctggtggtttgaagttgatagctatttatcttcattttattttttgatttttgttctaagatctttttttaaaatgcttaatagttgattctacaagaaggtgaaacttttgtaacattcaagtaaatggaaaagattatttaacatatggataatactttataaccatatcaaaagtattatggcaagtatttgggcctcttggggtttggatgttttaatttttgtctacatttcaactgattggataaaacaaacacacactatatatctctgtgtgtgtgtgtgtgtgtgtgtgtgtgtagatgggcttcccaggtggctcaatagtaaagaatccacctgccaatgcaggagacacaggaaacatggggtttgatccctgggtcaggaagatccactggggggaggaaatggcaagccattccagtattcttgcctg

SEQ ID NO: 46972 - DNA, 1820 bp, Bovine  19866880727966
  misc_feature (1)..(1): n is a, c, g, or t
nacatttgtattaggttttgactcttaaaagatttggtttggggaagtcttgcaagttattatataatattcctttgttaaatttgcatttgagtagaatataccttccgagtgatatgaaattggagtggatttttattttgagtggaatacgtcttccaaattattaaatatctcttcaaaatataagttcaacagtcaggcccgttttcctggaattcttggactcctgcagtcatttttttcccccatttttcctgcatctttcattggaatttcatttgattgtctttgtctttcctgagagaaacaaatcttatacgaacagcagcaacctgtcttgtttttgaatctgtataataataataatgtctttctttaataaactgagcagattaggatacatttctgtaagataatgtaattatagtaagaatccccagttctttactggattttttgagaaatgaccagagcagtttaatgtattttcaggtagcactgacttctaaaatgtaggctagacatctttgcactaaaaaagataattttgaagattttgtatctatatagatcatttgaagctcattgaaaattctgcaaaacacaaactataatatgtgtgtctatatatatatatgaaaaaattttaagtaggtctctgtaccttgcatacaatgaccctatagaaaagtcttgttcttcagctgctcgtatatgaatttattgttcatattctctaacatatgccacttatgcccatgccaattatatgcatttggtaatcatgatttattccctaagacctatttggaagtctggcattttgtgcagtcacttgttactgcaatgtgaatatgaccttggcatttgatttgaaaacatttttgaagaatacttgagtattccaaagattaaacaatcagttatcattaaggtatatttaaagtgatcacatatcactgttgtttggtatgtttacttttccttctttgcttaaaattggcactgggtaaaacagaaacattattctgaaatttgtgtttccaaacaaacccacccagcttgtaactcaacaacaataaataaaccagttggtatttgcttgatttcatgttcatttggagttgtcactgttaagttttgagttgtgataactgttttaactacttctacgtacgttcattaacttagtcttcagcaaaggattgattgaaattcttgtttactttttaaattttatatcctggcagatccattattattaataagtatttttcatattgtggagcatgttaagataccagtgcttttatcgtatagccaattcagactatatcttagtttttctgtgacacttagaagtaatgaaaaagattaggaacaatatttagtattttaggtgatttttatcaaaatgtttgcagtttgcagtaccacagtagaatctgcaaataaatagagtatttggttgtacctggatgcaacatgtagtctactcttgaataattttcccagtcagaatcatatgatgactatcatgggctgtgagttttttcctttttgtatctcttatattacagtattaatgaatctctgtctcttatgccagaaatatatgagattgaaaattagaatcccagaaagtctgtagtataactcagagaggactaatggttcaaacatctgtcttaaaagtcttttttggcaatctcattggtaatcaaattctgacagtaaggggagaaaaagcaattttagattggctagcattccactccactcatatgtcaagttgcatcggtaaagattaattttgt

SEQ ID NO: 46973 - DNA, 2660 bp, Bovine  19866880783101
  misc_feature (1)..(1): n is a, c, g, or t
ntcccgttgaccctttgcctgaaaggagaaatagcctgaggagaatgtgtcaccaattaatggtcagcagctgatggcttagcttagaagccagagacttggaaggatcatgaatgcagggctggtgacaaggaggtttgggagaagaggtatatgggggattgcacagaatggatcagagtatgaggggatttggttctttgggaatatgcacccaaaagactccactatagaggaagcactaaataatcaagggaaaagtttaacctagcctctgcatgccagcccccttctttctccaggagcaccaaggttgcccagagatgtcataagcaaagtgggcatggaggcagaaatgcagactccggatgaaatatcttaaattccgttcagtaaggttgatctagctacagcttctgcagaatagttgtctggcaattaaaaccaaatttgagtccctggtataaatcaggcttgaatgtaacaaagccaagaacaatgtgtccagggaaataagtgaattctctccagaccacccccaacacctcctccactcaacacttgaaagtcagaattatgggactgaatgccaaaatcctgccccagcttgcctagtacaactggaagcctccttctctatgcttgcaggctgagcagctctcccttcatggctcccatgggctacgatgcaggaatgtataatgagctgaaacatcaagggagtctgggaaaagtggccttgctagaaaagcaactaattctggagttggatttgctttcctgcttaacaaacttctgcccacaccaacattcacagacttcctgaatgcttattcaccactgtgggatcccactcaacactgaaactcatttcacagcaataggctgacactatgggctcactgcttctctcatatactccatcaccctaacacgtctggacacataaagactcatttacagctacattattgaaatgggaccatgacagtcccagaggatgaaaggtcatccatcagccagagattttggatttgaagacatatatagtaactgataaaactttgggaaccaatatcctttttgcatttttattttttgactgcaccatgtggcttgcaggagatcccaaaccggggatcgaactcaagccccctgtattggaagtgtggagtcaatcaccactaaaccaccagggaactccccaatagccttttaataaaccccttttgattaaattatctagagagaaagatctagaaagatgcattccaatgactaaagagtggttattgcacactctacagaaattctttgtattttttaatgttcttttcgctaatctatatttcctaattttccctaacataagcattaacatttttaataaaaatatttttaaaatttaatcttaataatgttatcttgagtttccattaaactttatgatccatgaccttatgagtacacatttattatcaagactaacatgccaaaaaatggggaaaaatcctcagtaagctgaattcaagtgaaagaagattatattgtaaagaaaaagtaaaggagatattcactgaaagccgggaaaataatactctggaaaaatgcaagaaagtaattcggctttcttaaggttttatttatttttacaaatagttgataataactctgtaatattgacaatgctacaaaaatgttagaacaccaaatatgaatactgatctcatagttgataagatatataaaatattgattaactgaagcagaagaccattctgaaatgtttacaagtattagttataaattttatggatgctgccaagtcaaagttgtacatttgtggggggacattcatcatacattttgtttaatgtttaacaagagagaaatagctaagtaaatgaaaactgtctaatcatcttcccaagattcatctatgcttgagttattttataggactgtctctggttacactcacgtttacattccttcttcatatacatcttctcaaggaactaaaaaaagaaaaaagaccagagaagctaaaattggcaaatgaaaattgtacagtctgctcagaaccaataccatacctgaattcacaatctcatactccactgtatatccttatagtactcaacatctgatgttgatgactagaccatgctagatggtggactttggaaggtagttgcatatcatcagaaatgccgagattaattcacactcattttatggctaagtccagctcagcccagctcagcacagccttgtactgctcatctctgctattaaaggcctggacctctgtgtagctgagggaatgaagctgtcagtaatgcacagagcagttaatccagaagcagatactggaatgtgtatgtacctatgttcatgtaacatatatgaatgtgtatatacacagaaattaggggagtgaaaagagaataaatgctcacatataaatttaagcaatgactaaaggactatatatatatataatttacaataatagagttcctcctctcttttagttgaaatcttatggataaaatcaaggatataagatataagaaagggagaaaatattccagggttttgacatgcaggtgttcgcatgggactcagctatagccaggggcatcatctctcttcag

SEQ ID NO: 46974 - DNA, 1004 bp, Bovine  19866881145817
  misc_feature (1)..(1): n is a, c, g, or t
ntactgtgaaaatatagatgagaggatacaaaaatatgagtttacaagttgctctttgcaattaataaatcactcctaaatagctaagtggtggggatgttgaaattctatctaacgttgagatttgatgacccactcagcatgacttgttagcaagttaccctctatagtaccaaagttcttcctgacccaggaatcaaaccggggtctcctgcattgcaggcagattctttaccagctgagctaccagggaagcccgtagctaccagggaagcttgtaaatgtgtttcccacacatttacaactaattcaaacatccaagtgcttcataaaatcaaatctgatgaccaatatttttactcaagcacagtcatacaactcaaaatggggaaagtgtggcagctagctcaagcttgatagaacattagagctggcacaaactttgaaagaaatctagtctaacttcctcacttctcaacggggaaacgaagttccaaagaggtgaataagggaaccagtctggctggaggacttgcctcactttgcctctcatagctgataaacttgcctctctgcattctgttaagttcatgaaaatttttgcttaacccagaaaataacgcaagaacatttttctaagcatttactattttcacagtcactatatgatactcggatatttccatctttaagaactgcaaaagagtattgggcatttatcctaaagaaacgaaaacttatcttcacaacaaagtctgtacacaaatgcttataacggctttatacgtaataactaaaaaccagaaacaaactgaatgtccttcaacaggggaatggaaaaacgatggataaacatctgtgccatgaaatatgactcagcagtaaaaatgaaccattgatgtacgcaacatctgggatgggtctcaagggcttctgcttaatgccaaggaacaaatctcaaaaggtttaatatctttataaaagtattattctatttatctaac

SEQ ID NO: 46975 - DNA, 3332 bp, Bovine  19866881406138
  misc_feature (1)..(1): n is a, c, g, or t
naaaaccaaggttgcaaactggcaacacagtctgctgatacgatgtttatcacactgtcttaaaaatatttgaattagttgcaaaaaattagttgaattcgggtttaaaattatgtaaatttcacatttaaaaaatctaaatttttctatttctcttggggaaaatgggaacataaaacactactcaactaccattctcctgtagcagtcatctgttggaatttaggaactgctgccttttaaaaaaactgtccacattgatcagttccaccaatcagtaaacacctagcctatttcattaatattaacagcctgtgtcttgtagacatttgaatttgcaacccctgctctaaaagtacatagtcattttagtgtacacaaacactgactaaataggcttattaacatgttttcttagccataacttaatcacctctttagttgaaaggtatatattgcattgtggcaaatacttacataatttggaaaagaaattacctcgtatgtattcaaaaattcttcatttctattttatttatgcttttttaattaggtgggtttggaggatttgggacaacgtctaccacagcgagttctgcattcagcttttctactccagctaacacaggcactactggtaagaagatatcttatatcatttgtagaagaaaatgagctacagatcagatatcttttttaacttaaaattgctaatttttcattcaaaggattctttggtagtactcagaacaaaggttttggatttgggactggttttggcacgacaactggaactagtactggcttaggtactggtctggggaccggacttggatttggaggatttaatacgcagcagcagcaacagcagcaacagactagtaagtacaagaggttttcattttcagatatgaaaccataacaacgtagataatattatttagtcactgttcaaaacatttgagtagataccttttttgggggaggagttataaatatcatattccataggattccaaaagctacttctcatgttcaaatataatgatagcaactggggaaaagacagattggcatgattataagacctctgtgtttagtgtcattctattaaagtttttgttgttcgtaaacatgacacaggtatgtaaagctgtacagaaatacagcttcacggattgtttataagatgaatgccctttgtaaccactgcccatgtcaggaggtggaccctaaccagccacttcagaaaccctccacattctcctagtcgtttccccatcagaggaaatagttttgctttttatgttgatcacttccttacttttctttatggttttgttactcaagtgtgtgaacagtattgttcactttgatttgtcttaaatctctgtaagtccccctttttagttttcttttttatttttcaatttgttgatgaaatcagatcatttgtcctatagaagttgacagtcaggactttatgattgcattccttttgtatagttaacatacctttgtcctctgtatttcttgtaaattgggttggatgtaaggggttatttatattgatcattaagttttttgtttgcaagcctactttataaatagtgttatattttttttatcaagaggcatataatgtctgattgtctctattttttgtgatgttaccagtggccattggtgatgattaccaagatccattaattcattaggggttgccaaatggcattccaactgtgtgcttccttttccctctatttgttgaaatacttctgtaaagagaaacttctcctcatctactatttgaataagtatttccctttattcctaactttcaaaataaagatttggttccctattcttctccaaaggtaaccttttttttaaatatcaggaactgaagtatttaaattatttgatatttttaagtccattgctattttccatattgatatttaaattgttccatctttagccagtgtaagcctcttcaggttggttcccaagtcatgttggtacatgtgtagaattagtctttgataacttccttactagctggtgtggcagtatgttccagggttatcttgtatgtatgtatgtatgcttatatgcttagtcactcagttgtgtctgactctttgtgaccccatggactgtggcccaccaggctcctctgtccatgaaattctccaagcaaggatactggagtgggtagccattcctttctccgggaaatcttcctgacccagggattgaacgtgggtctcctgcattgtaggcagattctttacaactgagccaccagggaagccctttatcttgtatggattagtatatttaattatcacaagaactctatgaaatagaactcttattacctccattttatagatggagagagataactgagagaattgtgccttgtccatacgtcttctgagatgttgtaccggaaaacagatacaggttccttgacttcgtctgtaatgctccgtttgcttttttgcagttcgctacctcctaaaatcacttctgtttcatttttcttaggtgacttgattgattggctagaattcactctattcagtcattgaagcttagtaacttattaaatatgaatttcaagaattattaaccaataaaatgaagaaaatagaatttttcattcttgtgttacaataaagtaatatatctttcttactctcctcctgcaacaataggaagttaggtggaaatccaaatagttaagaagaagaaaggaaaaatgaagttttttctttgtttcttggcatgaagtctcttcaactatgttattatagttacacttatttgtctttggaaaaacaggagtttgaatctggtgctattcattttcagaatggaaagggctcattctcctctaagtgtgtgttgttaggtcaaggctctgggtatatagggtatatatactgggtttataaggttgctcatagtctataaggagatagagtaacaaactttcaattagattgtctaataaacattcagttataaaaaatatgtgtgtgaaagcactaaaatacaccatacaaagtgctttggaatgtagaggaaaaggcgactcttaagggacttagatggctggataaagtcagaaaagggtattctaggcagagggactaacattgacaaaggcatgaatgcctggcacagtgtggtgaatttgggacctgctgttgtaaggagtttgagtttactctgtaaagattgtgaaactttgcatcattttttaaaaactcctgtttgtacaaggtgccttgctgtctgattacactgcctctgatatg

SEQ ID NO: 46976 - DNA, 705 bp, Bovine  19866881956331
  misc_feature (1)..(1): n is a, c, g, or t
ngagattctaacggggagacccctcggttggaagaagtggggccatacacttacaggtgagtcctcagcacctgcctgccctgccaaccagaaaacgcagcagcaccccctgtggcctgagcccccgtctcttcccacgggcctcctcagtgtgctgcacgggaagcacaggttctgactacatctgtctgaagcgctgctggtggtgggcacatagctgtgaatgaatggctttgtggatgggccagtcccagcctgttgtgtttagaaatgcagctgcttctttctgagctggagaatgtggttactaagccatgaatagctgcttccactccctacccttttaaggtggcccctgattttctatggcttcccgggtggctcaatgggtaaagaatccacctgcaattcaggagatgcaggcggacatgagttcgatctccaggtctggaaggtcccctggaagaggacgtggcaacccactccaatattcttgccaggagaatcccatggacagaggagcctggcaggctactgtccatagggtcacaaagagctggacacgactgaagggactaaacacatgcatgtgattttctatagtgacctttaaggtctttcccttgttctctccccacatacctagtcttacgccagctcccagaattcattggttagtctgaagacaggccctttctgtctctt

SEQ ID NO: 46977 - DNA, 1928 bp, Bovine  19866880373610
  misc_feature (1)..(1): n is a, c, g, or t
ntgttcttgcctggagaatcccgggatggcagagcctggtgggctgccgtctatggggttgcacagagtcggacacgactgaaatgacttagcagtagcagtagcatgactatttctattgtatctgtctgataatgtacttaagataaaaataacttagagcttaacatcaaaaaaagttgatttagaaaatacttcatgacttaaaacttcagtttaagtgaataaaaatctctttaaatggaatatgtattttttcagttcactctttcttgcttcatcatttaactaaatgggcccccacacccactgtggcacagatgatttaagttttttgagtgctgaattacagttgtagcggttttagataggcaattcttttctgcctatctggaattagttcccaagaggccagtttctacaagcaggtctgaatggaggctctgtttcacttgcctcataagcactgactttaataaacataaattttaagtttaatcactcttcccaaagtaaataattttaaagaaaagtatgttgattgtaatttgttagagactctcaacttccaaaaagtatttaatctcaccattaaaactgtattgactttaagtaaatattctcaatttttggcttatgaatcttaaaaatgcacctaacagtttgagcatatcatgaacacattctccccaacttcaccgaattattctaacactgacttacacaaggaccacatgctagagcaacatgaagaagttcaaatctggtatactggaatatatttattttaattctcacttgagttcttctggagccaacaagaatctcttcatctctaaaaagcctgaaaagatgcactttctacttattcaagtacatttcaagaacatttcacttaagacctttatgaatctttaatgactctttctaggaccgtgtattgtatctcacagccttcactgagttacttcatctcccaatgtgtctattttgcatctctgtattgcagtctaaaaacagatgacttatgaacaagcttcacatcttagatctctgttgggcactgagaagggtgactggcataaatcaatgatattctaagagatctatggtcattcaaaacccaactagactttcattcctataaaacattccagtttacaattagagaaaggaatacaacagcaaagaactggttgctgtttctttaaggctaccatgagctaccactgacaccaaagctaagaagtgacttttcattgagtttgttcttctgatttatgctgacttctccacctcttgattttcaatcttcaaaaatcaaagatagtagcaccgcaaactacatttagaaaaattaaaagtgaaataagtatacataaaaggtccaatcaaaaccacaccatttcaaataatgagaaaaaagcttgtctgttttgtttacaattagtagaatatgtgctttacctgagaagatctacaaaatcccaagacagagaagcactttccctccgatttatacttcatttgttcctcatccactttagagaaaggaatgatatcactcccatagcggaaccctggagaacaagagaagagcatctgttaagcatatggggcctcattttctacaagctgaaattggccccacatatacattaacaatatatgcacactccggatcaagcctctatatactgttccctggaatcaaatttctgtcccttgtgatcaatgagggaaaggaagcagcagatccacaaacatatacaatatagagataattaaaatctaattatatttttttaagtagcatattctgccatctagttaccttgatgattatccagcctagaagaaagaacagcagcaaatgcaatgtactagttaccaaccaaatataaaccatgaatgactataaagtataa

SEQ ID NO: 46978 - DNA, 1254 bp, Bovine  19866880384772
  misc_feature (1)..(1): n is a, c, g, or t
nctgcattttctcttttaatcttccagcaagcagtgaagtaggcactcttgtccccattttacagataagagaactgaggctgaaagacattcattaacatgtgcagtatcacatagttaacagctagtagatttgaacccagggctgcaagagtctgtgtttctccatactattctgagttaggaagggttctgaatgatacactgaagagttgatgcttaattttgagagcagcatgaagctgtttataattttgaggagcagaatctcagagttgtgttttaagatgattaataggacatatggatgtaggatggattggaaggagaagggactagacatgagggtgccaattcttttggttgcaagcaaagaaagcaactctggtttatcttaggcaaaaagcaaattcattgatagagcaatggagaggaaagagttaaatatggtttaagtttaaagagtataggtgagtagcttttctctcttagctttttgcaattacccacatgcttcctttgcctgtcccctactctctacccgctaataggtagagttctctcttctagatagagggattagttaatacgagcaaagacttgtcgtatttgtagtctgttctctacttttggccatatacaaaagttgcagtacttgatttgccctttaaaagatgaaccagaaaacatgacacttttaacgagaagtttcaaattactcttaaacaattcaagtaagatgtctgaaaaaacatgtactactcttatgtgccatgtatttccctcttaattttttgttgacatttttttatcattagtttttattaagacatatagaaacgtgtttctttttaatcaaatactttgcatgaacagagtgagaggggctaataaataaacattggatcacagaatctgcccacagacacacacgtttctttgtttcttcgagtgaagatgcacgcatgtgcttttcctttttatccgcccaaggtcagactccttggattttgatgatctttctccctattaaacatacaatactatatagtgaaagggctcaaccgtacatagaacaaagaccctgaaacagggttggagtttttttaaggagccaagagcctgtatgtgtatgaataccctaagtaattaaaaatatatatatatagacaatcctaccccagaaataaaataaatttaaatgcagaaaaatatccagcatatcaattgaatgtttctgaatagaaaaatttt

SEQ ID NO: 46979 - DNA, 1892 bp, Bovine  19866880605095
  misc_feature (1)..(1): n is a, c, g, or t
ntggtcttagtagcctgtttatcatcttccagtttcagaatactccttgtttaaattattccttctctccccactatacactgttcttctggaaaattttagcccacacttatctgtcgtaccatcttgttggttttcgggagggcaggaaacggaaaaagcaatttgtgcccaaatagtccatctaatggataaactcttctttgttccttaccctaagataaccctttatctgagacaaggaagttcaggtgtgcaacagttcaggaacttgaaggtattcctggtgcctggaacccaggttagtatgtgactaaatgtgacagggagactaaggaggctcagggaagaccaaatccactaataagataatagatagtgatggagtgaaacatataagaagcagggttgctacagtgtagcagaatgtaagaatttgtgtgtatcacttagattttgatttatatcttaaatataatcgaagtccaaatagcagtagtttaaacaagacaaaagtctgttctttcttgtacagaagaagtctggaggcagaccatcagggaaactgataaagtcatcagagttccaggctttctttttatttcccaaccctcatcgcctttatcctcagcaaccagcgctgactacatctccagtcgtcccatccatgtttcagacagaacagaggacagggcagagaagagcacatacactctccctaagctaaggaggtttcccaggagtccctttcaacacttcttctatctcattggccaggccttactcacatgacctcatgagcaaaagaggctggaaaatgtagtcttttgactgggcagctgtattctaaatatttggattctgctaatttaagagacaaggaaagaatggctattttggtaggcaagtaagagtctctggcttacagtaattatttaaatacattcagatcccaaactgtgaatacagttctatttatgtatttatttatttaagcctaaatcttacacagagaacttatacatagatactagctacatatactatgcataaaccacacagatattagcaactcgtgtgttgcaattaaatatctgtaatgccatatggtttcaggtgttttcaaaaggaagagtggatagctgagtacaattgtatcatgtacaaattatagtagcatagcttttttccaggtagtgaagatggactgggtgatgatatttaatgtaatgtacagatgaaggactgggaagagaggcattgcatctgtcagacattcccccgcccccgcccccgctccacaacccccagcagggtcagtaaccctaagcaaaagaagatggagtcagctttgggtgtgtgtgtgtgctcagtcatgtccaactccacaaccctatggaccgtagcccaccaggctcctctgtccatgggattttccaggcaagagtactggagcaagttgccatttcctccaggggatcttactgacccagggactgaacctatgccttctgtgtctcctgcactggcaggcggattctttaccactgaaccacctgggaagccccagcttgggatggtttgaccaaacctcactcagaattttctggagttcatcaacaaatacaatctttgctgagaagcttggatctttgtgggcactgagggtataaaccctagatgaatccagactaatacattctgaacttaaaaaaattcctgagggatccctttctaataaaaaaaaaaatcgtatgcgggtcacacagatttttaaagtttgggtccttacatgaagagctggtgtccatgttcatgtttcaggaagaagctgttgaaagaactgctgtgaatcaaacccaatgggtcaggtaacactgtgccacagaagg

SEQ ID NO: 46980 - DNA, 1281 bp, Bovine  19866880824068
  misc_feature (1)..(1): n is a, c, g, or t
ncagggttatagtccatgggggtcgcagagtcagacatgactgaagtgacttagcatgcatgcacgcttaaattagataactaatgagaacctactgcatagcacaggaaacgactcagtgttgacctaaataagaagaatatccaaaaaagaggggatatatgtatgcatatagctgattcactctgctgtacagtagaagctaatacaacattgtaaagcaattatgctccaataaaattttaaaaaataaacagaaaaataaaaatggtctcattaattacttggatagagggtgacatgggcaagagttaattggttataaataaggattatttgggagaaacaggaagacttttcactggacagctagtggtttatgtgacagagggcatgggagaccaattccaaatggaatatgtatttggtgatacaaagccattgcttcttaaactgaattctgccctatagaccttggatataacccattcaaactcctggccagcctcctacactggcttagtcaacatgactagttagttctaatacaagccagttaaggaaacatggagggttgcaagagatggactccatctgatattctgataacgctgatatacttgagttcatatatttgaatggggacatgatgtccagttggtatagaaaaactcaaatcagcaaagtaaaaacaatattcctggcttctgttgcatattttgaatcattctgtttcttttttcatctgccctgactgaatcacacatttatttagagtttgtagttctaagcatgactcaacagaatcaccttctttcaaatgctactaattaccatggacttaaatagcaaagattttttaaaaagtcatttctatgggtgattcagagtagatgttaaccagaattccttaccctgtaattttaacactgaagtaagagctatatatcaaatctttgctttgttaggtttcttcagttccctgttaggcttcttcagcttcttcttaaaccaagaagtatagtctatttcttcctgcaagaagattcacttgtgaggcattgagtgtgtatttggggttagtgggattgactgtggcgagaagggaaaagtgatggagcagccttctcttctacatcgttgagatggagattaggggacctcagagggtggctacctttatctgattcttactaattagttcttactatttcatttggaggaatgaaactacagagatttcagtggatacagaagagtacattttgccgaacaagcatg

SEQ ID NO: 46981 - DNA, 1023 bp, Bovine  19866880487360
  misc_feature (1)..(1): n is a, c, g, or t
nggttagatatgttagtgaacatttttgatttcttcacccagtcaaggtcccaacatctgggtacaacagttgcttctccccagggtgcctgcatcttgggtaatcagtgggaaaattggaaccatgagattggcagggggctctgaggatgcttgcagccagacgtgatgtgggtgtggatgggtctgaaccagcccagtgagaactgggcccaagaggatgcccaggccacagtgtctccaggcaggcaggtcgtagtgctgcgcacccccagatgcaaggcagaagacgggcagcgcggcctggggggcggcagtacagttagaagggcttcctgagagtgcgagagcgagagggaggcagcgggatgcatagctgagaggggccctgctctggcaggctgaggattgggcgagcgtggaagcaggagctggccacagggctttgggcgatatgggcaggggtgccattttccgacatggtccccatcacagcgagtgtgcgtgtgcgcttgtcgggtgtgaagaaccgctgcttcctctgttgcagacagaggagggggccctcctcaaggttaggggatgagtggagccgatgggggtctcttgggctgggagggggtttcagcagagcaatgaagggaggccctcggactctgaacccaccaaccttccggaatggggtggccttggctgggggaggcagatgggccctccaaggtgctctcatctggggtcttgtgtgggcccccagtaaagtggctgtccctatttctgggaggagaaccaggcctggcttgttggctgtctgtcctggggaccccactctgaggaaccccatgttttttgtgttgtcctgctgtctgtctcctgtctgtctcccaccaatgtttctgtcccttcagccccagctcttgacccagcaccccatctctgtcctgcctgccccccagtcctcagggacccccaaaggggcagctccgaaggctcttccttgctctgtcccagtccccgcctgccccc

SEQ ID NO: 46982 - DNA, 1416 bp, Bovine  19866880592867
  misc_feature (1)..(1): n is a, c, g, or t
ncccccccggcgggcccccgccgccgcacagcccctactcggggccgcccagccgcggctcgccggtgcgccagtccttccgcaaagactcgggctcctcgtcggtcttcgccgagagccccggaggcaagacccgcagcaccgggggctcctcgacggccggagcgccccctcccgagctcttccccgggcctggggagcgcccgctcgttgggttcgggccgcctgcgccagccaaggacactgaaaccaggtgagggagctagcgaggctcggggctgcacggtggggagaggggagacggcagagtctgtctgagacccgggagtccttctagacccggagtatccttgaggggtcaccagagtatcttggctgcggcagggcaggcatttcatctgccagccccaagggaccgatgagagggccccagacaaggggcctggagacctgggtttgcatctggtccctgagccttagtttccccaactagagttgaggctagagcacaactctttatttaatgcctttcctgctcaggcacaaaacgtgccaccatgagagctgtccagcacaaggccggctgaagtccactggggagggggtgcttgtaagaagtggggatgagaggggcacatttctttaagtagcctccgagttggggaactcttgcctatcatccagcttcttgctaagggtgcaaggctggaggaggtaaccatggcactgacctgcccccctctgccctcaagcagcaccactgagaggtgaggagaaatgatacattcacatagctttcttgtggcctgtgtgccaggcactgcactgggcactgtttatgccaaattgggcaaacccagctcctgccctgtctagtgggggagacacagtgaaaaaaaacaaacaaaaaaacttgttcttcccttgggagggtgtactcctaaggtagttgggtactctgggatgacttcagagaagaggaagggagaagggcgtgcctagcaaggggaatacatgtgcagaggtccagagaggcctgggtggggcccattagggagctagtgatgaagagatgagtctggagagggagagggtgactgtcaaatggggaagggcatttccaaagttatgtgtgtgggagggctgtagatttgatccttaggtgttgaggccctttgaattgtctatgtgctgaggaggaaatggttttcctctaattatcaatcttaggagaggggggctgggcaggagggaccccatgcccagcgatggggttgatcaaggctactgtcttccctagggagcgcatggaggccatggagaagcaaattgccagcctcacaggcctggtgcagagtgccctactgcgaggttcagagcctgagacccccaggtgaggttcttttcccaacacca

SEQ ID NO: 46983 - DNA, 3102 bp, Bovine  19866880635774
  misc_feature (1)..(1): n is a, c, g, or t
ntcttaatatcttctgcttctgttaggtccataccacttctgtcctttatcgagcccatctttgcatgaaatgctcccttggtatctctaattttcttgaagagatctctagtctttcatatatatatgtatatatattatgtatgttatcatatatatattatgtatgttatcaactgcttaattatatatatataattaagcagttgataacatacgggagcttgagcacaaataaagcccacaatggacatctgtgtaatgtatatactaagaggttgattttgtcattgttacatttgacagcaagaaaaaattaatttgtttctgttcattgctgtgattaaaccaagagttggttttctttcagcttcaaagagtggatattctgaatgctttttatttgcagcatgtgatggaataaatttccaagaacatggtaatactgtacccttaattagaaatttgtcaaaactcaaaattataccacccagtattaaactactaaggaggattaggtaagaagcaattactcaaatataaaaggctaatgtgtccattctttaagatgctacttctacatttttctgaactatgtaaagtgatatgaagaggccaatagatgtcagcagattatatgttacttttttccagtctttgataagtgatttgtttttttaagttcatttgacatagtgtgaacactagccatgagtactgtgatataccacaaggtagagattatttttttctctgttggcatttagtaaaccaacccctgtgccatacaaaattaatctcttcaatggggtaaattcaagactagttggtataatacagtaatgttgatggccacaatcaagagtttatttaggggaaaaataatcaagagctgtgatgctataaatttcacaactattaaggtaaaggaaatgttccattgaactccatactcagttaaatgttactgagatcctacagatcttataataattaatcatcccattcctaggaagactaatggccatagtacagtgacttcgtaaaataaaatctggaccctttgtatattttcttctaatctttggagaaatcattgcagtcctcaaaagaaatcttcctatttgaaaatccattgctcctattccatagacaccaattttgggaagtcttctaggaaaacatgggaagtctatagccaaaatggcaacagcagtaaatgcactgtcaattacatgaaaacaagagatgcctggaatgtattctgagtccagactgactttcaagaatttttcaagaattttccagacaagcattctgacatatcaaattttcttgcagtatattttatagaacagcccggccccaaagataattacaagatgctcaaggagaacaaatgtagagaaagtggtcaaaattgttaccaggggaactatcaagaaagcaaagtcaatgaagaatcaaggtctccaagtgtgtgaggaaaaagataagtgctgtgagaaaatgatcccgagccctctgcacaggataaggagtgtaggcaaacccaagccctcaatgatttccagcatgcttgttccattgtggtcactgacaaaagattccttcatctgcttttgagaatttttcttcttctccagggtttcaaaatactttgtccaccagagagcccccaattctggatccgcatgtccctgatgagtcagggatgccctgtgctgaatgtgtgctctgccccaggagaggagctgtgggttctggccacttagccagagtgtcagttcatggctcaagtgtctcatgggtcttaatatactgatcttttacctccttggttaatttattcccaagtgttttattctttttaattttattgtaaatgggattgttttcttaatttatttttctaagagttcattgttaatatttggaaatgcaactgatattttgtatattgatttttgtacccttcaattttactaaatttgtttattagttccagttttttggttgagtttttagggttttctatatatacgattgtcatctgcaaatagatacagttttacttcttttctaacttagatgcctttaagtttttccttatctaagtgctctggccagaaaacttcaggtactatgttgacttaaattgtcaatagtatgtatctttgtcttgtacctaatcacagaggaaaaactttcagggtttcaacattgagcataattttagctgttgatttgtaatacactgcctttactgtgttgaggtatattccatctgtatctaatttattgagaattttttccttgtcatgaaaggttgttgaattttgtcaaaggccttttctgaatctataaagatcatcatacaattttcaatttttattttgttaatgttgtgtatcacatttattgatttgtgtatgttgaaccgtctttgcgttccagaagtaaatcccacttgatcatggtgtaatattcttttttaaaaagtaattttatttatttatttttggctgtgttgggtctttgttgctgcttgggcttttctctagtagtggctagtgggggtcactcttcgttttggtgccccaggcttttattgcaatgacttctcttctcgtggggcatgggctccgcaagggtgagggcttcagtagttgcagcacgtgagctcagtggttgcagctcgctggtcttagaacacaggctcagtagttgtggtacatgggcctacatgtgggatcttccgggaccagggatcaagcccatgtctcctgcactggcaggcagattctttaccattgagtcaccagagaagccctgtgtagtattaacacactattgaattttgtttgttcttattttgttgaggaattttgtatccatgttcataagagatattggcctgtggttttcttttcttgtagtgtccttgtctgcctttggtgtcagagtaatgttggcttcataaaatgagcttggaagtgttccctcttcaattcttgagaagagttggagaaaattagcgttaattcttttatacatttttggtagaatttatcagaggttttttttttttttttttttaat

SEQ ID NO: 46984 - DNA, 1966 bp, Bovine  19866880643889
  misc_feature (1)..(1): n is a, c, g, or t
nagggggatcagagaagatgggaccatgtcgacctctagtacagctttgttgcgtttataggtacttgtaaatctgtgatttcatttcatttatttaatcgtttattcatttatccatccattccttcattcaatacggacttattgaacccctttctctgtgccaggcactgggctaggctcagaggccaacagtgacaagacagcgaaaggttcttctgttgcttaagtggtgtggggatacgggttaaggggttggcagagttcactggctgtggggcctgaggctgtggcctggccagctgactccaaagggcagtgacccactgtccaccgatgcccatccgcccctgctccccctgctggcggctgctcctcactgcatgtctctgttgagcatcccaatggcactcctctcatagcgtgttcctgccaagcaggcagtgactggacgtcccaatccatgcaacctggggactgtgagcagcattgttgggccagagcagaggccactttagagggcctctgggagcccacctccacttctgtgcccgggaccagcagcctagggcactggacttgagagtcagcctgatctgggttcaaatgctcacttaagccatgtctgagctgctggccttggacaagccactttccctctctgagcctcattgtctttgcctataaaatggcaggcttgttgagaagagtataggaaaagcagcagccggaccagagcctggcccgtagcaggggctgccccattgtggttccctttctgcacctcccccagcccctccctggggtggggcagctccagccgggtactgtctgagtgctgcccctgtctcaccttgaagaggggttgcagagtccctgtcttggctgtttgcaggctccgtgtcccccagcccttctccactctctgaaggatgcttcggccccagtccgggcaggcagatggggcaggcagccctccttgccactgtggctgccgccgccttgatggctttttaataactttgctcggagacaatctgcagagcctcgtttgtctgcctcttaattaaaattaccgttttcctaaaagagcaacgatgctgctcccctccctcccctatcagtggctgctgccaggagaaggcagaagtgacttgaaattgctgcctttcccctcggcccctgtcctggtcacacaagccaccacccaccctgccccacttctcgacacaaacaggtgggccaaggctgagtgtcaggaactaggaaaggaggaaagagtgaatgtcttcctctttcacttacactcttccagaatactcccagagacagggagctcagtccctctcaagacttactttctacatctgtaaagaaccagagcaacccctgtccggctgtaccacccagagtggaataacatgtggggaggggggtttaaaatgtgctgtgaagggttattagattgtttgtggtggggcaggcgtcatctggggccagaggcctccctggaagtgggccctgtggggtcagctcctctgcctactctagttagaaggtacatccacattccctccgtgattcagcgagagcaagggagtgcagggctggaaaggtatggggggttcgtttagtcattactgagtttgggggggaaagtgttcctggtaataataaaaatacaaatgactaatatttactgaattttgctcaaaactgtatgagccatatgctggatcaagccctgtacctgtgtcccttcatttcaccctcatagctgtcacatgagctccatgctgtaatctctatttcacaaaggtggtgacagaccagagagcttaagtaacatgcccaaggtcacacagatgatccacccgtggtaactgcagcctactccccctcctgccgttgtaccttccacctgaagtcttcctgaagtctagcctctgtccctcatgctgcatgt

SEQ ID NO: 46985 - DNA, 1295 bp, Bovine  19866880687584
  misc_feature (1)..(1): n is a, c, g, or t
nccttcagccccggagccccccaaggctgacctctttgaacagaaggtggtcttctctggcttcgggcccatcatgcgcttctccaccaccacttccagctcaggccgggcccgggccccatcccctggggactataagtctccccatgtctcggggtccggggcctctggaggcacccacaagcggatgcccacactgagtgccacccctgtgcccgctgaggagacccctgagacaggcctgaaggagaagaagcacaaagccagcaagaagagccgacacgggccaggccgtcccaagggcagccgcaacaaggagggccctgggggcccagcccttccctccctgcccggtgcccagctggctggcttcaccgccactgctgcctcacccttctctggaggttccctcgtcagctctggtctgggtggtctggcttcccgtacctttgggccttctgggagcctgcccagcctgagcctggagtctcccctgctgggggcaggttagtgacccttggggaccaagggtgtcttagggcccagctagtctagtgaggggacagagacataattatgcagttagaaggaaatgtgacagaaactgctccagaagacaaaggatggaggtgacagtcacctttgagacactcccccacacccatctcctgcatggttgtgatgggagagattgccaacaggacttaaccaagtgtgggttggggaattagaaaaactgggaattcttcaggcttgagcagggcagtagaataagcaggcttggcaagtaggtgtcactaaggcgagaagtgacatctttgcagcaggagggtgagactggtgtgtggcaagatccaggggagtgttggccttggggagtggctgctccagccacctgactgaggaggggcagaggagaggcgactctaagcgtccctctgtgtccttctcgtgcctgtaggcatctacaccagtaataaggaccccatctctcacggtggtggaatgctgcgggctgtctgcagcacccccctctcctccagcctcctggggcccccagggacctcggccctgccccgcctcagccgctccccattcaccagcaccctcccttcctcctctgcttctatctccaccactcaggtgaggccttgctcctgggctcctccatccctgggcaggtgggggacagcctgccgaggaccccagctttccgtgggaatttgagagattgggcttgatcaccaccagaacgtctccctctttctggtcctttctcctccccagcacacctg

SEQ ID NO: 46986 - DNA, 1544 bp, Bovine  19866880735930
  misc_feature (1)..(1): n is a, c, g, or t
naattttccagaatgctcaacattttggatgggtaatgtcctattctcacaccttttactgacacagagagacccattcatgtatgcatcccttcccctcccttcctctcactttcccttcttgcagggcaggcacatggcatgtgcccagcacttgctctgatttaatcctatcatggtcccaggagctacggaccagtgtccccaccgatcagagaaggaaactgaggctcagagaggttcagtgacttggcttgccgctcacagctagtgaaatggtgaaggtgctgggcccagcatttaaatgtgaacccccagaattactgctatgctctcactaccatctgttttatcagtgaggctgggtgagctgtttctagtcttcaaaaaaacacccccaaaaccccttgtccatccagcagcctgtttctgacattggctgttggtgaatgcactcattcgctttatttatttaagattggcatctcagctccttcaagaaggattcgaagtggctgacaggtaaattgccctgtaagataagacactttcatgataaagtagaaagcttaaatgcattcagagcccagctttggttagattaccatgcttggaccactcactggcatcttaaatcttctggccgctgagggatgaaggcacccccagggtcctcctgcgtgcgacgtagctgctgcaaggcctctgtgcatcgcagccccgggtctctcttgcaggcagaaggcagaacgtgtgaggacttccaggacgaggactcctactcgtcctcccccgacagctccttcagcccctttgacggagacttcaccaccacctcctcctccctcttcgttgacagcctcaccacggaaggtaagggtggggaggagccatggccctggagcatcactgcccctaatggggattatctcagggaacagggttgttgcatcctatcacatctgaggctcccagagcagaggtcacttgctagtgagatacagagctaggtttaggacgagtggactccacacccacgtcagagttgtggaacagaattcactgtggcagtgggaaaaattactgtcccagcacaatgccaattagtttacataataacttgattcatcttaatagcaattctcagagaacctgtgagatcttggcatcccgatagcaggtatgaactcagtcccacacactcagatgtcagagaaagattgcataattttttctgtgacttcccttctggttcccacccctcattgggctggtgtggtgggaagttccaccctcgccgtgctggggcttgactttccactcctgtgatgtccagggggcagagggtagtgcaggacagctctgaccatctggagttgttgctgaactgcttcttcaggcctggctgtccctggggccttctctgccatccccatgttactggtgcaatggtgattcctgggttcttgtcctcacaagggaaagaaatcgatctagagacatagaacagttttaagcagcaggagttttaataagcaaagcaa

SEQ ID NO: 46987 - DNA, 1092 bp, Bovine  19866880764515
  misc_feature (1)..(1): n is a, c, g, or t
ncagacggtgatgatccctggggccccagctgaaacctggggaagagtatgaagagctgcaaagagaggcccataagcctcagctagcgtgacggcaagaatgattcctggggtgaagcatgggtgatgaagcagctggaagctgtgaagtctgggtgtccggaagctgtgaagtcacctgtctttcttcacgctgtagaaagaactgcctttgttctctcttaccctgcttgggtcttttaagcagtcttatcctcaataacaactgctgctggttgggccctggtgggttggttctatgcacagcaatggctctgcttctttttttccatcttaaatctagtttctaactccagatgaaagatggtatgtttcagagaacatgataccagcttgcccaaagcaagaactgtcaggagcaaactggcaggactttctaattacagggcagggatcagagttggaaataaaacacttatcaagtattagacaaattgtggtgggttctctacatttctcctggttcaggctggaagtggacaagtcttcagatggtagacgtggaagttaactatgactgatgacttacaggaaatccagacttgagaaaaataattagtgtttataaaagtgatgtcatttaagagggtctcttctcatacactgattcactaaatcagtatctgtatttcacaaatgaatgtaaatccaaagacatcatttagtcctcagcttttagattttgttcttaattatcgactgtatcctgatgtaatcccaggaggcgttggtagaggcaggggccatggaagtgtggatacatttgggaaattcatcagtaagacttggttcactgatttctagcaccttttggaaatggtgactatttttgcagcccagatttggaggcaaagattccaggatatgaacctgtggagagggaaacagcccagcccctacttgtgccttagctccagctggaggaggatgtaggacttcacatactcatgtcctgggtcatctgaggtgtgacagggaagtcactgtcccagcagcaagctggcttgtagcactattacacgtatcagccca

SEQ ID NO: 46988 - DNA, 2821 bp, Bovine  19866880816068
  misc_feature (1)..(1): n is a, c, g, or t
nactggtgcccgggcccgagctggaagagaaggcgctggtgctgaagcagctcggggagacactgaccgaactcaagggtgagcctgggggcacccccagccccaccccaggcattgtacccccaccccactgcctgtcctcccagctgtccagagctgctctctcctcccgctcactccttcccttcgcctcagctcacttcccaggcctgcaaagcaagatgcgggtagtgctgcgtgtggaggtggaggcagtgaagttcctgaaggaggagccccagcgcctggatgggctactcaagcggtgccggggggtcacggacaccctggcccagatccgaaggtcattctatccctgacctcctatctctgacctgcgatttcccatggggtcacacaccgggcccagatcccttatcccaactccccgcagaggtcagcggtgtgctggctggctctgcactttgacctgtcaccccttgcatgttgcaggcttggcgctcccatttcccagatgcagtcacccctccccaggcccttccatctgttcggcaagatcccagagcccccctcacaccccgcctcctccatgccaggcttccctcccagggagccacgaccctgctgacctcacagctgctcccaactctcccaccccaggcaagtggacgagggtgtgtggccaccccccagcaacctcctgagtcagtcccccaagaagatgacggctgagacggacttcaacaagagcttagacttcgaaatgccaccccctagccctccgctgaacctccatgagctgagtgggccaaccgagggggcccctccagcccccaaggcgggcaaccccaccaaaggcctggacactcctggcaagagaagcatggacaaggctgtgtctgttgaggtgctgggcgcgggatgggggggctggggctaggctcacacattctcaccaccgacctacgttggccagtgccgacacgtgggacttgttcctggggaacaaggcaatctgagaagcatactgagggtgacatcagtcctgctagtcagggaagcatatcataaacctgtgataatcaaggcagtacaagaaaagattatgtgctcaatgaaacagaatagaatgtctaaaagcaggtctaaatttctcctgagagtacttggttatgaaggtggcattccaggctcgcagcaaaggcatgtaatactcaagagaagcccgaggctcggatcaaatgggaggcttcctttgcataccttgcatgtgtggctgaggccccagaagtccaggagcagggcagctgcttcagtgctgactgttggccctcctctcaaggctgctgagcgggactgggaggagaagcgggcagccctgacccagtacagcgccaaggacatcaaccggctgctggaggagacacaggcggagctgctgaaggccatccctgacctagactgtgcgagcaaggcccacccaggcccagcccccaccccggaccacaaaacccccccaagaccccccacggccagaaggcagccccccgaacggagcccagtgggaggagaggttcaggtatggggcaggtagggggttgcaaagagcccagaggaggggagccccagcctcaggaactctcaggttgatgagggaggtgcttgggagtgaaaatctttgtgggtgggctattagagaaacggggtgctggcctgacccttggccactcaggaaagatgggatagtgcaggactgcatccagggattttcccacagctgctgagaggaccacactgggaggatgagaaagttcaggcagagggttgtgcccctgcacgttttgtccaagcatgtgtggcaggagccaggctgtgctgagatggggtgcagccctgagggatgcagatggggttcctgtgctccccaagcctgtgagctcacaggggaagcagaaacccaaataggaaacagcagatgtcactcattcatttattcattcttgccacttgtatatttgttaagtgcccattgtgtgccagggctttccccgtggcgctagtggtaaagaacctgcctgccaatgcagaagacataagagatacaggttcgatccctgggtccagaagatcccctggagaagggcatggcaacctactccagtattcttacctggagaatcccatagatagaggatcttggtgggctacggtccacagggttgcaaagagtcagacacgattgaagtgacttagtgtgcacgcacacgtgtgctaggtgctggggataaggagatgactactttcaaggagctgaaaatgtagtaggagaataatactaacatctgtgtttatcaggcacttactttgtggcaagaaaaaccccaaatgctttctatgtattaatttttataattttgcaacaagtccagaaggtggatacagtaattattcccattttacagatgaggacactaaggctcagtgtggttaagtaatctgtcccaggccatacccagtgtgtaaaccagaaacaggaggcaggtgctaaatgctgttctgcaggagaccctgagagggcaggaagtccgtcccatgggagggggcttttcactggagtcttgcatttccctggccagtgagagagggcattccagggagaaacatcatgtaccaatgcctggaggtatgtgtttggtgttgctcagctgggtccaggcctgagagtagcaagcagagctgaagctgaaaggttggcaggcacagaggtttggggttgtggggaatcactgggggatcaaaggaagaacgggggcagggagag

SEQ ID NO: 46989 - DNA, 1932 bp, Bovine  19866880829104
  misc_feature (1)..(1): n is a, c, g, or t
ncccatgagtgtgtggggggcagactgtatgcccaacaggctgcagagaggtgagcagactgcagagtgatgaagaggccaccagagcccaggcatgaggctcagagtgggcccgggccgaggaatgaatggaggagaggcgatggaagtgactggaggggcaggagagagggcagcaggcagaggagctgggtgccgggggagttggggaacctaattacagaggagggagatgcccgctgaagagactgaggcaaatgtgtgtcagggtagaggggcaggaggggcggagggtgagagacagaggtgtcaggcagtctggatttgaaaccccctccaccgtttgtcagccgtgtgactttgggtaaagcgtcagtttcctcatctgtcaaatgggaataataaggcccttccttagagtggggagtgtgcagtgggcgaatgtgtgtctggcagaatgtcagctgcggttctagaccccgaggagagaccagcctggacaggacacaggaacaaggcggtgacatgaagaagggctggggtgtgtctggggactcgcgaggaagacagcgggccgcggggagctagtgaggggcctggctggcccatctccactggactctgagagaacccgcaggcctgtgtgcccaaggtggctgcagagctgtgtggtggaagagctttgagatcctggggtcccagtcctggctctgatgccaccttgctgtgggcccttgggaaattcccttccttttctgagctgtcccctggtctgtcaaggaggtgactggatttacccatctctaacctcctacctctgagcctagaaccttcttcaagtcatagcatctggacatttcctttccccactcccacccagcacttagaatataggaactgcttggaaatactgaaccacatgaatgaactaaaggtctttcctgacatctaggcccggggaccaccctgcatcttctgatcagggcacaggtgggccaagggtgaggctgccacctctacataccatcctttaatctgaaagagggcacaccactcctatgcaccccactacaacccaagcacaaggctgaaaaggagatgcaagactggcttctccctcagttgggaggtggcctaaaaactaagagggaggctgagttgagagcagagggccaaggagcaggtgggatctgagagcagaggggaggaggcagaggagggggaggagtggcaggaagaccaggaataaaggccccctcccacaccccagggaaccggccttagaagggcccaggcatttggggtccgctcactccgccttgtccaggagcagctggggagatggtcctctctggccctgagtgaggggccttctgcaagaggagtgatcagtgatctggctatgttctcaaccagatcctgagcactggtactggagagaggaaggagaaaatggtttgagggaccagtggggtagtcctgaccggtaggacctccctggacagccgcaggatggtgggcacaggaatactggcaggagacagccaggcccagcaggagtgtacagaactgactgctggaggctggaggtgaggtgggggttgggggctgcgtggggccgcggccctgcccccgaggcgcccaggcttacctgctgctgggcctggatcctcatgtactcggccctctgcttgccatgcttgcctttgtcggggctgcctgcctggccctgggccgtcttcagccgagaggcccctggagtcaccaccttcatggggggcacgctgccaccgccgctctgcacgaagaggaacagggtcagagctggagatgggatcacacaggcgccctaggtacagtaggccctctgagacctggagagccctccccggcttcatacccccatccaggactcaggcccactctctgagg

SEQ ID NO: 46990 - DNA, 1187 bp, Bovine  19866880835103
  misc_feature (1)..(1): n is a, c, g, or t
ncaacgaggaccgtggtgaggttctggagcaggagaaaggggctctgagcgatgacgagatcgtcagcctctccatcgagttctacgaaggtgtcaggcaagtctggcccacacctggccctttcagggtcctaggcaggtccctcccctctgccgtcccccttccctgggaggaaagggcacttccgggagggccttccagatgtttgtgtgcagttaggtcctgcctgctccaggttttcccttgcttcattccttctccttctgcagagaccgggaagagaagaagggccccttggagaatggggatggtgacaaggagaaggtgagtgctcgggcctgcccagaatggagtatgggctgggagagagtgctgggggtggaccccagcccttgggtgcctcttccccagcagacaggtgtgcgcttcctgcgatgcccagcagccatgactgtcatgcatcttgccaagtttctccgcaacaagatggacgtgcccagcaagtacaaggtaagtccctggccccttttgaaacatgtgtcttgtttgtggatgtgtctgacaatctgtgcatcctagtcatggctcatggctggtttggtgtcaccaagggcttgcgtgttgtgtaacagcctgtgtagaacagtaactgaaaacgacattcaggtgcggcagtctacttctgctgaagccagtgtgcagaggtgcatgggaccaagacagtgtgtgcatgcctgcatgcttagaactacggcagagctgtgtatgtaaaaacttggggccatatctagggccagctggctagtctgaaatttccaaggagctttaggatatagcttctcaaatctgaacatacgtatggtcccctagaggtcttgttaaaatgtaattctgactgagtagacattgtgtttgtagaaagctcccaggtgcttctggtgctgctggttcatggactattgaggctctaagacagtagatcccaaactttgccacatgtcagaatcacatgaggagtaacttctcaagattaaaactcgattcacatcttagcagttaaaacaatctctggagcgggatccaggcatgttgtgattccaccgtgtgccttctccctggggccctttctgtgcctgttcgctcctctggagaacatgccagagatagaaagggacccagagcactg

SEQ ID NO: 46991 - DNA, 888 bp, Bovine  19866880837693
  misc_feature (1)..(1): n is a, c, g, or t
ngatagaatctggaatcagtagtcttttaatatttgaatgaatgcatcgacaggaagaagcctgaagaatgggaaagcctgaggcagtgaaaagaatgatgaatatagcaagacatagaaaatacaagtggggttgggaccaagcacacacaatatggagttatctgtagccctataatggcacctctcagttgtatcacagcctaatgaaaccatttccagctctttagcccttgccctcaacgcccgtgcgttctctggggccatttaatcatttctgaatctctagtgtccatctaagtccctggcacatagtgttcagaaaaggggtccgatcaattaaaccaatgtttctgtgtcccaaacaactactcccaagctcctattgaaagtactctggggtatcattcattccgcagccttcaacccccaacaccgctcactttgtatcgcgagctctaggtgacgtcccgcatttattacgtaataagacagcgccctggggaaagaggcggattgagcaaactccgggtcacgtgccaagattgggcggggcgtcggagttcatatcccagtgtcctttgtatctacttcctttttgtccctttccggccttcaagatgtcgaagcgaggtgagcttttgactttggaagatccttcgccatctgttgcgctgtggcagctggccttgccggcagcggcggccgtgggcagctggggcgatttgctatgcgcgaggcccgagagggcttggagggttcatcgggagagcaccgggagagcccctgaaagtgacgggggccggctggagggttgagttggcaggatccagtcgtgactctaggtcgaactctgcgggttcactccgcgtcaccgctgcagtaacg

SEQ ID NO: 46992 - DNA, 1031 bp, Bovine  19866880867784
  misc_feature (1)..(1): n is a, c, g, or t
nctcccaggatttgttgtgaggataagtgaggggctgaatgtgcgcctggcacgctgtaggcacttagtacaagatccctctttaactggtggtgctgacgcacaggattttggccttggctccagtgtggtctgttttttcacccactagttggatgaagatatataaagcatgctgataagatttgttgatgacacagagctttgagggggagcaaatctgttggatggtagaactgagattcaaaagttgttcctcactggattgttgagctgatttccaacagatgggatttgacaggaatgtatgtgacgtcctgcatgtgggtcagggatatcagtaactcaggtgcgggactgggatgacctacctgggcagtaattccttctttcacttattcattccttccagaattacttaccagacctctgttctgctccaggcaccatgccaggtgctgggaatcagagatgaatcagaaagacagggtatcttattttctgcctagagctgcttagcctagcaaacaggagctccaggcaggaagcagacccctaacaccaagtgtaaggggagagtttcccactgggacctggggatgtgtgggagttagtcacacgtgtgcgcggggggtggggaggtggtggtaatggagtgttccgggcagaggaaatggcattatagaagtccagggagagggactttcctggtggtctcgtggataaggtccacactcccagtgcagggggcctgggcttgatccttggtcaacacaactaagcctgcatgccgcaatggagacctagcgtggcaaacaagaatgaccaacagggagagcagcacatacaaggacctcagggaaattctggatggttggaaatagaagcaaaccagatggggaggaagtggatgtggctagagaggaaataagagcagcccccagggactgaccccatgcattagctcatttaattgcttttagctcatttaatcctcatagggccccaggagggaggaactcttaccatcc

SEQ ID NO: 46993 - DNA, 1153 bp, Bovine  19866880870017
  misc_feature (1)..(1): n is a, c, g, or t
ncgagcacgtggtgtcacgccgctgggcccaccttgaacttggacaccacggtcaacacaggggcccggttctggccggagggctcctcctgggacttgtcttcggggtcggcaggaaagagcaccttgagcagggggtcctgggactgctgcaggagcctggtcagctccggggggacggggtcctatggggaaaggacagagcagcgggtgagggcagggggcttggggggagctgtcggccctgtcactggggccccaggagggccggcccacgtctgaacctggaggccaggagacgcggtatgaggcgggttgtttttaggcaggtcgtgccagagtagcagagacctcagaaaggtgggcccgagaggtgaccctggaccccgagaggatgtgcgggcgggcagggaacacagtggatgtttctgcacacgtgcggcgacgcctccgcgtttggattcacaggtgacaccgggcacggcgtggccctcaccttgttcttctccaccaggcccgcggtgcggtaccgcacgggccccgcgtaatgcagcacaatgaagctgggctccgggctcagcctgtcgcgccccaggcgggggtggccggtcagggcgctctcgatgcgcgtctggagctgggctgcgctgcttggccgattaaggcggcactcctgtgtggggcgggcagtcagccacagggcagaggggcacgggaacccacccatgggagcatcatggcacccctgtgacagagggctcacagggcaggcgaacccactaagcagacagagagaaagaggcgcagggtgggcctcgaggtcccgggaaaagcccaaagccccgccctgggggctccgcaggccagcgaccctccaacctcgtttatgagggagcagatgctgacggggctcccctcgatgagatccaagcagggctggttgtcctggtagctgacaaacgaccacgccaggccctccattgcatactcctcctgggggtggagggcagtcggggtctgagctctgggggggtcaccccctgctggcctcggcactcacagagggaactgaaggcgcccagtggcacccgggacggggcttgggggccggggagagggcgaggacccgggcagtgcaccacgcacctgctgg

SEQ ID NO: 46994 - DNA, 1060 bp, Bovine  19866880880199
  misc_feature (1)..(1): n is a, c, g, or t
nacttggggagggggtgctacagattaaggtcctacttcagtggcaggtctaccttatctccccttcaggtcatattctcaagcaggataagatggggataagatgactaaaagttttcttcctttgcttacccacagccctataataggcttctgctgggcttccttggttgctttcatcatcactttcaccaccagaggtcagggaaaccttccgatgaatcaggggttctggaaatgatgcagaaaaatactgacttattaaaaataataaagaacacttatttagggctcactgtgaactcattgcttaaaatgtcatatataatctttacaaccactctgaaattggttggggtttcccaggtggctcagtgataaagaatctggctgcaattcaggagatgagggttaactccctgggtgggaagatcccccagaggaggaaatggcaacccactccagtattcttgcctgggaaatcctatggacagaggaacctggaaggctacagtctatggggtcacaagagtcggacacaactcagcaactaaacaacacaagaacgtgaaactggtattgacaaacaggtatattcaaaataagtctatgtcagattgtgatatttttagggttcttatgtctttagattcgtcttggcacccaacataaggcagttcaacacaacgcccttgccctaaacagctccagatgccaagaattggcaaattactactttggtttcaatggatggtcaaaaaggatcatcaaggtaagctctagattttctttgaccaaccaggcccctttcaacattgaactccttgactttagaaagaaaactagaactgggctacagggaggagatggaaaagacttccatgtggaagtatctgagcatggacatgccacctagaattcgtgatcattctcagtgacttaaatggcagtgtccataattttctccagtatttgtgtgatgtataataaaaaatagttctctgtacctagtaattcatttgcaaatctcacttgattttgaagctatatgacacctcaa

SEQ ID NO: 46995 - DNA, 2489 bp, Bovine  19866880894731
  misc_feature (1)..(1): n is a, c, g, or t
ngtaaaggagacaggtttggggaatggacagacctgtattcttatcccatgcatacattgtgggaccttagggaagggacttatacttctttatactttcctattgaaatttaaattcagtttccacattagtaaaaagggggaaagcctcttgggtttattgtgaggattaaatgaggccatcttgggagtgcccatgctgctgctgctgctaagtcacttcagtcgtgtccgactctgtgcgaccccatagacgacagcccaccaggctcccctgtccctgggattctccaggcaagaacactggagtgggttgccatttccttctccaatgcatgaaagtgaaaagcaaaagtgaagtcgctcagtcgtgtccaactcttagcgacctcatggactgcagccttccatgctcctccatccatgggattttccaggcaagagtactggagtggggtgctatcgccttctccggcaagtgcccatagtaggtgattaataaacacagtgtccaggtatcccctctaccaaccttccagaagaatctctccaatgcagcctctgtcctgaccttgtctcctttaacctggcaagtctctaacagctctataaagagttcatttctcactttggtctccccttccccaatcttgtttgctcccccagccagctaacaggaagaggacatgctctaggtggctggcagtttgaagagaatgctcgattgctcactcactccctgctccccagcccctccttgggtgactcctccctgtccgctgctatgggttctttctgaatcgtggcacttaaaagcctcatggtcacatgcagggcgcaccccaagcttcttatctgggcattcaccattaacagccccttctccaatgttaatctacccccatcccgtctctcttgctgccattcctgctcagccttctataccccccatctcccacctcaagcatgcccctcggctgagaacaccctcctccatcttctccacccagtaaagtcctgctctcctttcaaggcccacctccaatatcaattctctctaataaagcctttcagacccatttctctgcaggaaattgctcaacctccgggctggccatacatactgttcacaggggcagcgggatggagtccaggggtgacagctgttcagctctggcctctctgggaggagggcagatatgactggcctcctgtccatttcccttctcccctacccctgtccaggcagctgaacataggcgcagagccctccatggcctcctgtgcttgccccaccccccacgtgggctctgagccccagaggtagcaggtgtacctttcatccggcaggaaggctccgactccaccccacttggctgggtgcgaagctgtgtagtacagatggggatgttgaaaatatccgtgacatattccaaactggcctacttccctatcacgagagtctgagacagagacgggcgaggatgagtgagatgggagcttgggacctgttcccacctccttcttcctctcccggctcacttgttagacaggagaggggtttgcaacctctttcagccatctcatcccggttctggggccatgtagttggggtgtggtggggaggcaggcttggaggagtgaggctacagtgggcctggggaggtgggtagaggaaccaaagcctgggtcctctcttgggaagcttccagcctcggaggcaggacagtggaggccatctcattggacctgggggctgaaggcttggattctagccctggttcacctgtgaagactcaggcaagtttcttaacctctctgggctttgcttttctcatcagcaaaatgagctactcaatccttgctttccctccttgaacacttgagtatggggttgctttgaagactgttaagggccctgctttaattaatccacttctcccgcctttccaccttggctaggctgtgccccgacatagtggtttaaggggtcaccagttccagcctttggcctcccagcaggcctggcaaggcctccacccttaatcctggcttaatgatccctgagtagggagtcacccactgtccctgcctagtgccaggactgtgccttggacaggaagttcacagtgggagctaacgtcagtctctcttgctgacatggaaccctttggatgtcctctggcttgtctccttcatatatgaaatgatcattattttagattttctcttttggggctagaaagagaaagtgaagccgctcagtcatgtccgactctttgcgacccaatggactgtagcctgtcaggctcctccatccatgggattctccaaacaagaatactggagtgggttgccattttcttacatccccttttcccctgtttctcaagatgggcaggatccttggggcatttttctgattctgagaagctgaatgtcttcctgcttacagatcccttgcccaattttggattctcccaggaata

SEQ ID NO: 46996 - DNA, 1735 bp, Bovine  19866880912372
  misc_feature (1)..(1): n is a, c, g, or t
nttctttactgctgagccccagggaagcccatatacatagacacatgctgtgctgtgcttagtcgctcagttgtgtcccactctttgcgaccccatggactgcagcctaccaggctcctccgtccatggggttttccaggcaagagtactggagtggggtgccatcaccttctccgactcactcactgcaggctcctccataggtgagatgggccttgttctctcccactgatccgtaacacacctgctcacgcctccaggttgagaactgctgccctacatgatcaccatcctaacttgactcatgcagctaaacatagtgtgttgttaaaggttgacaaggagacatagtaaagctacattgtttttattcttttttcttttaaagctttttaagtgagagtactactcttaatactcacattgaacaagcactggatttccagatgcagggtttcttttggctgtgctggtcacctactgcacagccctggcatcccaagcagcgtttgtttattttagctgtgccatgcagcatgcgggatcttagttccccagctcaggactgaacctgtgccccctgcactgggagctcagggtcttagccgttagaccaccggggaaagtccgtaagcagagtttttcatacttgagattctaaaactgggctccggggagggcagtgtaagggttgtggaataaactcagtgcagcatgggtaaggctgacccatcttgcctttctgactcagttgcaggtagatggcaggccctgcccgggttgtacttactgcacaaggataaggaatcagaaggagtagtgaaagtcattttatgtcttccttatgaactcttctttatctttctttcccttttttctcagcgacatagtatgcttaagcaacaagatctaagtattgccatggtggtgacatcacgtgaagtcttgagcgcactttctcagcttgtgccatgtgtgggttgtcgtcgcagtgtggaacgcctcttttcccagcttgtggagtctggaaatcctgcccttgaacccctgacagtggggcccaagggagtcctgtctgtaactcgaagctgcatgactgatgcaaagaagctttatacattattttacgtacatgggtgagtataatcaattaggaaacaatgggtttgcttaagtttttaaactcagtgacagtgggtagcttttttctaactttggggcaaagcttaagttcagatttaccacaagtaacttctgtgtgccagtgactaaagtttcttttcttgagggagagacaggcagtaaacaaatatatactttgtgaagaaagttgttataaagacaaaccagtaagggagatagagaatgagtgggtagaactcacgtggagagtggtcagggaaggcctctctaataaaatgacattgcatataggctagaatagagtgagggagtgagccatgtagttatttgggtgaagcagagaaagggcagcagggtaaaggttcagagattggagtttccccggcgtgtttgaagaatagcaaggaagccattgtgactgggggcagatgaatgaaggaaacagtaataaaagatgaggtcagaggagcaccgagaggcctaattatgtggtgctatgctgaggtcttttatcttaactctgagacgggaagatttgggaaggttttgagcagaggagtacgtggtctacctggagttatgcttcctttta

SEQ ID NO: 46997 - DNA, 1763 bp, Bovine  19866881036478
  misc_feature (1)..(1): n is a, c, g, or t
ncaacagggcaccttcatatgtgcttgtgcagaacaatctctagtttatgttgctgagtgtgtattgtctgctgccatttggataaaacaacacaaaagaaatgcttgtgaacatataggcaggccctgaaagaccaaagaagctgggaatgatgtttgtttctgggcctggagctgggtgactgggaacagaggtagtgacagggaaattgacttttccttttgcaccttttgaattttgcatcacatacaaatagaattttctattaaacaaccaatcaaggacttccatggtggtatactggataagaatctgcctgtcaatgcaggggacacaggtttcatccctggtctgggaagattccatgtgctgcggggcaactaagcctgtgccttgctactgagcctgtgtgcctggaacctgtgctccttaacaagagaagccaccgcagtgagaagtccgtgcacagcaaagaagacccagggcaaccaaaacccatacaaaacaaacaaaaaagaaaaccagtcaaattaatttttccagcccttaaagtcttgtatgtattaatatttggccccagtcatataccagtggtttttactgagaaagtctgacctctaataaggcgagtgaagtcatggatggatggcgcagggagtggtatacaggcctgggtcctatcttgggaagatgcctgaagctcccccagcatggaaggagggcacatagaggcgcagccacaggaggaccccagagaatcagggcagcaggttgccctgaatccacaagcaccgatgctctggagggtggagaagacggggggaccaagaggacgaaagctctgtccctagagaagcaaaccagatggtcacaaataaagctaagtgagtgttaagaaacccagggggacagggactgtcagctagaatgtttgtgtccaagtgcctgtgtgtgaggagggcagggctggaattgggaaggctttattgaagacgtggaacttgagctgggcctgaaagtgggtatcaggtgtctacaggtgcagaggaaggaaaggacaaccccaaggtggggagcagtatggacaagggcatggagtgtaaagggaagacacaggacgtgtgtgtatgtgagtgttattgctggaggtagccagagatgaggctgccaagaacggggctagagcaaaacatttccagctgtgaactcaggttgttttttataaaacactgcaaaaatggtcatgcactaggaagtgtggcaatgtcaaatcatgataaagttttctcaaagatgagtcttcatttctgtactcatcttgtggacaacactttgagaagccctgccctaggggtcctaggatgggctgcagaggtcagggaggcccacagatttcttgcagctggtcatgtatattcatttgtttagggaagggggcaaagcttttgtcaggacctcaaaaggttcaagatctccaaaggacacaaccctctgctctagggaatggtcactgaaggtctttgagcagaacgatctagtgaggctttagagctgaggggagcagaaaatgtgcctgattcagcctgagaccccttccttccctgcccatatccagagaggctagcccagggccaagctcaagggaaaaggatttggtggggagtcaaagatgccagagaacaaggggcccatttagggggtaattaaaataatctgtgggaaagaaaaccagaggactttttcaagctatgtttggagcaag

SEQ ID NO: 46998 - DNA, 1902 bp, Bovine  19866881072452
  misc_feature (1)..(1): n is a, c, g, or t
ntggagtttggagaggtcggggaagctgagttctaggcttcagtctccacctccccttgctccagcagggacacgggaatccggagggctgccaggacgttgaggctctgtctaaatgggcggggagaggggttgggggaggcctgtctctgccgcttccgtgtctgtgggagggggacaagaatcagggtattgttggggaccggtcggagggtcgggatccccgcgaggactgctatgcgccggtatcttcatctgccttgtaaacttcgctcatacgaaaagttaaaacaagacacagacgacaagtctcacttaggagtttctgacgaattgccttttctgacaagagtaaaacatcaaggaaattaaatgcaaaaatatcagcccaagccatgcgccagtttttggaatattttgagtaattgctttcggaaccgattttggccgaggtggccgaccgtagtttcgggtttcgctggacgagggtcactagaagaaccgtcggtctctgcgtctagggatggtcgacttggggactggggacaaggaacctttgttcgggtctttaccgcttgcgggtgcaccgcccgaagcttgcgggatggacgggttgtacgtttggtttagaatactagcaacatggtttcgtttaagtcacccacaaccctttggggtgttaataccctccattttattgatggagtaactaaggttcgtaaaaaatgaagtgacttgcccaaagtcacgttttctgacagcggcagagcggggatttgaacctagtctgttctccgctagagctggggctccaccaccatgtgttcaccgaatgccagtgtcgaactgggatgtccgcccatcataactgttcccgtctgaggtctggggaaacccggtgccctgcgggctgggcgggattcgcagggggtaatcccagggctgagctgtcaagctccttctccatcttccaacatcttccagacgacctactatgtgccgattcacgggaaaaaagcgagcaagaacagtactcggccaacaagtggttcaagttcattgcgctctccttggcttcacagagcactgatctgggatgtcaggctgatcctggctgtgcagtttttggcgtgtgacttcacctttcagaggctcaacttatccctcttaaaaggggcgttaaccccctctggcaagggctgcagtgaagatctaacgaaaatccttttgtaaagcgctagggcacacagtaggcgctcaatccctgctcttcccctctccacccctctaagggttccagggcagcgcgttcccgctctggcttcccgcctccggcacgctcgcccgcctagcgcgtcccgcggctgagggactggggcagagaggaccaaacagaaaattatttccgcccgctcggcccgccccgccccgccccgccccgcccgtccccggagccagaaggggattgtggggctgccgcggccgctgccggagcggagcggggcggaagcgcgcatcgcgctgctgctcgggcccgaccgcgccggcccccgcacctcccggcccgggactgcgggttgtggtcggggtggtcctgggatctgaggcggctgccgccgatctcatttccacgaagccttgttcgctcgttcccggaacctagagggggaggctgaagagtgttgaggtttctcttctcctagctggccgggcgcttggtttcgccggtcccgggggcgcgccctccgcactagaaagccccaggctccgggaaaggattgcgctggcgcccgcgggtttgcattttatttgcgtcccgtttgcttatcattttatcccccgaaagcaaagcttctgaccttggggacgttcagagaggttaggttacttttccgagataac

SEQ ID NO: 46999 - DNA, 1262 bp, Bovine  19866881274391
  misc_feature (1)..(1): n is a, c, g, or t
ntcatgcactaaagaatattttaaccattttctggaaactgaagggagttctgaataggcagtttgagaatgatgatgatgatgataaagcatcctttatgttacaactgactaaagactttgtcaagctcacatatttaaaattcatataaaactataaagaactcttgtgaagatttaaattaaggggcagcatgaaatgacatggggtttaacatcagtaagtttgggtttgacctctagtttccatatttattgtcatgaaccttaagtaagtcagttaaccatcctgagttcgagtttctttaaaaaagaagagaaaagaaatgggggtgaggggaagaaatggggagctgtggggggcggtaagtggagcaatgcatctcaaagcattctgtaaatgctttgagtgctttacaaacgttggcctattcgttttaaattcagcacttcatcccagcggagcgaggaattccacatttggacccaccttcactggagatttctggaaaagctgcttctggttgcatgccttttgggctctgtaagcatccctcgctgaataaaacttgatgacggcataaaatccaggaccggccacggctgcgtttgggaagactcggaccgaatacagaaggccgaaatgggagaagactgtgaacagagaatgctgtagggtggtcccacgctaagtaagagcaggaaatttcaagcccaggaaacaaaattgcccattcccttatattccccccagcccttcgccacaggcgacggtggtgagcctccaactccaaacacttctcatttcacaaacaagtttccctctgaactgctaagcttcgagaagcattaggaggcagtgtgaggcctgctgggagctctctctcaaaaatctgtaaggacgagttgactgctccggtcggctctagagctaagattcctctcagcaaagaccacaggcgggctaggtgctgaagcagcgcccccggggctcccaattactaggacgcgaggcgactttctccatccctccctccaccccggcctggctcacttgcaaggcctcggccgtgggtccagagctcagttcccacacaagcaaggttttgtcactccctgtgggaaccgcaaaaggtaccaactccgccatcctacggtcaccgcgcgtgcgcggctcgagagcaagccgcactgcgcctgcgcacggcgcgcccgcgcttttttaaaaggagcgcgtgagggggcggggccagctatggggg

SEQ ID NO: 47000 - DNA, 1435 bp, Bovine  19866881380165
  misc_feature (1)..(1): n is a, c, g, or t
nggatcccttggtctagccccctttagaggcgcccaaggcccagagagggcaagggacttgcccacagtcacacagcacggcagctaccctacctttgtgttcattttcctcacctggggacaaaatgcctgctacctgatgagaaaattaagtgaaaacaattagctctcggtgctgccgtctctggggtcgcacagaatcggacacgactgaagcgacttagcagcagcagcagcagcagcagaggtgaaataaacattagagaccttgattgtttcttactctcaccaggttgtcccttgagaacctaccttctgtcccaggagaacagaagtttctactgtttctcctccttttcatctcagggggtcagaataggcaagaaggacagggcagtgcttggggttggagatgattcaggtacaattacagtacctggttgggggcggggagggtgcagcagggtctcctggctcccctccagcttgggagccagactgtttgtgggctgcccagtttctgcctcctgtcaaatttccaaactgcccccatcatcgctaaaggcactagctggtgtcccatccacgtgggccaccatttctgcagggccctgctccctgcacgacctccctgaccagccaagtctctgctctcctcaccagggacagtctttgttgttcagtgggaccacgtctacctccagggtcgggaggacagaggcagcttcaccttccaggcggctctgcaccaagacggccgtattgtcttcggctacaaagaggtgagtgggccattctttcattcaacaaatatgtcgaggccctgtagtgcgccagacttagggtgtggtgctggagataaggaagttcacaggatggctgctggcccatctttgtggagctgagaatctggcttgggggatagatagtaactgtgggggcaagtgctcttaaatagtgatgccaggaaagcctttcacggggctctttacctgaacaggagcctgggaggctctcctgaggaaaagagttgaaatcttcagaacgtgtaggagttaaggaagcaaagaggagggtgaagtgtgttctgggagggagcaaagcatatgcaaaggctcagtggcaggactgagcatggctggtataaagcactgaaagaaggcggcctagggatttccctggcagtccagtggttaagtgcccgtggtatgggttccatctctggttggggagctaagattctacatgcctcccagctgaaaaagcaaaacagaaacaatattgtaacaaactcaataaagaccttaaaaatggtccacatcaaaaaaaaaaaaaaatcttgaaaaacaccactctggcttcaaagtggagagcagagggctgggactcagagggaatgctgggagatgatgcaggagaacgggccagcttgggg

SEQ ID NO: 47001 - DNA, 1057 bp, Bovine  19866881385623
  misc_feature (1)..(1): n is a, c, g, or t
ncaacccttttggcttaaaaatgtacatcagtttccagcattgctgcccaagtgaggtttggtcatatcctatttgcctgagccccggattaaggcaaaatgagaagggaggtgctttcagtaggatccacagctggggggtgtgtggagtaagggagaggcagtcctgggtgggacagggagcagagaaagcacacttaatgaccaaacagcattttgatttctatgaaaatatttaaagctttcaaataagctatttcaccccactcccctaggtctgtctcaggggtctgtagataatcctaaatagcagctaagcaatagctgccaccagggagccagaggataagtgcagttttcatttccccttggggtcaaatccagctgagcggatggcccagatgtacaggattggctcgaagggctgggcagagaccatctgcagtgctagccatgtagctgaacactggctgagaattagccagaccgccccttagtctctaaggctgcagtgtggctaccagagcagccactgtcttttccttacctgtctactattaatgtttagaaatgttgaaaaaataaatttaccgtaacaaataagctagaaacaactacagtggtcaagaaagcattctttattttttccccatggcttatttcacagctgtgattacagggacgacttttctgttcccagctagtccattctcagtgggattgttttcaggtgcagaatttccattggttcagaagctatgagggcttcccatgtggctcaagggaagagaattattgccaatgcaggagacacaagagatgcgggtttgatctgtggctccggaagattctcgagtaggaaatggaaacccactccagtattcttgcctggaaaatactatggacagaggacctggtgttctacagttcacggggtcatgaagagtcggatacaacagtatacacacacacacacaagctgcgaggctgagaattcagcccagggaaagaatacactttaattactgatactggaaggcctggggaagggctccta

SEQ ID NO: 47002 - DNA, 954 bp, Bovine  19866881421317
  misc_feature (1)..(1): n is a, c, g, or t
natctctctttctctcaatcttgcactcactagccccattagaggccaggctgttagatacctccttgcctttgctcatgctggatccttctggctagaacgcccttctctcccttcttcactatcccacttgtcccagcaggcatctttcaagccttggcaagcctcacctccttggggaagctttcttcccttcagagctggagcatctttagcggggcagggactcagcccacgtttactgacggagccctggggtcctccataccgctcatgagcaatcccagacataggaggaaaccctgtgcatgcagggtcacagagaagcaagacataatcatgctgcctgcatccaccacctttcattcattatgccagcccctacctggacttcaaggctcagctgggggcaaggagaagtgcccacctttccaggatggggactgtgctcccaggctctttcttgtctgggcaagtagccatgacacacgatagccttagttagaattcagaaagacccagatttaaatttggatgctggatgacctttggtggagtaatttagcctctcagggtcttggttcttgttatttgtaaatgtacaaccacttcacgacagtccttgaaaattgatcagaagaggtttcaccaaagaattctcaacaatagatttggaaagaggagatgagagaaaggagattaatcatatcaccaactggtttttaaccaatccctatagaaattctacccagtggcactgtttccatctttaaactcccatcatcacttttgtgaccacatttacactgaaatgatgtccgcgggtgaagacaccatttgtgtcttctgtaggtctgtctctctgggtagatctggccaattttcagggcaatattttttggggggtggcaagggggtgtctgcactggtggatagtatacgtgcacatctcag

SEQ ID NO: 47003 - DNA, 919 bp, Bovine  19866881551325
  misc_feature (1)..(1): n is a, c, g, or t
ngcactgtttaaagcactgaggttgcagaagtgatcaagacaaacttctcatcagctcatttccagactaatggaagaggcagataataaagagaaatacattcacagattttcatatattagtgagctctaacacgaaacaagggtaagaggatggaatgtgctgcgggtacatggtcctcccttaaccaggtttttaatggaattcactttctttgctttactctccctaggggagataagagtgagggtctatgtatctcctcctagggtcccctcaacctattttggcagttcaagcctcacagggcataatcttgggatttgagggggtacggcagagccagcccctcagaatttgctcaaggggccggttataagttaagtgagaaatggaaacaggtactgagaaagtctatttatcatctttcgtgggtgtaatgatactcctcctcttcaaatttaattcttccttttttcatcttgcacacacactcactgaattcctaactattcattcaacgttttttgagccctctgtgtaccaggcactgttctaggcgaccgaaacagagaggtagggaatgttctctgcccacaggagtccttgctgtgcaaagctgctgaacaacctcttttcatcttttcttttaacttcgctttgagattcacctctgtttgactcacgcagccccaaaggggtagatgtgaacattcccattttacggatgcgaaaaccatgactgctgaaggggaaaatgaagtgctttggcggctactaaacactgggacgccactgcgccacgtgcagcggcgcatttagcccatcgatatcccacccgcgcactcaccctccttccctccctcccagccgccgccgcgccgggtccacgtgtgtgtgtctgtgtgcagaatgggg

SEQ ID NO: 47004 - DNA, 1099 bp, Bovine  19866881901530
  misc_feature (1)..(1): n is a, c, g, or t
ncccacgagggaggggaccaaaacagaccaagaaaagacgaccaccccatataaaaagatgaacggacggcttcacacacacacacacacgcacacacacacacagatgaaatgtttggacagaggcaaatttcacgtgatcatttctatttctttttaaatacaggtttgtggggtggtattttttttttccagctattaaaaaaaaaggcccaaaagtgcatatgtgagggggaaaaggcagaaattaagcaataaagtagttttccctggagggacatgaggaagaaaacaggaagcaatattgagagaattcacttttctcagcactgggcttcttgcattttattattggtccgctaaagttatattcacattctagctttgttgcatcttctttcctgggattagattggcaaaaaaaaaaaaaaaaccctctgtgaactgtaggaaaaaccagggactcggcccagccctcaggttctgtgctctgctagggatggatgattgtggaaaggaataaggactctcagcagcccctaggtccctcagcaccagtgtgatagtccctcctctctctgggggtgtgtaagaaaaggtcccctatttttaggatggaaggaaccaagggttggcagcaagattccagtggctggcttgccttgttttggaagaaaaattaggctgaatgaaaacaggctacttgttgctccccagccctcctcccagcctctcacttccctgccaaccacaggttctccaacaggatatgtctctctgacctttggttccagaatccacattgtgctttgagattaagaggaaatagaatggactagcatctgcccacggctcccaaaattgttccttctctgcttccgtcatcccccacactgcccaatataagactctccacccgccctcaccatggctgtggccaaggagggaaagggattggtcaggcagaggctcaagcctctgatctggggtaaatattcccaagtcaactcacaagcagtgaggactagatgttaaacgtgcctgcaggcccctccctctcctgcaaggcacaaggatgcaaagatatcaaccgtagggc

SEQ ID NO: 47005 - DNA, 3018 bp, Bovine  19866880094597
  misc_feature (1)..(1): n is a, c, g, or t
ncagcttcttcaacattactggttggggcatagacttggattactgtgatattgaatggtttgccttggaaaccaacagagatcattctgtcgtttttgagattgcatccaagtactgcatttcagactcttctgttgaccatgatggccactccatttcttctgagggattcctgctcgcagtagtagatataatggtcatatgagttaaattcacccattccagtccctttcagttcgctgattcctagaatgtcgacattcactcttgccatctcttgtttgaccacttccaatttgccttgattcatggacctgacattccaggttcctatgcaatattgctctttatagcatcggaccttgcttctatcaccagtcacatccacagctggatattctttttgctttggctccatcccttcattctttctggagttatttctccactgatctccagtagcctattgggcacctactgacctggggagtttctctttcagtatcctatcattttacctcttcatactgttcatgaggttctcaaggcaagaatactgaagtggtttgccattcccttctccagtggaccacattctgtcaaatctctccaccatgacccgcccatcttgggttgcaagagggtgccctcatgagatgaccgcaaatcaagaagactgtcattttaaagggttatcttctcttattctacacaacaacaatgaatcatttcttgatcagattgtgaggtgtgatgaaaagtggattttatacaattagttcagtggttggacctaggagaagctccaaagcacttcccaaagccaaacttgcaccaagaaaaggtcatggtcactgtttggtggtctgctgccagtctgatccactacagctttctaaattccagtgaaaccattacatctaagaagtatgctcagcaaattgatgagctgaacagaaaactgcaactactgcagccagcattggtcaactggagggcccaatgtttctctgccataatgcccaacagcatgtcacatgaccaatgcttcaaaagttgaatgaactagtttgaatgaggttttgcttcatcaaccatattcatctgacctattgccaaccaactaccacttcttcaagcatctcaacaactttttgcagggaaaatgttcccacaaccagcaggatgcaggaaatgctttccaagagttcatcgaatccgaaggtacagatttttatgttacgggaataagcgtacttttttctcgttggcaaaaatgtgttgattgtaatggttcctactttgattaataaagatgtgtttgagcctagttatactgatttaaaattcacggtctgaaaccacaaatacttttgtaccaatccaatgtacccaaggttttttttctttgctgcgttttagatcaagtaatctgcaattaggaaaaatgagagagagaaagctggaaatgggaagtaggtgttgacaaaggtcagagtttaagtcctatgtacactatgattcacgtactcatttaacagtgcagaccaggcataaattactgaagatttctttggaatcagtaaataacaaatgtcttcggtatgtaatcaaaataactaattattttagtaatacccaaagttctgccattactaacacatgttacactaagaaaagagatttactttagtgaattctacagttcactgcagtagagagtctaaatggtacataagttgacttactggtataggtaaactataattctgggattccatttacaaaaggagagaatcacatttttcttctctgaataaagtgaaagaaacagccacagaactagggagaagtaaaactgtctgtttctatatcaaaaaggacattatgaaatgaaaaataaaataaaatgcaactcaaaatcaaccacatgttagaggatatgtagcaaagacacttcatcctctctaatttaaaagagaatcagaatgatttctcctgtggatgtgcctgccacagagagttttggctttcaaagaaaaggatattgaatatataaagctagaggaactttaaataactgttcctggtctttagatctgtatctttggcttactttcagctatcaacttatctaaacttgactgatctttcaagatctattttctccatggtcttctttcagcatgtcattcccttgaacacttaaggaacatctcccatctctgaactccttgtctatcccacagacatggtaaatgtcttcttaagcgctgtttgttgaaagaatttattagtacatgactgccttggaccaaaggaaacatctttctagaattgcagcactgataatctgtcataagattttaagccatcatttttcatctctaactctttccaggtttgttgtattttaacatgatatttatacaaaatttcaggaacaaattttctttgagaaacttatcttcaattctaagacataatcattttcctgttcttctaatgaattcctacatacactgtattaattcagtagaattagaatgaaagtggtttcaaaaaagatgtctacactgtacacaagaaatcttatttttaatatgatatcaagatacttttacagaagaaatggtgaacttttttttttaaataataaaagtaatacatacacctggtaagaaaactcaaattcaaacaagggtaaaacaaaccataaaagccatccattcccacctcagttctactacctaatggtatccattagcaagttccttgccaagattcccagaactgtgtcacacatagacaagcaatttttcaaaagtaatttctcaagtaaaattatccaaaaatttaagtcactttattttaaaaagaaagtcgtattcatactacagaaaatacctcctgtacgctatttaaaatctaaataagtcagaatgcctagctggttactggcaaattgagtatttttcagctaaaatacatccaatataccaggtatgttgtatgaa

SEQ ID NO: 47006 - DNA, 2177 bp, Bovine  19866880382654
  misc_feature (1)..(1): n is a, c, g, or t
nctgcagaaagttccactggacagggctgtcctaggctgttttctccttttcacagagggacccaaggtttttactttaggcgttaagtcaagaagaactcatgttactttaggcacacgccactgtggagggcaacgtgaaaggatgattgccttctacaccagacccagggccccacattatacacatccagggtaccattgcagcccatggtatgtgagttacatctcctggcatccttcagcatttgtcctgtatcatggctgcctatggcaaccctgatcatcccaaatttatgatttcttcttctagtgtttgatgtcatgccctcagtattcagggcttccctggtagctcaattggtaaagaatctgcctgcaatgaaggagacccagttttcatccctgggtggggaagatcccctagagaaggaaatggcaacccactccagtattcttgcctgaaaaaccccatggacagaggagcctggcaggctacagtccttggggtcgcaaagagtcagacatgacttaaagactaaaccacctcagaattcaggaaacaaataaggatcttagccagccaagctcaaaagaaacctgtagaaaaggacacaacatcatcatccagaggaatttttcaattaacttacttgagtgaaggtgctctcttgtaaaatactcttcttactcttgcactggcatgctttcccttccaaatctcattacaaattcttctctaacacctactatttactcaacagcagaaatcaactcccactcagaaaacagctatgcattgcctcttaaaaactcctaagtatcagatgtaggtattttataaaaattcaaattacacgtcagcattttagatttcctcctgtaactttctttccactggtgtttgattgatcaggagaaaaaagaacgacagttgtgttcctcacttctgacacagacaccctcccaccatgaccatccacctcgggttctctgaaatgtgctatgtatacttaaatgctctgtaataggttcttttctcattcgcttccgttggaatgaaatgcttccatatggctccagggcattaaaaaacttagcaaaactttgaaaataacaaaattaacataaaatgaccttataatttaaaaattgaggagcaccatccaataaagcctaatgccatgctaaaaatactctcagagtgccagaaggtggggtgacagctagagaggtgcaaaggaagatatacctcgatggaggcattcctgcgatttgggagacttgaaaatggtttttaagctaaaattttcaaggtaacttttctacacatggttctctctttcttaccccctttactttgctgaatatatccttttgctcggactcagtataagggggctatgtttttgaaaacaaaaaaattctttttctttctttctatagagatgtatttacacccagctggaggaaaaagaataacagtattaaaacaaggcaagaagcactggaaaacacttagaaaccatgattcttggtctaaaacccacagaagaaatcttttagcagaacaaaaagaaagataattccagaaatgtagcaaccaatttgggaactgtctcaagtgaagtgtgtgtattgagtcagcaaacacataaatcaagacacaagttataaaaaccatacaataaatgtgcagcaaatgagggtggtcctcaaacgttatccctgtggttagacagcaagtgagaaatctacatgaggactcaaacatgacaatttaacagaacaggtccagattaggcttttctgagcttcactgaccctgagtaccactatataccctctgtctccctgtccagaatgttgacattgcaaatgactggattggtgatgaaaagtaatgtgttcacttaccatatgcttatctgagactaatatttcattaatttttaattttaaatatgaaaatgcccatggcctttctccaaatgaatactcctaactcactctcgttttcagtctttactagtaagcataagtgaaattcattggtctaaatacaattaatgcaaccattggtccaaacaacaaaatgacttgtgacaacttctgaaaaaacttatgaattatcaatgatcaatggtcatctttaatgataattaccagttaccaat

SEQ ID NO: 47007 - DNA, 888 bp, Bovine  19866880437583
  misc_feature (1)..(1): n is a, c, g, or t
ncccctaactgcttgtttgtttgtttgacttaagtaatcctgacttcctagcataacacccttggattctgaaaatatctccaatagcagtttacctgatacatatgcagatttcacattgttggtaggaagcaatccaagccaaggtttcagggaaagatccgttcagaggatggacaaacatgaccagctgcttcctggcacagaagactggaaacccagcctactgtacggagctcaaacacagcccactctctccttcagttctgccacgtgtgtgtgtgcgctaagtcacttccgtcatgtccaactctgagtgaccctatggactgcagcccaccaggctcctctgtccatgggattctccaggcaagaaatactggagggttgccatgccctcctcaaggagatcttcccgacccagggatcgaacccgccattctttagggctcctgcatcggcaggcagggaatttgccacttgcaccacctgggaatttgctatagccaagtgtaaaaccatttatttatggtgttatgaagaaagaattcctatctacaagtttataactctcactagaagagaactagagttgtttctaaatattgcattagttggaacagattaggtttagtaataaataagcccctaaatcaatgatagttcaaacacaagacaagttaatctctcatccacgtaagagaatttgagcattttgagcattactttactagcgtgtgagatgagtgcaactgtgcagtagtttgagcattctttggcattgcctttctttgggattgcaatgaaaatggaccttttccagtcctgtggccactgcgagttttccaaatttgcggcatatgagtgcagcactttcacagcatcatt

SEQ ID NO: 47008 - DNA, 2451 bp, Bovine  19866880483311
  misc_feature (1)..(1): n is a, c, g, or t
nctgtgtactgacagaagccagagacagaatgctatcagaaagcaaaagtgctccctttctaaagccgctgccctccctcctgctgggaacagcatcaccatggtgaaaccttggcggggcagggttgatctgggcagaagggctaccccctttggcaagaatgagctgaaatctcttctatgatggtccaggcctccagcgtcacgtcatctactctgcatcactcagtgcaaatggctgaaggagcctgaaggaggcccagtggcagaaaagctgaggccaccagagtgactcgttgctttcttagaactatttttatcattttattcctgcttaacttcacgtttttgtaaatccttatttcttgtcacaaagaaataaaaggggtcatcaggaaatggaaacaaatgttgcagaagccagagaacatcacagtcaccagctttaaccaaaatctaaaggtctttgggatgaaaggggctgaacagtgaagactcctcaacatcaatttaccgtgtgacttggacaattttcaagtacgttctgtggtagactatagctgaggacaagtcttcggaattcagacaattgaaacagagactgaaataaagaaggaaatggattaatagcctttctttcaaaataactgcagcaaaaaaatattttttatcttaaaaatatgtgtataacccattaacttggtaattctattctaaggaaataatggctatgtataaaaatttacaaggaagaatattaatcctttttagagaaaaactagaagcaacctaatggctaataggaaaagattacataaactacagtgcacctgcacagcagattattatacagtcattaatactgtagaaacaacgttttcataaaacggacacgtacacagtaaaaacgaaggctccaaagtgacatgtatcaacatggatgcgtctcagaaacatcccgtgtagaaaagtaagagtatatgctgtgtacatgaagtttaatcatataaaacaacacggtacactgtttagggttacatacccctgtgggtgtatctaggaaggtgcggaagggcacaacagggactcaatagtacagggatttgaaacatttctttctaaaactgggtggtgagtacagctgtgttcattattctccactctgtcgtaagtactgtattttaagaaattataataatagatatcttggactggcagaattagggaaaggaattcctttttattgcttgtaaattacacatttttccaactatgactaactctcttttaaaagttgatgttttaaaaaacctcttgtatgaccctaactcctcatcccaacatactcctccagtgaaaaagccttccagcccacagaccggaactcttgaaggggcagcctgggtggacaacaggcctccaacctcccacactccatcacaagctctgcaggtttcagccaacagtacacctggactgggaacatcacaagctccactgggattcagccaacaggaggagtggacacctggcctggcaacttcagtcaggtgaggctgggatagcaaagttctttctggagccaggccttgggaatgctcagctctgcttgccacctgctctcctctcttcccacctcccctgtctacctagcccatctccactcctctcagtttcatccctgttctgctaagaggaaagttccaggagttctcttccaccgtgagaaaaatggttttacattcccaagtctcctcactgcatgttttgatcccatgatctctaaccacccttcattaaattctcaaactgccctttcgttctttcatctaacccagcaaatcctccaacgtggatgaacttaattttccacttaagcagtgtggagcaccgccaagagaaaaagtctcgataaagcagggcacactgataccactatgcgtttaagtctataagctcaagcagagcttcgtatttttagaaattctactgctgtggtctggtgccaactggtttcccgctgttgacaactctttttaactttcaccctcttaaagagattctgtcatcttttccacgctgtctcagaaagtggtgcttatttcagaggaaaaaatgacaatttaggaaccatttcaacctggagttagcagtcatcacttcttccttgtcctctgctgttactctgctgccctcttgctactggagaccaagccctccccacacgctccttgtcccatcttcccatgctttctctgaaacttttctcagttgtctcctcatcatcatctctcacaggagggacgtcaacttcagggcgggggtttcagtcttggtcaatctctctccctctctttcaaaaggaaagaactgactggcatccctaattcccaatgaacgccctatagcctgttctcgacacagaagccagtgagccgcttaaagcggaag

SEQ ID NO: 47009 - DNA, 2417 bp, Bovine  19866880590534
  misc_feature (1)..(1): n is a, c, g, or t
ncttctacttctcctgacatctgatctaattctttggggccgcctctgaggaagaacaaagacacagttaaaacagagtcccaccaagcaaaacgtctcaaggaaaccaaagctcctttccagaaaaaaagaaagtaagacactttgtcttttttcttacttttaatgaaaaatacgcacataacccatccattgtccgaagtgctgacagtatcaggccaatagtcatggtaccctagtaacagtggctggcatattggaagggagggacactgaatatttgttaaatgaatcaatcaatggtaacaagtgaggatttggaatagaggccaatcacagacaaagcagcaagaacaaacatttcttgggaattcagaaaatcattagattcaatggaaatttcaagataaacagttttatcagtgtaaacagtgcccctattactgttaagaatatccatctccaggacttccctggtggtgcagtggttgggactctgagcttccactgtaggggacatgggtttgatccgtggtgagggaaataagatctcacatgcaatacagtgtggtcaaaaaataataataataaactgaattaaataacaaagtatatccatctcaagatggttgaaaatgaaaaccaagacatttatactgccttaaagttcacataatcaagtgctaccacaaagcaaagggatacaaaggttagatcaataggtcaataatacctggggttcactaaaggctatgatgaaaaatgacaaggctatcaatgacatattcaatctcatttccaaccctacaaccgaaacaaatcataaaaacctacagaagagtagcacatccacatactggttgctgttaactagtctttcagtaaatgacagctcccactttttgtctatttctatagatgagccgtacccgttataacaaggcccctatataccacccacagccagcacaatcatttgtacagaaactcccacgagcagctgttcctgccctcacactgcaaacacgcaattaggacgatcagttactgtgaagtgagcgttctctccatcccctacccaccaagcccaagagaaaggatcacttgctgcccagacaaaatgccttgtatgcttccttacttatgcagcacagtgaagtttgaatattaaaagaagacgccttgtatgatctcagatgtgaaagaagaaagaaagagtaatatacatggaaaacagcacagaatctggaaccagaatatttactggctgtatgacaagtacagaacctcagctggaaaatgtgggggataagaatttctgctctgcctcctccgtgttaagagttaataagttattagagaaataaagcttgaaagcatgcagtaaggaggaaagtaccagcataaatgataattatgattactgttagtagcagtattaggagaagtctgaaagcgctgaggcaaatccacttgtaaaatctagctattctccaaaaggtgcaaaaaatacacacacaagaatgtcactaaaaaagggaaaaactagaggcagcttaaaagtctatcaacaggaagctggtttaataaattatatatatatatatcttccatgcaatggaaattattttatagctgttaataggaataacttggttctatttataaaaatagagattactaagaaaaacagtgaaaaagatgccaaacagaatggaaaaatatctcatttggtgggaaaaaatggggtgtacatgagatatcaataaataaaacctagcatctgcacagaacatttctacaagactaccttaggagcctaagaacggatatttgttgggctcaaggaagtaggaaagcaaacttatttttcctttttcttctcttttatacgatttgtatttcttaaacacatcattactttctaataaatccgagttttttttttttttttttaaactacaagactgttcccttccctgagaagtacaaaatctcccctagcctggcctctgcttatagtatttttacctgcattgaagtggggcagcttgtcgttaatatacatcaggcagtaagcactaacatttctctggcccccataggaatctctttcaagttcttcccaggaagactcagtaacagagatgtcgttgtacttgagccagacttgtcgcggctgattatagacgtaggcccagtagtgcccccgcgtttgcctgtccttcgtgaacgaggaccgcgtgcaagcgataaggcacctgcaagtcagaaagcgttccccgtgttaggttaaagcaaagtcatccgacaggggtttacatgacgaaaattccaaaagtgtacccaaccataagacctaagaaaactgcccatttacacgtgtgtttgatgtagggttcacatcaacaaaacat

SEQ ID NO: 47010 - DNA, 710 bp, Bovine  19866880611815
  misc_feature (1)..(1): n is a, c, g, or t
ntgtaagttcttgtatttttctcccccatgcctttgaaagggagagcattagaaagacatcttctttgtgcataatatcacttaaatggtttactataataaacacatttacttgtgtagaatataatataaatggtaaatcattattctggccaccacccactgaatggaggaggttgacgccaaaatttagttatgatttgatggaagtctgaactgagtcagagcctgatagaaggaggaagaagggagacacagagagccacttaaggagtcataaatgtgagatttgctgcagtgaggactgaatacaaggagctataaataatgccatctcctaaaagcaccccaccccccattcatacatctatcttcagaggatgcagaaagtctagcactgacccagggaattgctctgtaggctgggtgtctgaaagaacatgactctgaaagcaggaacctctcagaagggacagacctgatctatattaatacactatccaccttgcgggcaacccacaagtagacatgcagtgtgtgtatcggagggatactggggcttctgagtacccttactagaactacctgggttcagtctacctgagtacccttgcagccaacccacaagtagacatgcagtgtgtgtatcagagggaggaacacctggggcttctgagtacccttactagaactaccgggttcagtccggc

SEQ ID NO: 47011 - DNA, 1315 bp, Bovine  19866880651219
  misc_feature (1)..(1): n is a, c, g, or t
nctcctgtgttggcaggtagggcgtgtgtgcatgctaagttgcttcagttgtatctgactttttgggacactataaaggtagcccgccaggctcctctgtccattggattctctaggcaagaatactggactgggttgccttgtcctcctccaggggatcttcctgacccagggatcaaacccacgtctcctgaggctcctgggttgcaggcggatcctttaccaatgagccaccagggaagccctcaaaacccaaagccctcaacatgctcattttactgcatcaccatatttcttatctgcaggatgagtctggaagcctcttcaggacaagggtagggtctccttgtcctcgtcatcctccaggtgctcagtcgcacctgtcccagcagatgttcagcaccagtcaggtgatctgagaagcatggagagtatctggcacagtgcctgccacagctggtgttccacacacgtgggagtgagagctggtgttccacacacgcgggagtgagagctgaggcaggtgctgctgaggctccgtgctgcctgggtctctgggctcctattctgcgtgctgatcccagacaagtcacagactccagttccctggtttctccttttaaagatcttctttcaaaagatcacagggattaagtgtgaacatcctttgaactgagaatattactgagttggattcttcctgaattcctttctcctatttcccaagatactacttgaagacccactgtcacaaaaccatgtgtctccatattttaagagacacaacttaaaatcaaaggaagtctcagcatttcatgctaaggaggtttggtttcagacaccctcatatgtcttgaaatttccatgtggttggttggaagctctttctaaaatctaattggtgactgtctatgctctgtatcacatgcccccaagggacaggagagaagaaatgacgtcagagttgatagaaaagccacacaaagactgtctggcagtgttcttattagcaagaaagacagagcaagatgcctaaatgatatacctcctctcttgctgctgcatcactgagtcccacacaatagacctttggaagcagtcagcttgtcagcatcacgccttgcacggtgggtgagctgaggcaaagataattttccaggctatttggctatcaacagacaccagattgcttagctgagcagacctgatttccttcaacttgctgcaaaattcttaaacaaacttggaaaacagaaatgtgttctcatttacttcacagctaaacgggggaaggttacagggaatcaagtggggg

SEQ ID NO: 47012 - DNA, 1025 bp, Bovine  19866880739719
  misc_feature (1)..(1): n is a, c, g, or t
ngcacgctggctccagtagttgaagcacatggcttggctgccccatggtgtgtgggatcctttctggaccagggatcaacccccttgcattggcaggtgggttcttaactgctggaccaccggggaagtcctgagataaatattttcctaggtgcctttcataatgtgcaattctatctgtaggataaatggatagaaatagaatttctggaccaaacgtatggatgtggcctggtgatttgttagattttgcaaattgcccttcataggatgtccactctgacagcctgcaggggttgcccctacgcctttgccaataggaagtattatgacacagatgtgcttccatttcgccttcatgtctttagtttgtatttttatcaatttagatattatattattagtgtgtagatggtgactcagtggcaaagaatctgcctgcagtgcagcagacgcgggttccatctctgggtcgggatctgctggaggaggaaatggcaatccactccagtatccttgcctgggacactccatggacagaggagccttgtgggctacggtctagggtatcgcagagagttggacgtgaccgagcacgcatgcaccggcattcaggactggtggaactttatggtgaattgtgcccttttttgttttagcgtttgtccttcatcccaacttcaaacctgcttgtgtctgctgtgtctctgctcttgctcgcctgtacattcctgtgtatttttaagattttttaaagttaatttatcaattagttcacttgcatatgcatattaaaatgttatatattatgtataatcttcatttagaagcaccgtttcctccaccctcattatttcatgaaatcattttgttcagcttcacatgcatttttaagattatgcttctcctctccatcattagagataatgttctcagtcatttatcccaattttccagagcacatcattttctcctccttctgaaagttgacataccacaatttttgtatctatgtttgccagtgt

SEQ ID NO: 47013 - DNA, 1244 bp, Bovine  19866880765993
  misc_feature (1)..(1): n is a, c, g, or t
nttttcatacacgaaacgacatttgagatggaacttgaagaatgagtagaactactaacaggtaaaagatggagagatggcaacataaacaaaatctggcaactagggaaaaagtgggtctgcttggattatagaaagtaattctcatctgtctggatgggaaaataaaccggagaaaggcaagttagttccagaacggggaggagcctgtagcttaacagttggtcttctttccatcatataaaaaagcaatgaaaaatcctaaagccatattccaggagatgccagtgacgtgaatacttaacacttaggaaatcattttggtaaaataaaaccatttttgtgcctttatgggttcagtgccaaacttgctctcttaaatccacagggtacacgtctttttaagatgtttaagaaagcaacaaagatgtggcaaataacaaatgtaaggtaatgacagtagcacgaagtgaaactccgtgtggtcaggtgccttctgtttttgtatcaattccaagacagcaaggtccaaagaagtgctagtcacgtgttttataacactcggcatagtctcaaaggcctgggggtgaagagagttgagtttaataaagtactgatacgtttgtaatgacaaaaattcagggaggagaacggtacaatcctcccaaagctatcacattcatccacgaatcatacagaggaggaaactacacaccgaagaggggtggggtgaccctgccctcatttctatccagctgctatcccccgctccctagacgcctcgggcttccagtcccaaattccctgctccgccggtcttccaccgccctcccctcgtccccctatcccatacctccccagcctaaccccactcccaatactgccccagccaccgcctcttcccaccgtcccagcctcctcggctccgcagtcccagtcccagtctgggctcccctctaagcccccttctcatcccacatacttgcacccactctcgttcctccctccgtccctttacagtcagccgcccgctgctccggcttcaccttgatttcttccacccgctgggtcaggcgactgatccgagtgcccagatcctccttctccagcctcccggagtgtgccaggacttccgtcacgaacgaggccatcgccaccacaagaaccaaaactgacaggggtcactctcagccagcgcggcagctcccgtcccgccggcagccttggcgcgcggcctgccggga

SEQ ID NO: 47014 - DNA, 1931 bp, Bovine  19866880771806
  misc_feature (1)..(1): n is a, c, g, or t
ngagcccatggttcaagccttttgtcttttcattagactgaatctcttagggggatccctgccacccaatgacagccttcccctctcagttctgcgcgatataggccctctcgttttccgaagaggactctctgtgtctaacagatgaagatactttcaataaaaaatctattcttagcttggtcacgtagggccaagttttgcttctgaaaattaaactgttgtcctggcagatgggttcctgtgtcatttttttcacgtacttgaaaccagctctgtacatctctgctggctgggtcttcactctaatgagattcttttttggttcgtttcctgggcacgctgcagacaaggatctgtatttcttatgccagctacggtgaccaagatggatgagcatcaatcatttgtcctccgaaatgcccgcttggtcacagctgtgagatgaacagacgaacaaggccaagtcctgatcctttcatctagtttaaatgtagcgtattctggaggaagtcccgagagccagtttttcccccacccatgccgtaagagcacagaatgtaaaataaatacctggcctggagattgctaggagagaagcaggaatttgagcttcaagcttccttgcgaggcggtacaatattgtgggtgtcctgaataaataagatgtgttcggtggtagcacagccttctgcctccgaggttcttttcagcctcttgctagctgagtaaataggccagtgatttagcatgtggctcttgtagcttcagcttctgtcgtcttactctgtgcattttatacagggcattcattctgcttattaaatattactgccatagttttaagggcattgacagctctaatggccctctggacacagagtgactgaggatcaccttcctgttataccattactaatttaaataagcagatagtcatgtgaaacacaagcttaacccacggcatcttctgagttcccagcatcttggggctcatttatttatttgactgtgccgggtcttggttgctgcatgcaggatttttagtttcggggtacaaattcttagttgcagtttgtgggatctagttccctgactaggaatcgaacccaggccctctgcattgggagcactgagtcttagccactgcactgccgaggaagtctcagcattttgggtttgacactgagacccttgttgatttggagccaggctctgtgttttcattggtgagcaggctgggagactctagttattgtgctcaagagagtctgaagaagctgagatgttttgtgtggggctaatggatattttaaagaacaaggtgattgtttgctattcatttctgtacttagaaacttggagtcgttttcattcatttgacaaatattatgcatccactctgtgcctagcattgagtgaggcaatggggtacgatagtgaacaaagagaaaatccctgcctttatcaagcttagtaaacacattagaatcaatgaaaagtaatttattcaattcaaagtgatatatgttatggggaaatcacacagacctgctggaattgggagttctagggaataatgatattggcaaatgaatatgtttgaaaagcatagtaataataggcataagcataataataggttgaattctgcccagtgatgaggctgtatatctttgtgacatcatttgtactattgccttgttatgctagataacctctcatgcttatgtcctgcttctgtgagtactttgatttgtagtacggagactataaatcatgagtcctggcttcctctacagccccaattccagcatcatacacattacagatgttccagacatgtgtattaagtgaatggatatgtctccagcagtaagaaacagacatggccatgggtgtgactgcttcaagctatacggagtgtatta

SEQ ID NO: 47015 - DNA, 1082 bp, Bovine  19866880780890
  misc_feature (1)..(1): n is a, c, g, or t
ntttcttttatataaatcctccccaagtcttctaagtcagcttctcagaaaaagtaaatgtttctgtctcaaggctcggaatattccaagcttgccacaaagagcaaatccacacattcagtgtctaataaagagattcaaacgactaattttctagcaaatatggaatcattcggatctgcagggcacatagcactgggtggtataaagtaaatgctgaaagtattcttctgtcatatgtatcccccccattccacgaccacacacacacaaccccagctctttcttttcctttatttcctctctcctttctcccagcttggggcttccctcatagctcagttggtaaagaatccgcctgcaatgcaggagtcctgggttcgatccctgggttggggagatcccctggagaagggaaaggccacccacttcagtattctggcttggagaattccatgggctatatagtccatggggttgcaaagagtcggacacgactgagcaactttcactttcacccagctttgttcatttttctttttcacatcttcatctgtgcctcaagctagagagtggtacctcactcccacccctccctactttccagcatcctttagtgctgctacattcagcgatatgccttagaaacatgtctgactgtggaggctatctcagggctgtgtctgcctctccgcctgttgcagcagaaagaggaaacaggtttctgcctggccaggtcccactgcctcaggcgtattctgaacccacccactgggaatcttgatgtcctcaaacagcagcataaactcccctgctttttccagcacaaatcatccctgccattaaaaagtgaaaagactgacaattaccatctgctaagactttgttttcccttcttcttttggcacgttcttttgcatctttctccagagatgccaagaaggcttctgacaacagagtgatttcaaatattaaaaaagaaaaatccaaatactataatcagttctttagctcaaattcagaagaaagccactttagagttttagagccacacgtttcatgcatacacatgtaggcacacg

SEQ ID NO: 47016 - DNA, 811 bp, Bovine  19866880788310
  misc_feature (1)..(1): n is a, c, g, or t
nttgaaggatgaaaaacaatcctcgctatctggtagaaaattgttctgctttatgaaaaggcgtccctgttcgtaaaaacagagacagcggccagtccaaataaaagcccacatccgtcatatgctggagaccgcctggaagcccctctcccgactccccccatccttcagccccagcaggctggctcaggggacaccagggacatttcttttccacaaaggataaagccctttctgaatgggggtggggggttgggtgtggtggcaagcaagctataacttgaggactcccaggcaaatagctgtttggcgtctgtatctcaaagacgaatggagggtaaaacttcaccacaggaatgcaatcagcaaaatccagattgtggaaaatgaaccagaacaaatggtatggtttcttccaaaattaaattgcaaggacacaatagaaaaagctgggggtggggagagagccttcataataacagaaacttaaacgcctatcagccaattgcaacgtgtggaccttactggaaccttgattcaaaagaaaccaactttttgtgacattcatgagacaactgaatatttaaagagtacattttggatgatattaaggagttactgataacaagttttagctgtggcgatggcattccagttcatcgctttagagcccttatcttttaaagaaacacacttgagatacttacagttgaaattatatgatgcctgggatttatctgatgagatggaacagatgaaacaaaatccactgtaagcgattaggttaaagcggggaggatacattgaggtt

SEQ ID NO: 47017 - DNA, 1197 bp, Bovine  19866880804043
  misc_feature (1)..(1): n is a, c, g, or t
ncatatagtttttaatgaaaaccacaattttggtgaagaaagaaatgttttattttatgccagtgaagggaaatgatttaaacaagaactgtgcaagagggagcaggctaagtaggtacaacctgtgttggctggacgcgcggaggcaatgtgaacccagcccttcctggcccgtcctgctgggacagcagccaacagcggggcacttcctctgggaacccctcactgtgtgactgagaccacgagtcctccaaggccagccgcatatgccaagcatgagcaaagcttgcccaccccaccccagggtcctcacagctcatcttttcctggactgtgaagtggagacagagtgtctgagccaaaccctgatgacagatgctgatggggactaacgtgacctccaaatggattctcactaataactgaagcaggtcagtaggcaaatcatttttatgaacaccttcctcccacatgacacaccatctccaccaaatgaactcattcaagtaaacaggtaagctaataaagaatgactcaacccattttactgaaacagtcctagaaaaggacctacatcgttaaaatgcactgtgtttctaagttgattaactatcaaggcaagttttccaagggtctgaagtacgagtgaaatagttatccatgaacttcttcaccctcaagtaaaataatattagggaattcaagtgcataagactcaacttatttcaaaactggaggctcaaaatatcagtaattatgaggctaagtaggacaaagagatgtttttgcatcctcccaaattaccacaggtggcttgctaactactgcacaaggacaatgagcgatttatttccaattcagctttgttctcatttgaaaaggacttaaaccaaagtgaaaggcagcaagagcccaaaagatgcagtcaacacctgttgtcttttcacaactggatctgcattttcttaaagcagtacaaaagtcacaaatgtaatatgttcatacacacatatatctgtgacaggagggaaaggggcagggcacaacttctgaaagagtgacagagcccaaggacacaacacacagcaattagaatcgaatgggaccaagatggcagacaaggctggaccttcatcctcaatcagcaagtgaaatgacactgggaggtgccacgacagtcgcaagggcactgttaaa

SEQ ID NO: 47018 - DNA, 1886 bp, Bovine  19866880829729
  misc_feature (1)..(1): n is a, c, g, or t
natcctgtgtaatacctggtacataatcaactgtcaaggtatgtttgttagctcattcctgggactcaggatacatcgtggggagaatggtggtgggacatgggcatcaggataatggaggaggagcaggctccctgtagagccaagagatccatccctgcctgaagctgccagccagaagtggctggcaatcttaatggatccaggtgtcactttccctgagagacgagctggaataatagctggaagggagtatgtcagcatccacttagtttacagatgagaaaacaaaggctcagggcttcgtgggtccatgccagatagcaagggaatggtgatttcagagccaggttcccactcagtttattgcccatggtgtggctcattaaggtataggacaaccctcgaacccaaggtctgaacagctttagttgttcatctgacccaatctgctgactgccttagtcccaaagccctccaggatctccagcacctctttcccagcatattccagaacctctctgaagcagagccttccaagctgcaggctcctacaggggcagtgcaaggcagccctgggtctgggtgcattatcctgaaatgtgctctctcgcccttccccattctccccatttgggctgtcctggtatgtcttgctgagcacgtgaggtgctgctgaagctgtgatgtgagttctttaaagttcactttggaaacaaggacatgaagttcctaggaacgtcggctcccagcttgctgagctctgcagctctctgtgggactggctgctgccgtcaaaaagaatagagccgtcattctgcaggaaggtttctatgataatagggtttttgcctcccagtaattggaaaggtgctaatctagtgactcatgagctacttataagaaaaaaaacccacctggaaatgaaactgcatcatgtttcctgagtgcttcatctccttatttcactgcagagggcaagctggggcttagctgtagggagcagagcctggttgtcctggcaaccctgctggagcgaccttatacccctgcctcccatctaggtagtccagtgagacagaaatcaggagcgatgcatctagccccaggccactgggaaaggagctggcatgtgcatggacttgcaaaggagatagtcattgacgaactagtgttagaacctcccaagttctgatgtgtgtgcaagtgtgagggcatatgtgtgcatgtgtgggtctatgtgcacacatgggctggttgactgtgtgggcttgtagtgagtgtgtgagagcaagtacgtgtgtgtgcaaatgtgctggcctgaatgctgctgtttttgaggggcttgggttctaatggtttttgctttctccattcatgtctctgtccagctttagggacctgagatccagctctccgtgtcttggtacctgggtgtagatgacaactgtgctgtgtagttggagtttcagttgggctccacttggagaaatgtaactgctttaccctcagtagggcaggcagttggactctgaccctgcttagaaggcatctgggcctgcccagtacctggacccctctccagggcctccggggtagggcacctactccatacccagccttgcatccccctctgtcacccaactgaactccttttttcttggggacatcccactcctacttgggattcctgtccccttcccgtgggatcctgcctcggtggagaccctgactttggggcaacccccgtatgggagccctgaagggccaaaagtccttccagccacagcatctcctccctgcaccctcccaacctcctcccagccggcagctcccagccttagtcacagccccactaggctctcaactcctcccacctcccactc

SEQ ID NO: 47019 - DNA, 1786 bp, Bovine  19866880841991
  misc_feature (1)..(1): n is a, c, g, or t
nagaaatatattttggagatagaatattctaggcttggtgaaagaattgatgaggggtaaggatgtagaaggatgggtggcaatgtatacaaactctgagatatgctgagtttctaacttgagcacctggagaatgggaacatcattcttaagttgggcagaccacgagaagaggagtttggaagggaaattggcacattctgatttggacttgctaggggtgaggtgttttcatttataggaaacagccttggtggagtagctggaaatcagactctgggagcccaagtaggtaaggctgaaatgtttctggtgtggggttgcactccctgagtagaccttagtggtctgtactctttgcaggactatgggggctgcttccttgtgtgtattaagagtttctccaaaagtttgtttgtatcatccagtgactccagagattctatggggaaggctggggagggtttggcagtagggagtgagctcaactccctccccccaggctgactataccccttcggaggttctgggcatcctggaaggactcagaggggagaagggagcttggatagacccatttcatctaaccgtaacaatgctaaaaacaaacgactcagcaccctagactctgcttagaagtgagatagatcccaccccacctcccaaatctcctgtttttcatatcagatacagtgtttttcagaaatcccaaccaaagcttgagtattactgctcaaacaccccgagccaaaatgcaaggaaagacaaataagtctaaagctttggcagaacagctgagaccattagagcaggagagacagagctggcaaaacatcagagtaaagccagttttcttctgcaactcaaagattgttccaaaggcagtaatcaagtatctggagaagcagagaatttgtcctgggctgaggttgtgatgggagtttcccactgatacatgtgctcttatttaacccttttccaatgttgctgatgctcggtgaggtggtgtctagcttaggccagcggtcaaactccccaagcccaaaccagccccaaagagagggcagtgatgtaggggtggagtcggggatgggagtgagcttggagtgtggcttctgaggtggctcagcagtaaagaatctgcctgccaatgcaggagactcaggagacgtgggtttgatccctgggttgggaagattccctggaaaaggaaatggcaatccctgccagtattcttgcctggaaattcccatggacagaggaacctagcgggctacagtcaatggggtctcaaagaattagtcatgacttagtgactaagcaacagtggagggatcgtagctgaagcagatatgctggtctatgggcacttagatgtccttaatggaaatctttggtgtgtaaatgggtcttgtttgtctccatatactcagcttaatgctggctggtgcaggcagctagtacttggtaaatatttgaggcattatgctgtgaactgctttatgggaataaagtggaggggatgaaacactccagcctgggaggaggaagagtctccacggagccagcagtggaggaggccggaatctccctagaggacttgttgtggaagatgaggctattagaggaattaaggggagagaggaggacgggcagaatgaggggataagggctgacaaaggaaagcaaaggaagagatgaaagattgctgatggagatcaaaatgcagggacagatggaggtacctggcaggatttctacaggccagaggaaggagacatagcag

SEQ ID NO: 47020 - DNA, 1365 bp, Bovine  19866880848675
  misc_feature (1)..(1): n is a, c, g, or t
ncgattttagagcttccctggtggctcgatggtaaagaatctgcctgcaaaggaggagacctgggtttgattcctgggtcgggaagagcccctggaataggaaacaggaaaccaccccagtattcttgcctgaagaattccatggacagaggagcatggtgggctatagttcatgagatcacgaagagtcggacatgactgaatgactaaatgattattaattattaaatgattaaaaaaaaaaaactcacaggtacagcacttatcttcactcaaatgccaatcagactgttctggatccaagcagtatgcaaaactaagtgtaaatcaacatagcagaagcctctccactctgttcccttaatgacttttttaccttggcaactaaatgcaccatgactcggcaatctgggactctacaagcaccaggaagacaaagccagcgctaactgaacaccactctacttacgactctgtctatacaacccaatgttttggcaattgacagtcacagtcctgtctccttccctcttgtcactataaaaatactgttatatgatccagagctttagaaattatatcagttatagcctccattcaaacaattaacttaataatccatgattaccaattagatgctcaattggacaggtgcttgctcttatatacaaaagcggtactgcttgtgaataccagccgcatcaaacttgactgacaggtcttatttcttctaagttaaaaaaaagagaagtcttttcggagcatttaattttcagggttttatgtgtctgatttgacaacctgtatgcgatttagatggaatactttgtatttctactttgcaaagcgaaattttcatcaggaaactgtgtttctttaaggacatttcaggctttggggaaacatatatgcttaccgggagacctgtttcaaattaccaggtaaagcacatttctgtagtgggcacttgaaaatcataccatatattactaactcaatagggtgtatcatcttctgccaccctctctcttcattattacataaacggatggtagaaacaaaatgataactataattccacatggcttgttcaaccccaaatctgttccctttttcaaaaacacaatcagatacctgagcctattctctgtagaatttcagaatctgaatctctggtattattcctgaagactttgtatgtaaattataatatagtaaaatattattaggattttaaagccttaaagatatctttgtgcacaaagtcttccaaagaatgaagaccattcctttagaaaaaatagtaagctgaagcaagagctcattcctctgaaacgtcagccttgaaatggttttgttaaaata

SEQ ID NO: 47021 - DNA, 758 bp, Bovine  19866880858356
  misc_feature (1)..(1): n is a, c, g, or t
ngaaggaggaaagtgaactggggctttctcctccagcttccgctctactaaaggcctcagctcctcttaagcagcgctcttcacaaagcagccctcttccgttttggccattactcctcctcctgcccctcaggtccagcagtggtgctggctggccactgctagtctccatctgccctgcactcaccctgtaaatagtccctttattaaactccccagtatgagtgccatctgtttcctgccggcaccctgattggtgcaggcagggaccagttattaatacttcgcaccgctctctcctgcccgactgcgctttctgcattgactgaagactgctcgctgcagaactgtgtgtgaatagcagctatttgtgtctctacaggcttatatcaaacttggggactaccggaaggcgctggtggattgtgactgggctctgaaggtaagaaggttgtttcctcttccacatgatggagggggggattgctcaaggccgggtgtctcagtcctgaagtgaatagaggggagctgtggttgtatcataatgggaagtggtgtggacgctgcagtcagagcctcggtttcctcatctgtaaaatgggagagaatagaattgttgtgagggttatgataacacctgtggtgcctcacccagaggaagtactctagaggaactgttgttaacattggcttttcagggtgttgtcacaacggctcaccctttactgtagtgttagcagacgctttgctccttgtga

SEQ ID NO: 47022 - DNA, 1175 bp, Bovine  19866880881662
  misc_feature (1)..(1): n is a, c, g, or t
ntctttctcttattctaattttctacttgtaagtaagtttccctttgcttggtgtttacttagatgtgcagactccttcacagcagacgagtgaatgccatgttttagaaaatcagtggctgacttttcctctgggcaaggcctttcatggcagttagcttatagcaaactccgagccaggtgggcctggcagagaatgaacactgttccagacagttcaagacgtctctgtaataatcccaactatcccttgggtgagacgaatacatgagtgggaataattacgaacaactcactcaagtggcaaaacccttccctgaaagacaaagagctcgtggcccgtgagctctcacggggcgagtgtttgtcgggtggagacatggcacacagctcagagtaagccaaaatcaccaatatatactattttaaaacttgtttctgttacctttccttggatgtcaggtcagaagtcaggcagtgtgctgaagaaagtggttctgtcatgcacgcatcactttgagatgcagagctctctgaggcaggttttgtactagcaaattcaatcacgtatttcaacatgtccggaagcgggaaccgggctgggcccgagccatacttcacatacctacgaggcagagaaaatggtactctagtgccaaagcatcttcttctttcaggctcgctacattattatatggagagtcaacggaaaggcttatccctaaaggctatacaatagttaatatattaatctatagagcaaaagttttctaactacgaaagtgaaaactgacaacaatctgaatctttacacttgacagaaagcatttcaggtgggctcctattcaaagtcacaccaatggtgctttctcttaattcaaatcacatttaggctctactcatcaaagtaaactctattttttaaaggaagagagatatattatcattactcaaatctgaaaataatgctgttgaactatcaggttggtgcaaaagtaattgcagttttgagttgctgaaatttgccatttgatgttggaatatattcttaaataaacgtggttatgttatacattgtaatgtgcatttcttgctttatgtttttttgctaatggcttattacttggtggttattttatatgtgttttaaactatggaaatgatgttagtcagaa

SEQ ID NO: 47023 - DNA, 1463 bp, Bovine  19866880904706
  misc_feature (1)..(1): n is a, c, g, or t
naccactgtgccatgctggtggggactcggctttggccctggatgacaccctgcccgtgggccctagggtggccaatgagggcaccttggcctccttagctcacttcccaagctatgctcatcagcgacccaaatgcaagggctcctccagggacaagagatgccactgctaggacgataaggatcaaacgtaattaacacggcctaattagtaagcaggcggctgcctgcctgtgccccgctctctgccttggcccagcccctggctgacggtcgcctccgagaagccctggatgaggctgcagacacatctaacagggagcacacagcacagcacagacgcacaccaccacgggacaccacccgacgacagcggacagagagaggccgtactcggtcttgactggtgcaggcggaagagagccgtcggccgtggaaggagcaagctcagaggcttgtccactggccccagcggcgggagcaggagagcccagggctgcaaaaacatccttggcaaggtcaatatctggggtcttgaagttcccttcgtccattttaaagtcctcgccctgggcagggtttgtggtgctgacggaggctgcctcgctcttcgggctggcgagggccctggcggcctcgggtgggctcttcgaggcgccgggctgggtgggctcggggtccggacctttggtgccgggagcctcctgcttggcctggggggcttccggggcaggggctgtcggggctgctgccaggggactggctgctgacggggagactgccttgctggctggaggggtcttgggggcctcgcccgcgctggccggggtgctggggctgagcacggccccctggttggccaggacgctagaggacaggttgttggcggccggggctgaggccggagggtcgctcaggtcaacgaggggggcgaccttgggggctggggccggggccggggaggcggcagtgacgccggtccccttggacggggtggcctggccggcgggcacagagtttgaatcaggggtggccgcgaccgggggggcgatactggaggtcagggtggtggtctcactggtggggctgttctgagcagtggcaaaggtttcggtgatagtgtcagagttagcggtgacggtggtgacagaaggcagcatgtcctccacagtggctgtggtgtcagcaggcagcctgcggggaggacaggaagtagaagagatagacgatgaagctgagacagacagagaagccaagagagggcggaggccaggagggggccgagggcgggcatgcggggacgcacaggcaggacacaggcccacagagaaaggaggacgcgggaggcagcacacgcccaggcgggcagaagaggaggacacaggagacgacagagaacgtggacctggcgggggcctctcgccttcctccctgccgcctgccctgctgcctgcctgggctcc

SEQ ID NO: 47024 - DNA, 1141 bp, Bovine  19866880913099
  misc_feature (1)..(1): n is a, c, g, or t
nccctcgtagaaggccaaagacctactgaaagatctttcagaatcatccacgctggtggtcagcaccgcacccatcgtgcgtgcatgctatgtcacttcagttgtgtctgactctttgcgaccccatggattgtagcctcctctgtccatgggattctctggacaagaatactggagtgggttgccatttcctactctagaggatcttcccaacccagggatcaaaccggcgtctcctatgtctcctgcgttggaaggcaggacctctccatcaagttctccctaatggccagtctgactccagcctggtgtgatacctgctgtcttcagagtctccgaagcagagcttcctcaggagatgtctaggaggatggagctgcgtggggcaatcagggcaagtggactgtggacctgggcttgtccagcccccagggcctctgccattacactaccagctttctgaccgttagcattttgtatgtgtgctctaatttgaaaatatgctagctctcaagctgagaagtgctctatgagcccagacagccacctggggatgaactggcccaccgagagggcccaggccagcagcccaccaggctcagacccgccctgcccaggggtgggaaatgggcagacagggcagctgggaggagggctgagctacaggtcactttccagcctgtaaacagaaacagcttctaagaggtctgtcggaagagggaaaactcctctgaagctccacagtccgaggctgatgcctcagcctgatattttcctctcaggaaggacggagaggcagtggtcgccctggtccctagcccagcagagtgagggcaacagggtcagtctgctagggtgcctgggaccctggaggagagctggaggcgtcagggaggagaggggcgaggatcctgatctctggtttggattccatctaccagcgaaactccagggcacgggctgggaggaaggggtgaggaacactcggcaacctgtttcccggctgcgtcctcccctgggaggttggcatttgaaggagtcaaattgtctaattaaaatttaacaattccttaccgggctcgatggcgggtgagacactgctgtcttaaacacatcatttttccctgttttctgagacttg

SEQ ID NO: 47025 - DNA, 2000 bp, Bovine  19866880920965
  misc_feature (1)..(1): n is a, c, g, or t
nctaaggtcatttcctgatggttcagatcccacattctgcttctagaatccgtgctcttaccttcattagcctgcctcctggagaagagttgggtttctcgttagaggagggaagacagagcccacgtgaccatcgtggtctgcatgaggctgacgtgccctgtgttctgcagaggagaaccagcgcctgcttgtgctgcgtccggacacgggcccgcttctgccctccctgctggcctccagggtcccggccatccggcagcagagcctggccctgctgctgcagctcgcccagacggagaatggacggagcctgatcatcggccaccttgacctgatccggtaaggctcggcgtgcgtgcgagcgggagcttccctgcggcatctcaggtttcacctgccacattaagacctgtcccctttcccacatctctgacgtgagaggagccagctgaccagattaagggttgaaaaccagaaggagcctgtgagaagaacactctctcttaaggacctccaggacaaactcctgtctgaacttactaccatggacagtgtcacttctgcgcttgtgtctttcttttcacaggtttatttatctggttgtgccaggtcttagttgtggcaggcagggtctttggttgaggcatgcaaactcttagctgcggcatgtcagaccaagtcccccagccggggatcgaacccgggtcccctgcgtgagtcttaacccctgggcaccagggaacagaccctgcagaccatgtaaatatggcggcacttgcaaaatccgatttggaacctacctgtaaaacgggccatttgcctctgctctttgagcctcagtcttggctccaccctgctcctgttcttacttttctttgtttattcctgtttcaggtaatgctacctgattttacttatccttaaatcctttctggagtgagtagggtacaaataaatacaacacatctcaaatgctgttgtgtgtaggtctttccaaggcttaaggtgataggaatggaatgtgcctctttcctaagtagactttttttttaattttaaatgagccatagtgatcctgcctggtgcttttccatctaaagatcattagtttgaatatgtgaaattgccactttttatgtcaagaaaaggttgcatgttggcaatttcatgtggttcaatttaaaagaaatagtagctgtgatcgtgtctgtgtgtgcatctgtgtgtgtgctcagtcgcgtccagctcttgaaaactcacagactgtagcccgccagactcctctgtccatgggattctccaggcaagaatactggagtggggtaccacttcctcctccagaggactcccgacccagggattgaacccaagtcccttgtgtctcctgcataggcaggtggtcctttaccactgcaccatctgggaaccccagccatggttataccattgctttataaatgcttcctatgtaatctaaaaacagaatttggcttccgattctgttcactattatctcactgggaaggaggcaagataagtgtccttcccccatttcacaggtggggtaggagagtgactcgggtcatctcagccagctgtctcccaggccatggagctcactcctagtctctgttccccgttagaaaggcagccaaatctgaagccgtgtcagacctgcttggaccatgctgagaattctggtgcctgtcccatgttggtgaggaggcccgtgggtgctgaggatggtatggggatgagcctgggctctgacttgccccttctcagcccagcccagccctgcggctcacaggacaagccctggcagcccctgaagctcggcgcacacgggcagatgggtcgttagcagagttaagtcatcaaaagcacattgcacatttcaaatgactctgcagtcatttcctccgtaccttcatcatatgtttttttttggttgggttttggtctttttaagtaaatacagccacagttatcataag

SEQ ID NO: 47026 - DNA, 954 bp, Bovine  19866880944977
  misc_feature (1)..(1): n is a, c, g, or t
ncgtttttgatagggttgtttgtttttgttactgagctatctgtttattttccagatgtaatacatgtctgttccatggagatgtttatatactcatgtcttatactttatatactcatatatactcatgtatatactcatacatgtcttatactcaatgtctaatacttattaaaccttaaagggttagaatttaagaaatgcactggccagatgttagaggatcaaaataatgttaagaatcattttcaggaattagttgggggatgcagtggggaggggaaggcagtagggggaggaccaaggggtgatttttgttcttgtttgttttgctttgcttcattctaccttttcatctctaggttgcttctttgagttttcttttcatgtctccctggcctatttgctcataaaagagatggactaagaaaacgaagggcaaaaaggaggcactttttattcatattacattgactagacggtggaagtcatgaatcagggttctcatgggtgaaaaaaatcattacgcttgtcttctcacactgctaaaagctaattgcattaaaataattatgtatgctgtaaataagggccaggttatctgagctgatgtcggtgttacgttgcgtttaaaaatttttcagtagtgtaattaaaagtagaatagagggacttgattgtcagatgcagggtttcagagagaagcagggcagggatgggggaggtaaattaatgaatggtggttgccttcctgtgtcaggagatgggacgcttgccttatttgtgttatttccgcaacccctactacaaacctgttatgtagacgttatctccgttttatagaagaggaaagagagtgacagtttgtcccaaagcaccccgctcttaagtgacagccagaatttaatcctagtcactctagctgcaaaggccgtgctcagtcatcccttgcac

SEQ ID NO: 47027 - DNA, 1598 bp, Bovine  19866880987423
  misc_feature (1)..(1): n is a, c, g, or t
ntgtttgagatgtgttattaacttctcgatccgtcctgctgctcctggtttagtctgtacacagtgggaagaaatcctgtttcttacccaaaattgcagagcaatttgatccagtttcttttgttgaaatgctgagctaattctgtttaaccacggatgatagtaaagttgcactaacagcgattttaatcaatgggaaatgtttagcttgtgtgaggtgagagctgggaatccagatgggtaggggtgtgtgggggggcggggaaccaggaaaccaactccatatgaaaatgttaactgtgtgattaagcataagctttttaatagagttattatgggctactaaagagacctttattgcatgaacttggaggcagaatataaatgttcttgtatgcctattaaagaggaaagcaaagattaccccctctctctctttttgtcttttgcccatttccagattgctttccagaaataacaaccagcttgggaaatttaggatgagactgacctagttgatattaatcatatgtcaaaaacagaaactgagggcagttgttcgcatgatttaatgggtggttagacagacctaggttaggacgctaggtttacccacgttaggacgctagccggagaaggcaacggcaccccactccagaactcttgcctggaaaatcccatggacggagcagcctggcgggctgcagtccatggggtcgcgaagagtcggatacgactgagcgacttcactttcatgcattggagaaggaaatggcaacccactccagtgttcttgcctggagaatcccagggacgggggagcctgctgggctgccgtccattgggttgatcgcacagagtcaaacacgactgaagcgacttagcagcagcagcagcaggacgctagcagatcatttcagcttgcctttattggcagaacaattagggttggacttctacttgtgtgaaatcagtagtacagattgactgcacattaggaaaacctagaatttgccttcttctgtccccatggcagctcctcacaaatgtattgagttttatatcacacaggagaacagatgatatgtattttcatttgtcataagttttctgatttttccataggctcttgggtgtaagtaaggtgaccatcattcccatgaagactttgttcccaatcatttcacgttgctgtgtcagagaaggatggcaaatattttcaccacctggcttgatttgattgttttgctgattggctcttttttctgagaagaatggactaacgtgtcttcaggtgtatgtgtattccttcacctctctttctccccactattaaaactctgctcagacgctcagttgtgtctgactcttttgcagccccatggattgtagcctgcctggctcctctgtctgtgggatttcccaggcaagaatactatttcctacttctagagatattcctgactcagggattgaaccctggatctcttaagttgcctgtgttggcaggcgaattctttaccactcgtaccacctgggaagcccgattaaaattctgtccgttcttaataagatcactgtcctttggccacactcat

SEQ ID NO: 47028 - DNA, 1438 bp, Bovine  19866881014559
  misc_feature (1)..(1): n is a, c, g, or t
ncctaatactcattgctagacattgcttttaccattttcaaggataaagagtagaaataaaggtataggtagcacaccaggaactacttcctgactctgaggttctggaacatacggaaactcaaggaggctcctgtggcccccttaccaggaaagctataaggaaaagggccaccctgcccccgcccagcctacttggactggggacagttctgcctggaagggaggggagggaccccatgacctccagagggccctgccagtccaggaagcctgagtctccggtacagcctcctgcttggccacagatgttccctgtcatcaatcattgagggcatctgtttgctgtgccgcttgtttaaagagcgaggcgtttgctaattgaaaactaaaagatccatccgtctcactcagagccagcatgaaatccactcagccatgcaagaccagggtggaaaaggcagcacagagctaccgctaacgtatcttcaggttggcgcaccccacggaagtcatctcctgtttcctgagcaagcctggctcccctcctcacctcgaagcagccaggggctgcccatgctaccgtttatctaatacttcctcatctattatccccagtgtagtccagagagaaaggtatttttagccccaatttatagatgggggatctgaggcttagagagattaaactatttatccaaggtcacacaactggtaggtgacagaagcaggacatcagtccaggtcttctgactggtcaggagaggagtggcctgtccactgagtgactgtgtccctcagtcgatgtacaggtgctgagctgggaggcaccaattgcttccttaagtggattttaaaccttgggaagagtgatgtgaggctatgcaaggcagaaccctgagatttcaactatgtctgcaatgttttattgctttaaaagcaaatatggcaaaacgttaggattcctgattgttataatatctcgccatcaagcctgcagggagacaggaatggtccagatccacgtagagtgccaaaggcatagagtaggggaagagacatgtcacgcccactgacatctccttccgttcctccagtttgcctccagagatggtagatgtgctggtctgagcccccagagatgggggactgatccagagctggatctccatggcatctggaagggattccatttctctgtacctctgttctttcttgcagagtggtaagagtgggatttagatgaatgctaatttgtttttccagctctaacttttgataattgtctgtgtcattgaaggaaatgctgagtcaaatttaacctttagggcctagagcctcaaagtcctggagcggcttgattccagccacaatggactgactccctgatatataggtctaactctgtccttgttgttcccctctgcctggaacaccg

SEQ ID NO: 47029 - DNA, 1457 bp, Bovine  19866881036541
  misc_feature (1)..(1): n is a, c, g, or t
natgcttggaagtaacagcctgaaaccttctcgtgtttagaaacaaaatgtgaaagaattttttaaaaaccttgtttaatgttaaagatgcaaactatggtaatttcaaacttcaggtcatcaaagcagattttgatgttgtaataccttgttaaaatttaatctgccttttaatacaagtttgggccccaaatcaagtgtgtgagactgagatgctttaaatttctgaggcgactcctaagtcatcttactgtgtatgctgtgagcgggagagtccagcctttggaaccaggtacgactgcttgcagatccttctgggctcctccaagggcaagctactcagctgttagcctcagttttctcaactagaataacagggcggagaagattaaataagtgtatatataaagtgggtgcttaatagatgtgatcttttcatgggtggctcaaccgtcttccttgacaaccaatttaattgtctctccttttacctatttctgtacctaaactgcctcttcatacattatcttgtttcctctgcatccatatggcttactgctatctgacctgatctctttcatctatttgccttactgtctgctgtccgtattggctcgtgaggtctgggagagaagggatttcttctgttttctctatctttgcctctcctgtatttaaaaaaagcctgatgtgtaatatgggattcccaggaggctcagtggcaaagaatctgtctgcaaatgcaggagatgcaggagacgccggtttgatccttgggtcaagaagatcccctggaggaggaaatggcaactcactccggtattcttgcctgtaaaatcctatggacagaggaacctggctggctacagtccatggggattgaaaagagttggatatgactgagcacataccacggtgtgtaatacaagctcagtagacatttgttaagacttctcttttccctctttcataactggctgtgaccatcactttatctctccatatcttactttcttcatttgtcacagaagcacactggtctagggttcagttcggttcagttcagttcagtcgctcagtcgtgtccgactctttgcgaccccatgaattgcagcacgccaggcctccctgtccatcaccaactcctggagttcactcagactcatgtccatcgagtcgttgatgccatccagccatctcatcctgttgtccccttctcctcctgcccccaatccctcccagcatcagagtttttccagtgagtcagctcttcgcatgaggtggccaaagtactagagattcagctttagcatcattccttccaaagcagctagcaaactacagctcatgggccaatctggctctccacccattttgtaaataaagttttattggaacacagctatgctcacttgtttacatattgtctgtatctgtgttggggctacatcagtaga

SEQ ID NO: 47030 - DNA, 1621 bp, Bovine  19866881078357
  misc_feature (1)..(1): n is a, c, g, or t
ntccctttcctgggaggtcttgaaggagggacaggtccttgcctggtgggtgtgttggaagggccactgatgccacctcctcctctccttcttcaggcaaagagatcattaaccacagagtcagtgttgcaattctgaatccagaaagttattacgattaatgggagtcttcattcagtccagggtcaccaacatcccatttcacctgggactaagggtttatccagggtaaaggatttgcagtgctagcacctgcaaagtcacaggctaaccaggatgcggtggtcaccccaattcagtgagagagtagaatctgtaatgttcttccgcatctcctacttcaatgttcagcattggtgaatctacacaggcttccttccctactctaaaatatatttcacttggagtttctttttagcactggatatgtctgatggggcataaggcataattaattattgtctaagatgtataatgatccaaaagaattagaaaagcacgcacacttagacattatctaaacaaaatttctaagtattttccactgaataattggtgctggtggctagacagtggtgtaaaaacaggacaagtctatctgaagcccatttatcattttgtttttctttttccttagtcactgattaaaggaagcaagtcacaagcacaacttttcgtaaatactttatcccacagacattaggattacacagcctccctgttgccgctttttgtagccccatggccagtacaggtgtaccttgcaaccctgttaatcgagcttccaggggggtgtgccaggggcccgcccagaccaagtagcagggctctcgtcagttttgtctctggttcctcctggtctcaaagggaaaggcagccccctcggccatcgcgaggttctcagcgtaactaagtgagttgggtggggtgggctggccttaccaagcaacatacttgtgggtgatgaggtccaaagcctggtgacaagcctcccccagctcttctgtcccatgtctgagattctgtcttccagagaacaagccaggaccacccacccagaaggtaactgttttataggctctgcaaatcttctgtctgaggtcatgaaatagatacaagagatggtttccaccagaaatgccagggtcccaagtgttttaaattttcattttaactttttataacagatgttctgtcatctcatggctttcaacatacactaatgaaatagtttctcttaaaataaattagcattttacaggagaaccatcccagccctcagaattggtcacatacaagctcatctttcttgtcaacctggattcacagtgttactgcaaaaaatagagaaacatcgactttttctctgttgagaaatgctgaagacattttttccctctctcttctcacaaaaagactttaatgaatgttccattaatacaaggcactaaggattatcaccaaggcagttgagccataaatgcagaatacttacaggaaacttgcctatggcaaatcatgctttacttaatcacaactggaaacctgttattttttttaatgactctaagtcataaaatttaattcatgcaaaagctggtcacaagaatgcaacatcatt

SEQ ID NO: 47031 - DNA, 1497 bp, Bovine  19866881111506
  misc_feature (1)..(1): n is a, c, g, or t
natgcagtcacagtccctcccttagtagacggcctttccgctccatgcttaggaccaggaatgataaacgggagctgtccacactccccggcagacagcaccgtgctgacagccacctctgtgtccatctcacgggtgcttctctgtttgcagagtgtggggccaggcccctggcttcccggatcgtgggcgggcaggcagcagctcctgggcgctggccctggcaggccagtgtgaccctgggctcccggcacacatgtggggcctctgttctggacccacgctgggtggtgaccgcggcgcactgcacgcacaggcaagtctggggccccccaaaacgggagaggggcgcctctagggccttttctgaaagtcagccgttggtaccttctgtataagatgtccacctgtctgcctgccacgtccggtgcaagtgggccccggagtgtttgtgaaattctccctgttcaagacctgccggaatggcaataataatacaaacattggttcttcggcttcatttggtttttaaggttttaaaatgctttcccactcatagccctctgtactaatgtttatcagcaccgtagttaaatccatttccatgtgattctttatgtccttcctccccttcagattggaagctccatgggggcaggcaagagtcttgtttatcactgaatccctttgtggatttcccttgccttgttcccatggcctagaacagtcctgaaatacagcaggtacttaatactggttagaaggaaggaagggttctctgcccatcttctttgacagaaggcagggcaggtcgtgtaaccctcatgttatagcgaggagccaaggccaggagaggggaagtggctcccttgtgatcacacctaggaagtggggagaccacacctaggaagtggggagacggtgctgagcgcagccttgctgagtcagcttagagctctcataccacatgaggctcttccttatctgttgcaaaacctggagggggttatactggagggaggcagtagtggccgatgaccatagcgtctcatttctcaatccatcagggcctgagcatttattaagcacctactgcatgcccagtgtcttaccaaatgctggggtagattcaaaaaggcctgggtcctgggaacttgcagcccggtgatagcttttctggtggcttcttccactaatagcttccccactaatagcctttctggtggcttcttccacctgccacctcacctatgtcagcgtctcctgcccctccttccctcgggctcagcgcggcctccgtgtgcagtttcaggctgtcccgcctgtccagctggcgggtccatgcggggctggtcagccacagcacggtcaggccacaccagggggctgtggtgcagcggatcatcacccaccctctgtacagcgcccagaaccatgactatgacgtggccctcctgcagctccgcaccccactgcacttctcaggtgaggctgcgg

SEQ ID NO: 47032 - DNA, 612 bp, Bovine  19866881119386
  misc_feature (1)..(1): n is a, c, g, or t
nggaggagggtggggcgacagaacccagtcttcccttggggaagcccagcacttcacagagtgaagaagtcagcagagataccttgcgggcacctcttctaggctcagtagcggcgtggctgtcatgctggtacatgaggcaaactacagacctcgggtttgccacatgccgggaagatggaatgttttgtctcagcctgtgatatgcaccccatttgccgtagagattaccgcttcctgggccgcaagtgtaattagatgatcaatcacagaaagtctaaagccaaggcagacttgggggagagacatttgttttacggtgtcagttcgaatatcagctgggcagaaagggccccaagagaggctgtgcttcagaaacaagggcctccagcaatagcacagaagccttcaggcagaacgaggagtggtaggaaaatctcagctttgtccaaatagcactggtgtttcctaaagcctccccagccctgagggttcccatcttcctgcagccaccaggcttaagggtgaggatcaggtggggagatcctagagtactgttcagaccagtctgtacagttcagcaatgtctctgcaactcagttaccccggata

SEQ ID NO: 47033 - DNA, 929 bp, Bovine  19866881188465
  misc_feature (1)..(1): n is a, c, g, or t
naatcctccctgatgagtctgggtgcttctcttaggcgggctgtgtgaaggctgaccaccagtttacttcctagcaggagtggtgagcccctgtctttagagtgagtactagtactaagtcaatgcactcgtgtccagctctttgcaggccttaaggactgtagcccaccaggctcctctgtccagcaaacagggcttcctgaagaacccaaggcatatgtcgcccattggatttagctttgaggtactattcaaaattctgggcaactataaatatggacaaggtagcaagaacacctggctttaaaaataaatccatcaattagtagagtggagtgtgattccagtttctttcagttctacatcagaggccagcgactaaacagttgtattaccctaaccctagctgctaagacacacctccagtccagaagcccatgaatctatttctgattttcctcccattccaaaatgtgtctcacccttgcgactttccccttagagctagtcccagaggctcagaagggtaacatgaatattttaacaggaacttcctggaatgccttctttgcaaatggtgaaatgttcaccattcaaaggaaggccagtggagaagataacacggaactcatcaaattctaactgcattaagtttggcaagtccctgagttattttcttaaaatgccttgcacataataaaagcttttggcttgaaaccttaattgattgatgtccctttctgtttttcatacatatgacaacacacttctccatgtgtaaccacaacaaagaaatgtttttaatgctaatttgccacaaatgtatgagaaaagactgagctgaagctaagatttaatgagttctatttttatttctcattattttccctacaaagtagcaggtagataaaagcaccgggcagttttag

SEQ ID NO: 47034 - DNA, 2240 bp, Bovine  19866881226249
  misc_feature (1)..(1): n is a, c, g, or t
ntcgcagttccttaccttttggtgtggatgaggaagtgatgaaagaatttcatggcaacgggtgggacacacagccgatcaccaggttggaaagcagagggcaacaaagaaaagggaggagaaaactgttagtttatgtccttggaaagaaggacaaagtacgctcctgagtaacatctatcgcgtgaggaacgcagcaagagcacaacgtggagacactttgaaacacagtgacacgcttcatcacagcgacctctccttccgtcataattagaagcttctggcaccaagaacaaagaacagctctccggcgtcgactgcagaccttccttccagagcctgtcttttcttagcgactgactcttactaaaaacatcattttccttcaacagggcagaacaatgggctctctgggtacagatttctctccttgcacccccttttcctgaatcaaaggaaagaatcccactcctagcacctacatccgacacatgggcaccaattactgtgtccccaacacctatgagaagtgccctatgagagcatcagtatgcgtggccactgtgtaagaagctttgggtgccagaacagccactgttctgtagtcccggtaggtgcagggcagcccgctttgggcggggtcaggccaccctctctccatccttgtaacagctatgctgtcagagacacagggcagggcaagtggacagtggtgctcacaccctgcaagttcctagacacaaacacacacacacacacacaaacacacactctctctctctctctgtcttcctaatatgctggatcccaaacacatgtgcacccatgtcaaagccgtgcggccaaacttaggagaaggaagttgtgttgatacccgacgtcccgaagaaaccacactgcagaaaccatgaagcagagaaaggagggccctcccctcgggcccgaagggacatgcaatccctggagctgagatagactaaacagatgcgatgcggggggacctgtctttttcttgttataaaaggcaaattctcacagcccagctcaaaatttaggtcagagtctcctgggaacactgtcttttcttacacagcttacagacattatttcaaggcctattgttagctgcatgaggtgagccttgcacagaatatgcttacaactcagctgacttttttagccctggcagagggcggggtgggggtgggggtggggcgggaatcgtgggcctggcttgaataccagcccaattgctggtccagcaagttgaaacagcatccacgtggcagcgagttgaaatggtctctcacaaaaaagcacgacacatccctctttcatcctatccagcacagaaggacacacggctttcagtcaggtcaaaggacgtagttaacctggatatggagggatccagagctcctggatggggcagggatgactgactgtcctccaaacccacttctctttcctcctgggcacacagctgaaccgcatccccagcctcccttgaagtaagctggggccgtgcgctttcgtccaggccaacggacacagtgatatacgccacctccaagactgacccacaaaacagccagctcaaccctcccctctgccttccccggtctgcaggctggatggtgatgtcccgggtaaggacagtagagctccaccaccctggggccctgaacgactctgtggagcacagccttcccctttacgagcatgagaaacttctgttgcgtgagccgctgaggtctgggggtttacctgccacagaggcccaccttccccttaactaagtcacccattctcatccctggtgagggactaaacaccagatcttagcttctcttagatgctcctgcctgcttccagcaaagccctcctttccccttgagccaatctgaatgtgtgctcttcctcaatcaatgaacctctgggtaatgccccagatgcccagcgatgggcacagctgactgcccatgatggggagaagcaggtggctttgtggaccccacgtgcagctcagaagggttgaaagcatgggaagaaggactgactgacaggctcacccccaagacatcattaggctgtttggcttagcctacctaccatggaaaaggcagctaggcttacaattaatttagaaggcccataaaaaacaacttcctgctagtaactggaatgtcttggatcagaccacaaggtctgatgtcttcagagctaaatatgaacaggca

SEQ ID NO: 47035 - DNA, 1127 bp, Bovine  19866881243285
  misc_feature (1)..(1): n is a, c, g, or t
naacgacagtagttcttttgttcatagggtatattcttgcccctaagtatatcctaaagtatatttaaattaagttttaaaagagggaaaaggaaagtataggtttaaatggatttttcagtttaatttttttctgatcttcatgtatttttaaagggtaaactcagtttaatgtaggttgaaatttaatccctgttacctatgggatatatggtcttccctggtggctcaggcagtaaagaatttgcctgtaatataggagactgttgttcgatccctgggttgggaagatcccctggagaagggaatggctacccactccagtggcaaattccatagacagaggagcctagtggactacagtccataaggttgcagagtcagacacaactgagcagctaacacacacacgtgggatataatgcaaaaacatttgaaatatgaatttcttgtaatagtgtagtttgtgacataaattcgtgaggttgctcccaaattatttttgttatttgagtcaggaaatcatgaagataaaaaagtatgtagaattagtgtagtttgctagcagacctttaattttttctggtatggatatttagtatcatgacttcagggtaaggtacacgcggaagtctgtgtaaatacatgcaaatatgaccacatattttatttgcctagcctctgaagagtagccataccattggtatagttctctacaactgaagaataaaagtaatttaacttaaataaatgtgttgatttgcacatatgtctctcattgtgaagaaattcctataattgattttctttagcagttgaaatatttaggtatctaaaaaacctagtaaatttcatggttctagtttgaagaaagacataaatgaaggaaattttaagtctggaaattatttctttgtagattctcaagtcatttcgactaacccaaagaatatttccaccaacaacgtctgccatttcattttagttttgatccatgcagtataaatgaatacttgatttgtggattacaatgtttcattctataaatagtaatactggaatatctccaattttcaattcaacctacacctaacacagggaaatgacaattgcttactgattgcact

SEQ ID NO: 47036 - DNA, 785 bp, Bovine  19866881343292
  misc_feature (1)..(1): n is a, c, g, or t
nttaataaatatggatttgctatttcttaggacatgcttcttaaataatttgtatgtgttattttacaacatgaataagttgattttcaaacaattgagcatctctcttttgcgtatgcacattagcctatttatgtcatgttctgttagtctcttctataaattgattaagaacactggtatgtttgtttttattttcctctaaggatagagtaatgcctaataaaaatgaaaggaaacacgattttttcctaattctgaaaactcattatttatttggaagattgtggtaaactctacccttgtataatcattgcatttttttttttttagtcctgtgacaaatttctttaggaatattttttcctctgtatttaatttttagaggactttccccgtgaaatataaattgtaaatgtgatagggattgtcgtaaagaaaaacaggaggttctaatccacatgagggcacatctgggcatgcatttccacacagaccactacatggtcttagaagcatctttgacctataccagctacagaggaagttaggctgtttcagtttgtatgaaacttgaaatcaaatttgccgcagacagtgaggtgagaccttggatgtctttagtcagcatcttttctggcccaaacactagtcttgtgagcccctcacttggtgtggagactgtaggttatattaatcccatccactgtcaagttggaagctgccagtggggatgactggcttgtgggcatgtggatacacccatctgggctttccatagattc

SEQ ID NO: 47037 - DNA, 1479 bp, Bovine  19866881371136
  misc_feature (1)..(1): n is a, c, g, or t
nacgattctgaaatgcatgggatgcaggagtccaggccccggaatagtatcaggtcacgtgcttaagaatgacctggatggcttgtgaaagtcagagttccttgctgattcagtccctctgcagtggagccctgtgattctaatgtgaaaatactccctcagatgattctgacatgtagccaagtgaagattctctggcctactcactaatctacctggcgtaactgatgaattgcaaacaacatcaaacccgtccaaacccttcaaggccctgcacaaagtttattattatttttttaattgtacaattttatttatttttgatggagctgggtcttcactgctgcgtggcttttctctagttgtggtatgcgtgtttctcactgtggtgcttctcttgttgtggagcacgggcttgtgggcttcagtaatggctgcaggtggctcaatacctggggctcccaggctctggagctcaggatcaatagttgtggtgcatgggcttagctgctccatggcatgtggaatctttctggaccagggatcgaacccatgtcttctgcattggcaggtggattctgtaccactgagccaccagagaagcccactgcccagagtttttgatgttcacaactgctatgttgccctaatacttggctacttatcacattaagcaatgcgacacagctctgtagaaactcctatttcatgctcttcttttcaaatttgtcacatgagctctttagaaagtataaccctgaactcaaaaccaatataataaacatcatgtttttctaaaggtagatatgccctccaatcaaaatggatataacagtaaaggacagcaagttacaactgggtatcactgcccttgacacagagtgtgacactcttgggttcacctagcccaggacgacaacctgctgttacaaatggaaggtcgcagtcaccatcagtggtcagttgagcggtcttgctcttgctttgctaagctggtcagcctgaattgttccctgcataagccacatgaatgtgctggtcactaagtggatgtgggtgagacacctattcaggaatctcagggcagacccctgttaactgtaagaggaaaagagaggtaaggggaagcatgagatatcagacaccatcttcctaaaatgagacttctgggctctgaaataaaaacagcctttagaaattccgaaattagctctaaatcataaaagaagatgaattcctcctacagtatcctcaaaaggtcagttaaaaaggagacccagccctactcagcagtctttcagcctagaaaacattccggtccatggtattaggaactacctgcctcttacctttattctgtgatattgatggatttcaaacctctacaggaacatttacacaggcctctcaatcccctgtggaacctgatagaagaaaacttccaattgtttcaaataattcctagctgaattcgtcttg

SEQ ID NO: 47038 - DNA, 1656 bp, Bovine  19866881380518
  misc_feature (1)..(1): n is a, c, g, or t
ntaaaacaaatacttttattgcacatttataaaatctgcatagttgtaacaagtctttgaccctcccacaattcccctggtaatctttaaaatttggttaaaacacaatacccaatctggagccttctaaaaatggtcaacggggtatttctctctctacatatacatatatatattttttttttacaaaccccacatcccctactttttaaaaggaaaaaagggggtggggtgtcaaaatgttcttctggaccagcagcagccttagccatgtgttttagccattttcagatgctagaaaaatttacctttaaatagttaacaactctgaaaatgtgatctttagtcaagtttcacaatgctgctcttccatctgatgtccttaatgctttctcctttctttcactcgggactgagtatgaggttttctggtttatttaaaaatataaaataaaatagaaggaagaaaggagaggcagccttcttttgacttttcagcctcttactgccacatgaccttatgttctacccacatgtgaaagggtggtggctcatcaacaacctatttttttcatctcctgtcaagagccgggcaacaacccattttttcatctcctcccttgcagctaattttttttaatgtcatctgtatctgataaaataacgagtagctgttcatacagttcaggtcctgatgaatcacccttttagtctgctgtcaaaaatactgatgcctgaaggatactctgaggctcagaaaaacccaggctgtcttgcagggacaagagacatttcagggcttctgccacaaatcaatgccttaatatactggttcctgccttttttcgtgaaattgcttctatgattctgtacctaaaaagtgcagttttattttcaacccttctttacacacacagcatagttaggatctcgatctgagtctcactttcccacctaatccctttcccagggtaaacactgtgacaacagacttctgtgcaacagacggtcaaccaaagaccaggctgggtcttgaacacgtgggggcttatttcactgtcacagctgacactccttgaattgactccatgacagctgcaaatcggctacaaaggtcatagggagaattgggccgaatagttggaggctcctttaagacaatgatttctgcagaaggatctagaagtctgggtagaaactcccctaagcacagctgcagattttctgtggagggaaaatagatggttagtatacagctaaataaatctcttgagttaaaactagtaagtctgcaacaacctccaagttcaaagcattattctggccagctaatgacaaatgacgattccttcaggccaaatcaagagcaaagacctatttgccgattatagcagagttttaggtcattgttttaaggcatctgacatgcggcaggataacactatatattcacttcattatggacatgtcttctaatcaatcatcctttaaaatttgacaaagtaccataaatacaatgtgctgtgaacatactactgccataaagataacgctggtcttatccttcaattaaaatataccagtgtgtacatggcattaagtaaagctataacgtcacacacagtttaaacaaaaactaaaacattaaaataaatt

SEQ ID NO: 47039 - DNA, 1544 bp, Bovine  19866881398389
  misc_feature (1)..(1): n is a, c, g, or t
nttcgtgaaataggccctgggggtacatcctcatgtcttaagtagcttgctattgcataaacctgagaagaaggggaaaaaagacaaatggaaacagcaatttctttctagctccttggttttcttagagcctttgtggtcatgatgttagttggcaaaatacagcatactgtcctcagagttatgcatatctcttcccttaagtccacagggatagcttatcacttaaagaaacatcaagcttttttactgtaccccatggggagtaaatgtcttgataaaagagtggtccgccttgttttctgtctctaacgcacgctcctaccagatggtgacgcgtccaaggatgactgggaatgcactggagaagggccaggctccacttgtcaagctccgtcttatcagcgtcgtcctgcaaggcggcgggaagtgggcctgctcacccaccaggctgccctgaggctgcttttctgggctctcatggtgtaattaatagctaccagacacttgttttctctgccttgcattggtggctcagatggtaaagattctgcctgcaatgcgggagaccggggttcaatccctggatcaggaagatcccctggagaagggaatggctccccactccagtattcttgcctggagaattccatggacagagaagcctggtgggctgtattccatggggtcacaaagtcagacacgactgagtgaccaacacacacatggttatcaggaaggatgacagccacccctggtcgggtatctactccacgtaccaggtgcttcatggatcgttttgcttgtgttcccctccacttcatggtgcagataagacctccatctctgcctcaccaaagagcggagccaggcatgactgggatgggaatagaggtagcaggagtgaagtgtagagaaggaagacgttccaggctcagtgggtggcagcgttcccggtggtctgactgactgggacccaagttcagggcagcacttcctcagtgctccaggaccccaggcttcaggaggcagcgctggccgccctggtgaggctggggcttctgatgagccaccaggatcagtgagggttggctcaggtgacaggtgggcctgtgcctacaggttcaagtcccccactccacctggcagaactgggacaagccaaccttggcagaaagacggggatgcccctgatgaactgccaccgtggcctcagtcatacaaccataggatagaatgaaacctaaaaatcgattagttcaaccccttctttttccaaatgaataaaccaagacctggcaagataaaatgactcgcctcaagttccggaggtgttttagggccagggttagacacaaaccctgcttttctgcttccttttcacctgcttccccacattgccaccctctgtggtttatcctacccttacagcaggggcccccgtgccatcgcacaaatgaggcaagtagacagagtccagatctccttactggggtgggcagtaaggggcaccgggattactcctgccagacctcacggcctca

SEQ ID NO: 47040 - DNA, 799 bp, Bovine  19866881408247
  misc_feature (1)..(1): n is a, c, g, or t
ntgaaggcagttttacttccttttctatctatatgacttttatttcttttttttcaccttattgcactgactatgcctccagtaaaaacattgaatagaagaggcaagagtggtccttcttggattgttccttatcttagaggggaagacttttagtctgtcatcattaaatatgatattagctctgtattttcatcgagctaacatagaactaaccctgtgtctgattaaggtagtttccttgtatccaaagttcgctgaaactttgtgttattaatgtttttaaatataaattgtgtttgtgggattattatttgcttaggtatatgtacaggagcaaagagcttgttcgaagtaagcgaaattgtattcaaaaactcaaagaagaaataaaaattctgcagcaaaaactggaaaggtgagtcatagacacctttgtacttagaatggggtattaaaattggataatttgcttttatctaaaaattaattgtgagtttaagtattaactaatatattttataaaatggataaggaaaatgtgaaacagtctttaagatgggcagtggtggtcccaggacacctttgacccaagtcacatggtgagttattgacagtgtactgaagagaagccaagttctgatttcatagctctttactttttctgctctccttgccatcttgttcacaaacacaggagaggtaactatcacaaaactctaatccctttgtcttgagaaagcagtttttgaagtgcctggtgaaggtaaaacaagtcagcagtgctgactcaaagaga

SEQ ID NO: 47041 - DNA, 1545 bp, Bovine  19866881535008
  misc_feature (1)..(1): n is a, c, g, or t
nccgctctttaggcatgcaggaactaaggtgggtggctcacatcacgcatcatctttagtttttgtgaactgcgatggtcaaagatgtggtatgaatctctgttttgctgctgttcactggctaagttgtgtctggctctctgggacctcatggactgcagcacgccaggcttgtctgtccttcactatctcctggagtttgctcaaactcctgtccattgagttggtgatgccatccaaccatcttatcttctgcccccttctcctgcaatctctctgcttgggactgtttcttgctggccgaccccatgggagagaattctggaccccaaagaaaaattagtatggtgtttttcttgtgaatttcacttagggcaacttcagttttacctcgcttggaatctcccaagtcccagctgggaaaacacggaaatgtgcgtgtctcaatataggaaaccacccgagacagagttaataattctgagaaatgaatgttctctacaccctctgctcatagggcctcaaattcccctctgatatctttcctgtggatataggtccctaatggataaacatattttcaaaaatgaatcaaagtcgttgggtaaaaagagaaagttctggaagctggaaacaagaacaaaagagaaaccgggagtgataggagaaaagaagcaaagggaagcatggctaaataaactacagggggaaacagttctttgtttaaaatgggaagaaataataaattacatttctactatgaatacaaatttgcctgaggagaaagatcaattacaggagagagattaaggatttaagtgaccattaattaacagtaaattatgccccttgaaagctaatgtgacattcacacaagcactaaatgactcacagttcagtgatgtttcaacagacactgatggaggctatcaacagacccaggaaagacaccacactagcactgcctccttgaatgctaataaccagcatcaaacaatgcacttgtaagatttctgaaaagtagaatgtgttatgaactgagttgtgaagcacttctaggtaaagagaggttttaaaaagataagaatataatagaattattcctttgctttccttatttcaatgagttacatacacacctatcttaaagtgttctgggcactttgatgaaaagagctgtttctggtttatgagtataccacctttaggatataagagactagtactgcaacaggctgggacctgggacctagggtcctctgctgtagtgtttgtacctgggcaaacgtctcctggagaaacagaatacaaagaagctgtaagggactaaaaataaccatgtgcatgtgtagttggggcaaattatgaacaagatacaaaaagaccaaaatcccaaatgccacttctgaagagtggggagcaaaagcagggtaccgtgtttgccccctgcttacaacactaccagagtggtgggcaaaacacctaagccacgcctctggctcgatcacagacctgcccctagcttcatcccatgtaaagagccag

SEQ ID NO: 47042 - DNA, 2378 bp, Bovine  19866881574355
  misc_feature (1)..(1): n is a, c, g, or t
nctttcctgttgttaccttatgtttggatttctctgcttatataacagattgaatgagcttaatccaagtgaggtatatttttgatgatataaatagatgtgattccccattctgcaatgaatcagtgattaaaaaagcaaagaccacccccccaaacaaaaaaaaaaatcctcttcattaaatttttttcctattgaatctagtaaaaaaacaaaaacatgctatagttactatgttcttagggattaaaaggaatatttcataccacattcaaacattaactcaaaatggatcataaacctaaatgtaagagctaaaactacaaaactcttagaacaaaacataggagtaaatattcatgactttgaattaggcaataatttcttagataagacaccataagcacaagcaacagaagaagaagtaaatgggacttcatcaaaatttagaacttttgtgctttaaagtcaaatgacaggaagtcgatgacaacccacagtgtgggagaaaatacttgcaaatcacacagctagtaagaggtttgtatctagaatatataaagaactcttacaactcaacaataaagataagtaaccaaaatttaaaacaagcatcaaagaacataatatagtgagaaggaaactcatggaatgtgagaaaatatttgtgaatcatatagctgataaagggttattatcccaaatattaaagaacttctacaactcaaaaccaaaatccttatttaagaatggacaaaagacttgaacagacattttgtccaaagtagatattcaaatgccaataaacacaggaaaatatgctcagcatcacggctatggaccaaactgtgttcttccaaaattcatatgtggctgtatttggagacaggactctcaggagataactaaggtaaaatgaggtcacaagggtgggccctcatgcaagaggcttggtggccttagagaaagaggaagagagaatgatctctttttcctccatatgaagacacagtgagaaggcagccatctgcaagccggaaagacaacttttactaggaaccaaactggccagaactttgatcttgaacttcccagattcccaaactgtgagaaataaatttctgttgtctcagtcaccatgtctatgatatttgttatggcagtcagagtcagagctggcttatataatctctaatcactagggaaatacaaattgaaacccacaatgaaataccatttcactctcattaggatggctactttgttttttaagcagaaaataagtgttggtgaggataattggaattcttgtgcactgttgttgggaatgtaaaatggtgcagctgctgtggacaacagtgtgctgttcgtaaaaacttaaaaataggactactacgtggtccagcaattccactccttggcgtttacccaaaagaactgaaaacaagaactaggtcagatatttgcacatccgtgttcacggcagcattattcacagttgccaaggggtggaagcaacacaagtgtccatcaatggaggaataaatgaacaaaaagtagtgcatacatacaatgtaatatttactcagtctttaaaagaaaggaaattctgacacatgctacaatatggatgaaacttgaagactttatgctgagtcacaaagtaagccagtcacagaaggacaaggtgattccactatacactaggtacttaaaccagtcaaattcagagagacagaaagtagaataatggagtgtttcccaggggctgggaaacggggagttagtctttaatgggtataaagtttcagtttcagaagatgaagagttctggagatggacggtggtgatgattgcacaacaatgagcatgtacttagtgccattgaactgtacacttaaaaaatgattaagatggtaaattttatattatgtgtattttaccacaacaaaaataattatttagggacttctctagcagtctagtgattaagactctgaacttccaaagcaggaggtatgggtttgaatgaacagggaacgaagatcccacatgctgtgcggccaaaaaaaattttcaaatgactacccaatgttctgtaatgacctaaatgggaaaagcatctgaaaaagaataggtatgtgtatgtatagctgaaccattttgctgtatacctgaaacgaatataatattgtaaatcaagtatactccaatacaaatttgaaaaaaaaaaatgagcaaaggacttgaatagatatttctccaaaagagatatacaaatgtggccaattagcacttgaaaagatgctcaacatcattagttattagggaaatgcaattcaaaaccacaatgagataccactctaccccattaggag

SEQ ID NO: 47043 - DNA, 1332 bp, Bovine  19866881628305
  misc_feature (1)..(1): n is a, c, g, or t
ntaatgctgtggcttttcctaccaatgccaagctgacttgtaagtgaacgattcacagaatttgtcaggcgatggaatgtctcctgaccacatacaattgactagtcactttcagccttcccagctgagagtacatcttcacttacaaggaatgatttcaggatcatgaagatggtcagttcaacttggctgtaatttcgctctcttgagctcccaggagaattgcctgactggcccacaggttttgcaaattgacaaggggccctaagtttcagtctctcttttgcaagaatttttctggtaggcctctagttctcttaatctgatttcagctggcgttttcaggctcaggccattccccttgtattaatacatttagggcttgggtccttgattcaagagccaactggaggctttagaaaggtcattgttctcaagctcgtcatctcagagaacccgcgtggctcacgatgccccagggaggaggaccagcaccctgcctggctttgctcttacttctagaattctgtgctcaatatcctgttgtcttgttggtcatatcctgctcctactatgtatcagatcaagatgtgattcctcaaccaggcatccaaggccttcaaaacctgctcacatctcaactgtctagacttttctcccccaaaatgggcatgctccatctgccagcctcattcaacctcaggcctaagtcttccatcatcctttcctccccacacaggaggtcttttcctagattcctgaattcattctgccctgaatccattcaaatttatccctcatccttcttccttcacactatctccttaggctcctttagttcagagatctctctctttcttgatgagtaaaaaactgttaaaaaaaaaaagtaaaaactgcctgaaaatttgggagcagaacatactccatctttaagttctctgattgtcttttgtgtgttagttgtgccttctcaaatgaatgataaatcccttaatggcagagaaagagtggcatgatttttacctattcccaatgtggctcagaggttaaagcgtctgcctgcaattgtgggagacctgggttcgattcctgagtcgggaagattcccctggagaaggaaatggcaacccactccagtgttcttgcctggagaatcccatggacggaggaacctggtgggctacagtccacggggtcgcaaagagtccgacacgacttcactttcactttcaatgcctagattggtgctggcatatgaaagatgcttaataaagacctgttccatgactcgatatagcaacttcgatcataaggatcttctcaacagga

SEQ ID NO: 47044 - DNA, 1261 bp, Bovine  19866881712656
  misc_feature (1)..(1): n is a, c, g, or t
ntggttaccccatggggtttggtaaaaatagtaatttctacttgagaagaataatcttctcctgtatcatcactctcagtgaactgctatgagtaggagaatgcacaaatccgccgcactcacttaacattaacagctagctggaaggcgtcctccagccaatccaggagcttgtgtgtgaactcactcacatcttgctgtaagagaggcacaaagtgcagaagagttagactcaacactgtatgtgggcaaatgaaactctgcccttaccccaccgatgagtaaggctctatgactgcacaagatttcttgttcaggtccaaatatcatgaagatacaaggagtactggagcccaaggctgcagacagcacacggggagctaggatctctgactagaaggaaacgcagccccttccaaccacggctatttgtaacaaactatcaaacacttccagctaggccttttagaaagtttcaaagaacagactgtatgggagatttgtggggagaaaggaaacatttttaaatattctgagaattctgtagaactgtaggacctttagacaaacagaggagaaaaaaaagtaattgtatgaacagtgctagttttgattttaacaggagacagggaaaggaatagacttgtgactagacaagaaagattgctcagaaaagctactgaacttgggtttagacagttttaaaattaggatttcgatctgggccattccaagacaaaggtgcagaaaaaggacggactttcttttcctctgtgaccctttgccatgactcactgaggtatcttccaaactcctcctttctaattcagcagcccctggaaaactctattctttctcctacttctttcctttagcaccgccagcctcctctacacaacacacacgtgcatgtccgtccttttcaccgcctgttccttaagcattataaagggcaaaagcgggcactgaagccccacaccgtcacgttcacagcttattctacagccgagacaaagcagcatcacagtgatggtcgcaaggcatcactgcaagctccaggacgagaggcttcctctacctgctgttcctcagggggatcggaacgctcccttttaagaggtccagggctgctgaagggtcgacaaacttgcgatttgatcccatcatcagagcaaacaaatattgaagctcctgcataaacacgatatttctcttttcctgcagggaaagatagccatacgtacttataacctcgtatttg

SEQ ID NO: 47045 - DNA, 571 bp, Bovine  19866881987255
  misc_feature (1)..(1): n is a, c, g, or t
ngacatgaacttgagcagactgtgagagatgatggaggatgggaagcctggagtgctgtagtccatggggtcacagaatcggacacagtttagcaactaaacaaccaccaccaccaccctcatggggcctcagctaaattgctgcaggaatttgggtccccacaaaccttctcctttctgaaacattcgagggacccccttctttctcctctcaccccttaaacttttcccctagcctcccccttactaaccacctaggcagcaagtcagtggacccttttaatcctgaagtcccagtcttactaattgctttctttcttgtcctcatttgctttctaactcaggatttgaggtttcaatcagataagaaagcagctgttctaagaacaggtgtctggaagggaagtggtcctgttgggaggaagcaaaggatatctctagggaccaggaaggagggaggcagaaagctcctggtagtgggttgaacagtgttccccaaattcatgtccatccagaacttcagcgtctgaccttacttgcaaataagtctttgcaaagataattagttaag

SEQ ID NO: 47046 - DNA, 915 bp, Bovine  19866882285163
  misc_feature (1)..(1): n is a, c, g, or t
nattgcccaggactgtcccagttttaatgcttcgtgtctccagaaacctgcagtttctgggcaaagcaggacagtcacaccaagtccatcacctcttctctgtataaaaggcaagatctagcgcccctcagcctcctcccatccctctttggtctgtttgagcttaaaagaagccatggaggagaaggctccttggagttcttgagatctggactcttttataaagccaatcacattagctgatgctgcgttggcccagaggctatcggcccgagagtccctccttccgtggggtctgtagctcaattgactgtccctcctttctcttggtggtctctcagctggcacccagggcagccacacctcatctggcttagtgttaggaataaatagcctggcccctccaggcccagaagccctgcagtctgggagaggcggggaaagtgaggcagaagcaggactgctcccagaagccagggacactgatggccgggtttcccttggtctcagtgatgtctggtctacagagcctgttccggcgctccgcctgtgacaggagctggctgtcaagggagggggctggcacccccatccgagacggtggctctctgctgctggcctgtggctcccggaggggattggggaggagcagagaagagactgccagactgcgggagcccgcggggatttggtggggtttgtttttcctccacgctgtctgcagagatgagggcatgaataaaagaatgaggaagatttactgttcccaccgcttggcagtagccctgtatttgtacaggggatctgaggcgggaacgggtgggggtgaggctggcactctgagacagccagagccttgtcaggctttctgccagcaccctggggtgaagatgaaggtgaggctgggaggggtct

SEQ ID NO: 47047 - DNA, 1331 bp, Bovine  19866880488204
  misc_feature (1)..(1): n is a, c, g, or t
ncgctactttttgatgaatgacatctcgggctcggaaggatgtatgggtcattttgaccagtcattccctcgctctggcatcccacaatttttccgcctccctccaaaagagataataatatttagaggcgctcgctggggctgaatgagaattagccctcggcgcagcccatcattaggacgggacagccgggccactgtgacattttttagaaagctgaaatgatggaaagaataagaaaagagatgattctgatggagagagggctgcacagccctacgaccggcaagagattctccaatttgtccgactcggctggcaatgctgtgcttgaggccctggaaaattcgcagcacccggctcgcctcagcccgcgcctgccgtccgcccccctgcacagcgctttgggagacctccctgccaagggcaaattcgaaatagacactttgttcaacctgcagcacccgagcagcgaaagcaccgtctcctccgaaatcgcgtctgccgcggagggccgaaaaaagccgggtcattattcagaggcggccgccgaggcagacatgagcagcgacgtggaggtgggctgctcggcgctgcgctcccctggcggcctcggagcggttccgctcaaggaaaacaatggcaaaggtaatcgcgctgcccgcgccgcgctctccagtcccattctccctgttccttcgctgccctgcgggcccttcgtggtgcctttgcccctctccgaccctctgcagcaagctgcaccgagctggttcgggcgggggcgggacgcaggcgtgggaccgtgccctccggctctgctccttgagcctcccagagagacgcaggcctacggcctgccctcgctcctaagtcggagaaaaggttttccgcttgcgggtctaaacgcccgtgcgagccgatcgaccccgagccatccactgagtctgtccgggggaagggtgccctgggcagctgctctgaactccgcggcctctgaaccccgaggccgagcggaggaagcattctaaataagtcaagggagcctcgctgggcacctttgggagaccctcttgggtcagcgggagaaagttgaaaagtagagttcacccctcaatggttccagtttgagttgttgctgtctttcgaatcttgaaatattttaaacaaaattccagagccagtcaaaggaaggttagaggccgacagaaagctgccctgcggtctccagatcaaggaaaatccagagcttcccaaactgagtttagatgtaggctttttcccttggccagttttcctcctgagttaaattttccaattattaaaacaaaac

SEQ ID NO: 47048 - DNA, 1658 bp, Bovine  19866880957035
  misc_feature (1)..(1): n is a, c, g, or t
nctttattttttcccctaactactaacactcaggttcagaccctaatcatctcctctctggattactacaagagtctcctgactactgcctgccccttgtcttgtctcttgaaatcaattttctacaaagtcatgccagagttatctgaaaggcatatctgactatgtcattctcctgcttaagactcaacaacggctctcacctgccaacaaggtaaagcccagatgccctaatgaggtttttaagccttttgtgatctggcctctcatgtcttctccagccccatctctcactcacgcttgacttgatggctctgttcccaaagtagaatttcccctccatacacaacacaactcaatgccaaaatgctgatatctctctttacatgccaatagaagtcctacttttaagatccattttatttattttattttttggttgtgccttgtggctcacgggatctttgtttcttgaccagggattgaacctggggccttggctgtgagagcattgagtactaaccactggacccccagggaattcccttaagatccacttaggatctactttagtaatcacctcttccatctgatttccagactctgcaactgaacccacagtaagcacaacccaaagggtgccctttgtggtcccatgacaccttgaacacatctttttttaaaatcactttatttgccatattgttctaaagtagcctggagtggctatgtttcccctaggatatgaatttcctgggcgtagaaccatttctgtaatctttactgcaaccaaacatcaatcaatgacctcatttgggttctgatcctcccattcattccctggttctcactgatctcagtgagctaacatgatgatttataacttgtgactgaaagacagatataggaaatatccccatttcaaggatgatttcttttttttttttaattttttttaatattcaaggctgatttcaactcaagttaatcatcagagaattacagatacttagatttaggtgagcaattccaggtaatccaggtgctagttccactacccacctagcacttggaggcctttcatcatttctacaagttatagagttgtgcagtccttcaagtgtggtgtaatggtgctaagagtatggggaatcctcagttcactgaaggcttcctctttcaggatgttgtatgagaaaatcatgaaacaggaagttatttgtgttatgtttttccttatagatacatgcatatatacagtataattttaaatctgtaaattgcttaagatgatgaatggcagcctattacctaaaatgttaaacataagttacggactgatatagtacccagagagaaaattatttgtaaatcgaaattaaaaccatctgtcaaagcaagaggctcagagtcaaaagcacatgggtcggtgggctccctagatggatggcaagggacaagaacccacctgggcaagtgactgctagctggaactggcactctgggcaccagtctagctctacaagcagaagaggagactgagcttgaagcagaagcttcaagtatcactttgtctcagagttttgtgaagtatgccctactaacttttgcatatcccagttgaactcaacgtgcttgacttgttgaagcttatattt

SEQ ID NO: 47049 - DNA, 1720 bp, Bovine  19866881186396
  misc_feature (1)..(1): n is a, c, g, or t
ntgggcctccctcagcagcttcttgcttatttttctttttttaaaaggagctgtttaaaatatatttcatcagatttgcttcagagaaggggagttggaaccattgaatgctcaaaattagagacttaacgtttttctaattcttccacttgctaaaagctactaattctctagtttccatctctgagctagcagggagctggggtctgcaagagctcagaatactgagcaggccccaggtttcctggcctggtttagaagctctgaagacctagagggtgccgggtccatatttgctaagggaggctgctgagctcctggcagaggaaccagtatggaggatttccacaggacgtagcctattcacaagaaacctgactggaaaaacatggcagggagagacgttttgtattgaagtcaaaggaacctcatatcttggcagccccctgataacagcaagcttcaaagtttgagaatttaggcagaatgcagaagtcccggccagcaacaagccggagggttcacttagtgtgtgggacacgctgaaagctgctcatggttcccctaccttggtattttatatgttttgttcataggcttttatacaccatttcctgactaacttggaagccattttctcatttaatgaacagtcaagtcgacagccatagtgaaacagcaaccaggaaagaaaaacgaattttgtgacctgaaatacattaggaaaagaatctgaaacattttgaaaaaccgacagcagtcctgtgacagcttgactgggacttggatatttatttccactgaaaacatttctgtatgtctgatacatacaagctattgtttttgacaaaataaacaaaacaggtacaaaaattattagatagcagagaaaatgcaattcatctaaacatcaactgaggtcagttgggctgaggctcagggtgccccatgaggtccattccagatcttgtactgaaaattcttggtctttcactgagaataaatcatcattgtacttttgagaaaaaatcttcaactctttggctgtggtgcatctcactagaagagagggagctatttctctgaaggaggtggagaaggggcagagatgatagaaggagcttggggggcccttagggtcactgaaatcaaggcaggacaccccaacacacccaggacatctctacctggcattcagcaaccccaccctccacagagcaagcctgccagggcccataatctctcaggctctgctggagcaggtcagacatggcctcagaaagagtacagcagtggggcccctggtgaatctggtgggcggtgaagagaatgaggagagagaacttctgcttctctctgcttggttgagagaagagagggggctgaggatctgaagggcctcctttctaaccctcctgatttctggctggtgggagagacttcacctctccctgcagtggttcattaccataattcaagaaagaaagacagagtggacaccttttcccacctctccaggaaagccttatggacaggcaacctcttaaagacccccccccctttcctggctcactcccacctccccctggatgtttcccttcctcctggtgcaactcagcctcaaagccaactaggagcttgcctcaccagagttcagctctgggggtccagttacaaagtggagggccctagcataggtatgtgtgaggttgtgggagaa

SEQ ID NO: 47050 - DNA, 1564 bp, Bovine  19866880166427
  misc_feature (1)..(1): n is a, c, g, or t
ntgtgagagttggactgtgaagaaggctgagcaccgaagaattgatgcttttgaactgtattattggagaagactcttgagagtcccttggcctgcaaggagatccaaccagtccattttaaaggagatcagtcccgggtgttccttggaaggaatgatgctaaagctgaaactccagtactttggccacctcatgcgaagagttgactcattggaaaagactctgatgctgggagggattgggggcaggaggagaagagaacgacagaggatgagatggctggatggcatcactgactcaatggatgtgagtttgagtgaattctgggagttggtgatggacagggaggcctggcgtgctgcaattcatggggtcgcaaagagtcagacacgactgagcaactgaactgaactgaacggacttgtactttctgcccaatcctgcatcttccccttctctttcacagctgctcaatccaagaacctaattagtaccctgaacactaaactctgtctcagagtctgtttttcagaggatccaaactgacaggattgtttgttacctcagtctaacttaacctgtactgatggatacactataataagtgcaaatttccctctagagtatcttaaaatagttagtaaattgttttcgctcccaaaattgtttagaagaaaatttaacttgcaagcttataaaaagctagttgaggtaagtaatcttgcagctctagagacatttcatgcttgctggttatctgcacacctgtcaggatttgtcaacagaatgagaagagaaaaacataggtacggttgcagcaaatacactttccacttatcccttccaacttttcaataacaaataaagaggatgttgggctagataaattttgttgctaagttttcacattcttgatcaggattctctgtaaaatctagaaatttcaattgccttaaagctcaatattaaattaatataacttgtttacaaatgtctgactgcaagatccataatcatattttttgccaagaataaaatatatttccagagcactcaggtcattattgcttcataaacagttcaaggatagacagactaaagcaaattccacacagttattgacatcatgaaatctgacagaaataccatcccataccaacagaaaagtcacacagcaataaagaccaaagtaaaatatactctctggaatacagactttttaaaaatctatgctacaaggtactaaatattgatttataaaccatactttcaaaaagcacgatcaagaaattagagtaactattctctcaaacacaaatctcagcagtgagaatactgtgctgccaggactattcacatatgagggaccatacagttatattaaaaccaaaggctgaaatttacagacagatttattttacgacttatgcataaaacagtacaggtgaaaaaaaatgcacattcattggcgaatttttctactcacattcttccatgaaaatatgcatctctaatactctaaggacacattttacaaattcacttaatactccatctcaaatg

SEQ ID NO: 47051 - DNA, 690 bp, Bovine  19866880389023
  misc_feature (1)..(1): n is a, c, g, or t
nacttgacttcatcatgtctttttaagtgtgggaaggagaaaattatttttggttcagacacagcatttctctcacacagtgaagaactattctttctcattcctttttccaaccttctaatttcatgaaacggaagatctttataacaaagagagaatagctgtcagccccagggccttggtcaggaaatgatattaaagctcaaactgaattgcgttatttaattatttacttctatagatactttatgtagaggggaagtggccctggaagttttgatttatggtttttgcctttgaaaataattatagttattaagagagcgctgaaggttttaaaagtcatgggcttatccggtggctcagtggtgaagaaccggatgccagtgcaggagatgcaggttctatgcctgggtcaggaagatcccctggaaaaggaaatggcaacccactccagtattcttgcctgggaaatctcatggacagaaagggcctggcaggctacaatctatggggttgagcgaccaaacaacaattgccatcatcacctaaatccttttggaacattgttttgtcacaagagttggacatgacttagtgactaaataacagcaaaggaaacagaatagatagttcaaaaactatgaccaaattaaaaaatagtgaaggtggtaacatgagtgaaattgg

SEQ ID NO: 47052 - DNA, 953 bp, Bovine  19866880528592
  misc_feature (1)..(1): n is a, c, g, or t
nagcactttttattgattgtgtgaggtaatataccaattttaagctattaaggaacactttgataaataaaaataaaagagaccaaagaataacacatttaatggatataagaagtatacttccgctcttaaacatcgtaatggtacataatctactttagaaaattatttcaagtgtcagcatataaagaaaattatgaactattaataagcactttgacttctaaattattgtaagcatgtttggaaagaaattcctagtaataaagttaggcatagttttaaaactctatgagtatttgcatgtgagtcatcattgaaaagaattcactgtcttttagagcctaaatagttaaatatttgcctttttgaaataataatttgaagtcatgattcatgatgaaatgggattgtaatggcttttataaggcttaaaaatcagtgccccagatccagaaaatcagttaaatgaaatacagaatctaggctggtttattatgatgagacagtaagcttatttctcaggaggtggatgaacattttatgtgtttttcttctaggaattaaaatcctaggaaaagtgtagaattttgttgttattgttaaaaatccatgaagtgagatgttgaacttttgaaaagattcttcaagcagcttctactcaatttctatatttcaatgagcaaattaatgttgagctattttgtagctgacatattgggaatttatttttatttcttccatattgttcaagatgaccatattttaggttttatacatttaaaatataccaaagtgaaaaacattagaaatataagtttttcagagaaagaaagggctcagattattattattctaatagctactctttattaagtcagttccaagagctaggtactattgttgctgtttagttactaagtcatgtctgactcttttgtgaccccttccag

SEQ ID NO: 47053 - DNA, 2456 bp, Bovine  19866880593154
  misc_feature (1)..(1): n is a, c, g, or t
nccgggtctcctccattacaggcagattcttgtattttctgagtcaccagggaagccccatacagcaaatgccaaacctaatttatgcaccattaaaatttgtcttctatgattcctatgactggattatttttagagggagattacatatattaaaaatttctaattttcaccgcctaatattgtgttctgtaggtctatatttccaagtagccagtgcgctgaaagcaatgttcaatctacacttgaaattcaccacagaattttgaaaaaaaaaatgtgatgttaaaagtgaagagacgagaaagccatatagtatcacaattcctatagaaaaaaaaattaccatgctaagaacaccatatctaatggtttttaaatcaaaagaaaaaatgcaaagtaaaatgacattaataatggcttcccaactatatctccaaatcctcatggcatgtaatatagcacagcaaaacattaatattatactaacgttgagactcacattgagagtcttagaaagtgtataatgtactgctaacctaaaatgaaataaatttccctcaggactaacccagaagagctttatgacccaactgagtaaaaccacgcacataattcccctttgagatttatagattctctaaaattcctgtaattctaagtgcagcaaaaaggacaaactgacattcccctcactgccagagcaagttcacaagttcaagtatgtatcctatgtaacccaaatgaaaacagagtctatttcctctcatctatttcagcacttcatttagatacaatttcaaagatacaaacaagttgtaagaatagtcaaaggaatttcatatactcattactcagattcactaatggctaatattctgcccatttgttttatcgttagttccctctctccatctctcacacgaacatgtgagcacgcatgtgtgcaagggtgtagacatacttcacatacaacacacacacacacacacacacacaaaagcaggcatgatcattcctattacacttaaatatttggtgtatatcttaagaatgaaaactttttttttacaaaacaatattatagttatccacataaaggaggttaacatttatatactgtttaataaaacacatatatttcaatctatgaattcaagttctcccagtgtacaattcagtcttttatcacttaactgcattcaattgtcatgtttctttagcgttctttaatctggaacaatttccagccttatcttctctctcatgacattgacactcttgaggaatagctttcctcatttgaagattatacaatatggcctcatgatcggattcaggtattaattcttagaatactgtaagccaaaggtcagcaacctatgttccatgggccaaatctagccggccactcattttcataaacaaaatgtactggcacaccgatatatccattcatttacatactatccatggcttgctttcaaacttcaatggaagaattgagtaaatcagagactgtatgatcaacaaagcctaaaatatttactatgtaagtttttacagaaaaagtttacagaactcagctctaagtaatgtttcttttagcaggtaccatatccagaggcacataatgtccaatttcccatggtttgtaatgttaattttcatcgcctgacaaggttctaatggatttttacagtacatagttactatttttcccccgaacccaatgaacaatctgtgggaaagacatctaaatatcacgcacattaaaaatttgttcccacccccacagatttggaattccattgctgattcttttcctaaattttcaccgtgactgtcacaaaaaaaaaatgatttttcaactttagcaatgtcagtcagcattccgtgtaggaaagaggcatcccttctcctctatttgtatctgtcagtttgtgtaggttcatgaattcctgtgttttcagtggttcataaattattctagttactctaaattattctgatgggcttccctagtagctcagctggtaaagaatccgcctgcaatgcaggaaacccgtcgttcaattcctggatcgggaagatccaccagagaagggataggccacccactccagtattcttgggcttccctggtggctcagctggtaaagaatccacctgcaatgtaggagtcctgggttcgatccctggattggaagttccccgtggagaagggaatggctacccactccagtattctggcctggagaattccatggactctacagtccatggagttgcaaagaatcagacagaactgagtgactttcacttgcatttttctttctgatgctcaaattatcccagatataccaaaggaaccccttcaagctgacctctatgttcttttgacatacttaacataacaagacataccaggcttatctttatatttccctaccaca

SEQ ID NO: 47054 - DNA, 1182 bp, Bovine  19866880623975
  misc_feature (1)..(1): n is a, c, g, or t
nggcatggtagggctgaatcccagtcccaatctgcctgacccccaaaatcctgtgtcccttcacagggccacatgccttctcccctgtgcgtgcctttctgaaagacagcaaccctgtgctggaaatgacagaaggcagagatcaggcagagatgaacataaaaaagctacccatggatcacatttttttaaagtaccactttttcaggtctttaaaatatgatctagccatgcttcagaatattacacaattgctgaaaagaatgaggtagatctacatttttcatataaaagaatttaagatgtcctgttaagtatgtctattcaagatcctattttttatacatcatattaacatagtttatatacagactttattttcttggggctcttaaaatcactgcggtcggtgactacagtcatgaaattaaaagacggttgctccttagaagaaaagctatgacaaagagtattaacaagcagaaacatcaccttgcccgcagaggttcatagagtcaaagctatggtttttccagtagtcatgtacagatgtgagagttggaccacagagaaggctgagtgctgaagcactgaactgatgctttcaaactgtggttctggaaaagactcagaagactgcccaatggactcgtgagtctgttgggcagcaaaaagatcaaaccagtccatcttaaaggaaatcaaccctgaatattcattggaaggactgatgctgaagctgaagctccaatactttggccacctgattcaaggaactgactcattggaaaagaccctgatgctgggaaagactgagggcaggaggaaaaggggggcaacagaggatgagatgattggatggcatcgctgactcaatggacatgagtttgagcaaattccgggagctagtgaaggacagggaagcctggcatgctggagttcagggggccacaaagagtcggacaggactgagtgactgaactacaaccaactatcaaggtttggaaagagacatatttgtaactgagatcgtgaaatcatggacaaaaataccctcagaatttagttccatgactgtacttatgttacattctccattcctcccactctcaccccatcaattatatatccaggatagtgtttcttttgaagaatacatcatggaagaatggttctagacag

SEQ ID NO: 47055 - DNA, 2045 bp, Bovine  19866880626437
  misc_feature (1)..(1): n is a, c, g, or t
ntagcaggggactctgcctatctctgtctctctctctctctccatacagtctcagcgcccttccatggggtctttccatgtgggctagttttaactaccttgcttcatgctgtttatatggtgtctgaggctttgtaggtgagtactccagcaagtgaggtgggggctgcattgtcttttatgatctagcctctagcctcggaattcacatagcatcactgccacatcttctattctattggttgaaaagacagaaacccccatccagtttcaaggagagaaaacaaagaagccatcattttattggagaaaagtccaagtagcattgtaataagagcctgtggaatgggagatattgttgacgccgcctatcaacaattcaactggccacctctcctttgctttttctttctcacttagcatgctacttaattgacttatttgtcctctacattgcctgtcttcctacactaaaatgccagcctgttttgtccagagctctaatcctggagccaagaacagtgcctggcacacagtattcagtaagtgcttattgaatgaatgaattgatgtctaccaatcctaacaataggtctccaaattagatgttaatgcaactattttacagttgagcaatatgaagttcaggaaggcttggtaaatttggcaggatcactcaactataaaaagctggcattcaaatgatgtctggctctttccactgtttcaggctgcccatcactcaatagcatctctttggattcctcttcaccctctacccccgacccctgccagagacacacatgtccacagtccaccaccaaaattcaatttgtccccagttggttgcactcaagctgagagcaaagcaattgcactttaaatcctcttatagcaggtatttcagagcgtattctgggcaatcagaacacattgcgtttgaatctgatgtctggtttgctgcaaaaaggcaattaaatgaaaggttaggttgctttttaaatggccaactcaaacttttggcttattttttgccttgctgtctttataggcattttaccaatatttatcatgatttcccttagggagccctcagatctgtgatatttgaaatactaaagcctctccgttggccctttaaaaggtttgtggtaaaactgcaccattaacattcacagttcctcatttatgaggccggattgcacttatttccatattcctcactgtttctccaatgagaatttcacataatagtgtttgaaggctaaggacttcaaagcaaattctttaccatttttatcttgaaaaatattcaatatttgtataattaaagttaagtcttcttagagaaaatgacaactcgaataatcttaaatgtacctccaagaaagaaactgtcaaaatgacatttacttgtacagtcacattctctaaggccttcgcttctcctcctgatttcttgtaatctttgaaggttatgtcatggctgacttagatccctttttaaattatagtgacctcctttcagtgtgagttctaagggtgaggggctctgtcttccctttgtttcagattttgtctattgcattgtcaccaagcagtaaaaacaaaagccgaaagcaaaccgaatcctccatgctaatttccccactacctaccacactatttctcttttcctcggcactaaagatttttagcaagtcagtgcacactctgtctccattttctcatgtctgaaattatatgataaagatttgccaatgacctccaatctcactggcaaatttaaaggaatttttcaagttttctttctaattgattgtctcctgtctatgttcccagtttttatgccatgcttttcactttgcactctcatcagtgctcaagaatcccttcatctaggatgtcttcagattagttgaacatttagtatcataattcatgtattcttgtatatgggctcgctaagacattgatggagaagaggaagctgaagttggtcaaaccaaagctaggggaaattgactcacctcccaggctgggga

SEQ ID NO: 47056 - DNA, 821 bp, Bovine  19866880645532
  misc_feature (1)..(1): n is a, c, g, or t
ncgtgctccacaacacgagaaacccacacaccgcaaagaagagaccctgctctccgcaactagagaaagcctgagcctgagcaaggcaacaatgaccctgcacagtcaaaaataaataaacataaattaattaatttagtttaaaaatatatataaaaacacaaactaatgagaagaaatagccctccacttagcacatgtgagtacatggctagtaaattcaatctgtcaaactggaaattctcaatgttgttccaactgggaattacttaaaatcatttacatttaaaaaaaaaaaaaaaggaagagtaccctgaagattagtttcatcactatcactctagagggtttttttttactcttttgtatcgattgttgcctctaggctgttcactagctacatcagcatttcaaaaagatgacataatctttaaaaaagggaagatgagttcatgacatatctctataatgatcaaagagcagagctgttatacgttgtaaaaacaagtgaaagagatgtaagtcaaatacatacagcaactcacctatttacaattttgtggacttcagttttcccatcggttttggggtggtctggagtagcaggaggtgaggaactaagccactcttgatttgacaaagtgttatctggtgaaatgtcagtaaataagggatcttcttccagatctctaagtttaatttaatgatgcataaaaaaattttattatattttctaaaccaaaagattctctgctatgttctcagaaacctttacataattttgctaataaaggaattaaggaataatgaatgtatttata

SEQ ID NO: 47057 - DNA, 1108 bp, Bovine  19866880652726
  misc_feature (1)..(1): n is a, c, g, or t
ncccagctttacttctttcattgtaaaggtgggaatgatgctttttccagctctctacatccttgagcaaaaactagaaatgctatgatcatgttcatgtttacttctttgctttactaatgttgtttccccttccctttactatattctatactcagaaaacttgaactctctccaattttcatcttaaatatgccctgttctaactatccttattcttccatgataaatcaatcattcctttcagtcctcattcagtattttcttcattctattccattaaataaatttgttgagcatttacactgtggtactgatgcaacagtccccaaagagtttcactcaataaaggatacaagcaagtacacacatcatacattggaaaaattcataaataggaagagacgcaatttcagtttggagaggttatgaaaaatctaccagaagatgtgatgtctagctgcatgtgcatgctgtgctaagttgcttcagtcatgtccgactctctgtaaccctatggactgtaactcgccaggctcctctgtccatggaattctacaggcaagaatattggagcgggctgtcatgccctcctctgggggatcttcctgacccagggattgaacctgtctttacatctccagcattaggcggattctttaccactagtgccacctgggaagcccccttctaactacatttgttgttgttctgttgctcagtggtatccatctctttgcaactctgcttaaagccaaacagaaattatcctgggaagaaggaaaggctcattcataagcatctcaaagcactaatgtaagaaagtagtgtagtatattttgcctagtgtctccactgaagtaaaagccatgtgttattcatcttcattaatagtaagaagcactcatttaatgattgtctactgacatgagtgactagctttgcttcctaacaagagcgttttttccagtataagcacatggcaggaaattacgttaagaatgaggaccctacatttccctggcagtccagtggttaagaatccacctgccaatgcaggggacatgggttcaatccctggcctgggacgattccatgtaccgcatgg

SEQ ID NO: 47058 - DNA, 751 bp, Bovine  19866880678681
  misc_feature (1)..(1): n is a, c, g, or t
nactgagagatcctttagaattttctaatattctcccagtgtatataaagaaagaaacaaacaaaaagaatgctcttagaagtgaccaaattatagtgttcaacaaaatgtggtccatagactgcttacaccaaaatcattgggagcaacagtttaaagatggactttcctaaaaacaccccataccctcagaatcactatctctgaaagggtaaggattagaatctgtatctgtgcaagggactttaaataattcttatgtccactctgtgaaaaacagtgttaagacttggttaagtaatatctacatttccaacatatttttaagaaagcagctttggagtgtagagagccagtgattcatttgggtacagttcacttatgtgagccaaacaaaaggtttctgagggattagattacagaaaattggtctgcatgcccaagagcagaagtttatttgtgggtgtgtaggttttgttttttgtgttttttttttttttcccttgagaacgacaactgccaactagactacaggagttcacgttaggacaagtcctagccggagatgctccagatttctgtccagagtttacacaggtggtcgttctccctttcccttccttttatcacttgagccttgaaagggcaaaaagcctagcatgctccgtgcagcttccgctctcacggcgaccgcatggcctccgcctggtccccacccggctgcagtacctgccagcagcttctccttcag

SEQ ID NO: 47059 - DNA, 1200 bp, Bovine  19866880688441
  misc_feature (1)..(1): n is a, c, g, or t
ntatcttttttttttttttccatttcagtcttgaatcctaaaataatgtccttttctctgaagagattagtaagtacatcaagaatatatttaagctaaggcctgagaaatagaagtatagcttatatgcaaggttttttttctaacttgtcttcatctgctattagtccccagctcatctcaacagtcttaaaagcaaatgagaaatatatttgtaaaatattctctatgaacatctctgtcctttctttgttcttttcttccatctttaaaatactttattttctgggtgttttgtaatatatatctggttgaaaacgttatctgttgtttttctggctctgtttattggcatttcacattttattattcttgtcaggacttgactcttaaatgtctaaaagaaagtggacatggggaacaaatactgggtatgtttacttttaaagcaaagtgataatatgaagtttatatatatatataaacacatacacgtgtatacatgtacacgttttttaaaatgagaataatgtgaaagtgctttataaattataaaatattacatagaaactagacatttgtataccattactgcttcttagtaattaatttatctctgatgaatattttatgggtagtgtttggtgaaatggatattgtgcttctttcaagacagatgatgtatagtctggtttctttgagcctcagatctgatccctaattttgtatttaaggaagcagagcttcaagtagctatgtgttttcccccacccctgcccccaatcagctccctaatcagagtggctcaaggtttctctcttacataactttagacaatcagaaccactggaagtctttggtttgattgtaagcaacagacacagttctggcttccctgagcagaaaaggcagttattgggaactatgtcagggatctctgcctcccaggatttgttcttgccttctttttggtgatagaattcactgagtttgtagctctcaagcacatggtcttcagctgcataccatattcctcagccttcttcgcatctagcatggttattatactgtattaggtcagtaggatatgagtagaaatgctgtgtgggaattttacatcactgagatcttttacaatggctggtaaatggcagcatctgtggtaacacttgcatatttgcctgtagaatgtgttttatg

SEQ ID NO: 47060 - DNA, 1467 bp, Bovine  19866880771299
  misc_feature (1)..(1): n is a, c, g, or t
ntggagtgggttgccatttccttctttccaatagagtgagaaacttcctgactcagggattgaacctgtgtctcttgcgtctcctgcattgacaggaggattcttttccactagccaccagggaaaccaggggtacctcttctagattgtccttattgtttttgctccatgcctacttccttctgataaccgtgaggactagatgtgattacacaggagagcacttagcacagcagttggcacacagcgaacaccaggagatgtacccttccattataattctgggagggcagccatgccctcccaggccttcccttcaccattgtcggagcaagaatgctgagcaatacacaaagtacagtccatgcgactatgcaggaataaatatacctccgccttaagaagttcttctaatacttacaataggtccttgtggattttgccaagttacttcagagcagttaccaaagtgacaaagcagttactagaggggtagaccctttatttcatggtcagcaccattgcctgacctccacacgtatttcatcacccatcacatcttcaagtggccctgcccacgggtgaccctcacccaaactccctttctgcttcagaatctgtggggtgggggtggagtgtagggagagaagcctgcagcattgccaactcttggcaggaatcctatttcatttggaggactgcttctagagatctttcagctgtgcaaagataaaggcgtaaagcattgtcgtcaccattaagagcaaggttagtcggcatggttttcatcagaatgaggtttctttccgagggagagaagcaactctattactgttggcagtgaataagtaaatgtgtgcaagtgtgggacagagagacacagacaggcaggtgggagggggatggagggtgaaatgtgtttcctgcaatgcctatagaagatgggaacctcttttcacaatgcagttctacactgaaacaccgtgttaggagaagtcagactatctgtgcttttctcctctgtgagcacttcgtttcctcagtctgctggccagttacttgaagagcattttccaaagaggatgatacagcatagtgagtggccctggggactgctctgttcaaacctaaatcaaaagtcgctaacactgtctgatggctacttggcagtccttgtgaaaggcgctcacagcagcagctctgcaccccgtgggcttctgagagctccagccaactgaccaatcaggactgagctggctgctgtgcaaggaccgttaaaggcggccaggtgaatcctgatccacatggcaatcctggggagggtgggggtcacagcttcagaaaccacacactctgaacaggacccgtgacctgacgtggccaggctggagtgtgtgcgccagaaagctgggtgtgtaggaacagcagactgcccagtcatcacacacatcagacctcccatagtgt

SEQ ID NO: 47061 - DNA, 1587 bp, Bovine  19866880806588
  misc_feature (1)..(1): n is a, c, g, or t
nacatcagcagtcatgttctttgagcacttcctaactgtttattgttatgtgcacacacagttcccactttaacacagcactgtactttcagcaggtcccaccaagaccccactgaagcaggtggcaggaatagctaagcaccaccatgctgatcttgagcactcagagggtgctcatgcttcctttcatcattttttgccaacttatttttgcccatggaggaggggctcttgcatctatgttatatccatgtaatgtcagactgtgagcattacttggctttttgcaagtggaactcatagctgatgacaagctggtgtggagaaaatgaaaatttttatgaatttggttctgcgtggaaacagttgaccaattttcattgctgtaatgtggctcttttgctcttggttgattgtgagtaatagcttcacttctgcagaaaggagattttatttgaagtccattcagagatttggttcaacaagctggactacagttctcacaaaatgtcttttgaaccatccaataatagcctttctcatctattattcctggaacactttatccttcacagccaagcatgtggctagctctgttgttcactgtgttctgtgtttgccattatgacctacattttcaacttgggatacaaaagaatacaatttctttttatttttctaagtaattacttgatttcccactttccctcctcagcagaaaggtcagtatcttcttgagaatgtccttttctcaatccaggaatgtacttgttctgtaaagtgtcagtcttatttctaaatatccaggggggaagaactgtagccattgtcatccacaaaggctcactttggaaaactgctcctatgtcgatctgtggacccatgtcctcttgatgatggcatgctgaccaggcaaggttcctgttcgagctgcagctgtgctcctgttgaacttacaagttataacagacattgaataatcaaccatcagccactggtagagcaatgtgtgtgtgttagtcgctcagtcatgtccatctctttgcaaccccatggactgtagcttgccagattcctctgtccatgggattctccaggcaagaatactggagtgggctgccatgccctcctccaagggatcttctcaatccagggattgagcccaggtctcccacattgcaggcggagtctttactgtctgagccaccagggaagtcctgtttagttgctaagtcatgtccaactctttcatggctccatgaactatagcccaccaagctcctctgttcatgggattttccaggcaacgctactgtaatgggttgccattttcttctccaagagatcttcccaacccagaaattgagcccacgtctcttgcattggcaggtggattctttaccactgagccgctaatgaagcccttggtagagactagaggctttttattagtcctgagtaacagccctttccagtccctatgcacatggtcagtccttttatccctgagaacccccaccacacagaagtggttgaatctggaagagcttcctgcctggaccacaatgctgtaccagaacctgccta

SEQ ID NO: 47062 - DNA, 1733 bp, Bovine  19866880809532
  misc_feature (1)..(1): n is a, c, g, or t
nttttgtatatgttactgaaagtactattgaaaaacactacaataatctgtttctctgttcagaaggaccttgtagtagataatatgttgaaagcactcgatgtaggaacattgagtgctttcagtttaacttttaaacaattttattgagttgtttatgagattgtaaagcattatggcaaaacaggcatttataggttgatctgaaccaaacgtaggatagtaaacagattgccttttaaacaaacttaaatctgtaaaaaagatggacacttactgaatgtttgatatacgctttgcaaatggctttgcaatattccatgtacttctcaaatgatgacattactattatccctatcttatagataaggaaaggaagacttagagaactgattaactcacccacaggttgtactagggccagaatccaaatccatgtgacttttaaccccactataaaactgaatctcaaccatctctttctatagaacctgggtcagaaaaccaggctggactcctgattccgccacatagtaattgcatagccttggggacttcactcaacttctgtgaatcttagttttctaagttttatagaactgaaagagtcataccttctttacttacctcataggattttgtggaacacatagagattatgtggaaaagttctctgcaaatgtaaaatattagcatggttgcttatagtagtgaacaccatggagaaatctctcagacctctgcaggagatcataaagagtactggggccttgggatacccactcctctttttctgccttgagttttgaagcagttgggatacctgcacaagtctaacagatgaaaatgagctatcatctggacttggagacggtataagtgtgaccacagcaggcttccttacacttcataactgaataaggacacagacctactgacctgtcattgacagatctggacactttgtgtctctctcacagggcagcatcttcctgctcagtaatggaggagaaaactggccaaggacgggctactccaaagagcagagcatggatggccctgagccacagctggtcaggtcctccttactgagtcaacaatcgcatcgctcagtctggacaaggccagtaggtgggtgtggagacagagggggcaagagttcctccccatctttacctcctgggtgtctttatgggaatatggaaatctgaggtttgggagaagaaagtttccctctttacagtgaagaatcacatccttattagtaataggaaaacgaggatcagagggtatctttcctcaactctttctgcctcccacatggctgagctgaagggagccatctgtggtggctgcatatgattttgtcaactttataattccacacccactccctaactccctaccatgtggccttcaaattgttcctttaaaaaataaaatgtgttccttctcctatgaaatacagaccactgtcaggatgcttgtgttgttcgctctctgatgtaactcccggacaccatgggggcctcctactttctctgtggggtccccttcaggtccaagcgtgtgctagccttctctgggcagcagaagtccgtggaaggggcactagggtggatcaatcacaagagctgattggggttttgtgattcagtgtcatggatccctggtcccgtcgatagtgctcaataaagccaccaggccaagcgttctcttccgcatgctaatgg

SEQ ID NO: 47063 - DNA, 2466 bp, Bovine  19866880827534
  misc_feature (1)..(1): n is a, c, g, or t
naaataagcattttccccaacagtggactgttacagccacaatgctctttttgctttgtgtatccccatgattatgacatggcggcaggggctccattggtgcttgttgaatcaatatgtggctcatttgatactaaaattatgggcatgtttatgcccaccccacaatgactccttttgtaggaatgctttctactcacatagatctttcctgtttttctttcagtggcccaccctcaggaccctcaccacccatcagagaagcctgtcattcactgccataaatgtggagagccgtgcaaaggggaagtgcttcgggtccagaccaagcatttccacatcaaatgtttcacctgcaaaggtaaggcacctctggcttcctggagacgtggcgtgtcacggtcactgcttgtcttggaggcagccccatctccctaactccataccagttgataattgaatgtgctcctaagtcctgaagttgttcaccttctctaattcaggaatagactgaagttaaggggaatactgagtttgccccagccccaagaccaggggtacacaggcctttgggtgttcactgagattcctcatcctgagagggaagactaactgtgaaagagcaatgaaatgaagttttgtgttttgtgctttatagttctttaaaaaaattgaaaaaacatttaaatattattgaagtacatttgattgcctggaaaattccatggacagtggagcctggcagactacagtccagggggttgcaaaagagtttgacatgacttcgtgactgagacacggacatgacacggcatgttgctgttcactcactacgttgtgtgtgactctttgcgactccatggactgcagcgggtcaggtccctgtccttcaccatatcccaaagtttgctcaaagtcatgtccattgaactggtgatgctatccagccatctcatcctctgtcgcccccttctcctcctgccttcactctttcccaacattggagtcttttccaatgagtcagttctttgcatcagggggccaaagtattggagtttcagcttcagcatcagtccttccaatgaatattcaggactgatttcttttagaattgactggtttggtctccttgctgtccaaggaactctcaagggtccctttcagacatgacatagttgatttacaatgtgacgttaatatctgctgtacagctaaatgattcagttatacattatttgtcatcttcttttccattccggtttatcacaggatgttgagtatagttccctgtgctatacggtaggacctctttatttatctgtcctttatgtttcttttcaactgtgatgaggactctgaccccaaagtaaccatgtcccaaggcccttgaatgggaccagaggtgactttccacaattagaaagaaagccctaagatacaaatgcctgtggaaataaaaagaagagatggactcttggattttgaaagaggaggaagaaagaggacactgaacatcttataggagagctagataagtatgaaggtgggaaagggttgcagtggaggaattagagttcacagcacaaacttaaaccagtaaactgtccaggatcaggattggtgagcaggagttttgttggtgaacctctgttacttcctaagatgtctggcatcttggaatctactggtccaagagttatatatccaatttgtcaatgttaatgaaatacatactccatgtgtcaaggaactcgtgggggtatttcaagagatactggctcagatggtaaagaatttgcctgcaatgcaggagacctgggttcagtccctgggtcaggaagatcctctggagtaggaaatggcaacccactcaggtattcttgcctggaaaattccagggacagaggagcctggtgggttacagtccatggggtctcaaagagtccaacacgactgagcgactgagcatgtgcacgcaggatagtgaataataaatgctgtgatggagagaaatacaggatgtagactggaggcaggcagatagatccagaaaggtggtgggtattatggtagtccaggtggaagtaatgtaaggaacatagaaccaagtgtggtagggactcggggacagattttagagatatttagccagcttaaccttaaccttaccttgacctaagacatttaaccttaacccagttaaggttgctaggatttgatgactgattggatgtgaggaatgaagaaagatccagagttccagctggactgcctgggtgaacataaggttgccaccagataagaaaatacaggagcactagagaggctattatgaggagaggggaggagttcagtttagataacacattgaggctgagcatacgtgatccatacaacgtctcgtaggcttagcactcaagagatactggtctgtgttgggaagaaggattggaaagtgttcggcat

SEQ ID NO: 47064 - DNA, 1436 bp, Bovine  19866880827691
  misc_feature (1)..(1): n is a, c, g, or t
ncctctgtccatgagacttcccaggcaagaatattggagtggatacccattcccttcaccaagggatcttcccccacccagggatggaacctgggtctcctgcattgcaggtagattctttaccatctgagtcacctgggaagccttttgaagaagcaaattattaagacgttgactactactgaaattctaaaaatgaatctatgagatttgggtgtgcaaactacagcaaatgagtgtagatattatttgtattaatatattagctatgtgactccatgtttcaaaagccacttaccttgccaactatcattgcagacacacaacttttctcctgttaggtcacagtaaccgtgatctggactgccgcaattggctttacagtaggggatatcacaagcttcacccttccagtatttatcacattcacaatacacttgatttgaaacagagacactagttgtacacttcccatgaccagagcaattgttaggacaagaattgattctgtaaaatataattcatatatattcaaattcaagatgattagaaaaataatctgggctggtattttgttgaatttataaatgttatatgtgtccatgtgtttcatttaacacattttacaatgtgatttcaattctttactctgtacttttttacccctaaggcgattcaggtatacatatcttcaactggcctcagtccattcaatgaatttactctgctaccaagactacacactcaacgtctgcaggatctatacagttccaagcacaatgtttggtaaatattcaagtactcaaatgttttataggatatgagtacactttataggcaaaaaataaggtcatgaatacatgaaacagtaagagaaggcaaaacataaactggttgctgctaagctaagtcacttcagtcgtgtccgactctgtgcgaccccatagatggcagcccaccaggctcccccatccctgggattctccaggcaagaatactggagtgggttaccatttccttctccaatgcatgaaagtgaaagtgaaagtgaagtcgctcagtcgtgtccgactcttctcgaccccgtggactgcagcctacaaggctcctccgtccatgggagtttccgggtaggagcactggagcgggtgccatcgccacatgacacttaaatagcatgctatcacctaaacactgttgtggaaattaaaaggtgtttatcagattttattttaaggctccctaactgattatattttactatatatttattctcccttgtgtacatgcttgatataaataaactccataataaattgctgattcaaggatatttaggaatgtcttattcctcatgaaaaatcctcggttatcattttctacattactgaagaaaacaaacaaacaaaaaaatgtatcaaattcttctgggtcat

SEQ ID NO: 47065 - DNA, 1000 bp, Bovine  19866880871553
  misc_feature (1)..(1): n is a, c, g, or t
ngtttatgacaggatattgaatatagttcttgtgctatacagtaggatcttattgtttatctaccccatatataatagttttcatctaatcccaaactcccaatcattcccctgacccccattgctttaatatattcttgaaatttaagaagagcattacccacaattgcttgaaagattttaaccaggatgtgatctcacttgagtggctgaattgccaaaatgatgggaaaaaatcacaaaccatgtgaagtcctatgcttaagaaattctcattttaatggaaatcatgaacaaagtttggaaaattgggctgaccctatttttagctatcattaatctttactagttttcagttcttaagaagcatagtggtaaacaaacatgacgttagatactgtctctggttgcccagcttacaaaatgcaatctatccaaaacatatccagaaggaaaagtgaagttcaattctgaaattatatttctactgtcagatatgcagagacagacacaaaacaacaatgaaaacgttatctctgtgtgttttaatacagctccgggccttcagaaatcatatctgctgtgtgtacctgtctcttattctgttcaggggtgtgtgtccaataaattcatctcttccctccattttgtctgttttccaaaaaataaaataaaatatcctggtgcatatcataaaaaatcaggcaaggatggcagctgagatttttgacagcagtcacatctgcacataatctctgtcccagggggacctgcttctagctcgaattgcatgctatccttacgactgcctaataacttaatagacgtaccatcccaaaattcatgggtatatttgagaatataatgatttatcatcagacatcttgatttctaagcttggtcacaccctttatgaaggtgggtatctggctttacagcttttcctttctgaaaccacagaagggaagggtttgccttcctcccctggctattcttctgg

SEQ ID NO: 47066 - DNA, 1261 bp, Bovine  19866880925916
  misc_feature (1)..(1): n is a, c, g, or t
naacagggggcttggctgcttgttcccgttttgagcaggtcttggacgggtggcattacgggaagagaggcagctgcttgcagagtgatggatgaagcaggacttccagaggagccctacccagacaggagcctgtgccagtatgctcagaaaatcacagcctgctttggaggaatgggtaagaccccttaggcatggggctttgtggaggcgatgcatagggttgacgttgcaggccagcaggagaactaaacttaagacttgctggtggcagggaacaggtgtaactgctggagcaagagacacttcatgggtcaagacatcactgtctagaagtttgatggtgccccttcttctgagtactcctgcttaaaacactgctgtttgtctgcttactctgttctgctcagcagcgaagaccatcccgaagactatgagcttctgtaggtgttttaagtggacttgctgagctcttgtgtttgctcccttctgattaaaacaaaaccccaaactgaaaaagcaggtgacctccttgtcactgatgaaaccacaggctgtaaattcattgtaaaactaaatcccataaaaattagcatttaaaaaaattggcatttaaaaaattttttattggagtagagttgctttgcaatgttgtgttaatttctgctgtacagcaaagtgaatcagctacatgtttacatatatcctctctgctttggatttccttcccaatgtaattttctctcttaaaatttttttctcttatcaaaaagcagataaattttagcagatgatttaaaggtagagaagggacatttgtctggaaaaatataaagacttaaatcattacatggaataaagtcagaattcatttgcacagaattgcagggattgacctgtgactggtgaattaagagtagttaaggcatctgtcctctaagcactgtgtaacccccaaagtgcttggctctgaggttggggttcatctcactattgaggttccacagtgtgtaaaggcagaatgcccagggtctctcagggctgggttaaagctcctggttaactttgccactgacagtttcttttctttgcttatcatagacgagcttgtttagaagcgatggaactgttactagcagtgttaagaatgcctatctgataagatatgcaggccacccaagcaaattatgcatttgtagttagcattagcttcatagtgtagagttttggggtaccttcttttataaccacatgaactgtc

SEQ ID NO: 47067 - DNA, 1405 bp, Bovine  19866880951216
  misc_feature (1)..(1): n is a, c, g, or t
ntttttttaaattatgcataataattttttcagtttatgaccagtaagcctctctaccaatgccaattttggttgttcaataagaatgctgctaagaaaaaatgtaatttttatttttgtgtttctttaatacagttgtaaacagaaagtgctacaatttacaaatgctttaatttccactcttctttaaaaaaacttaaatatttataataacccttaggaggtatttctgttttatagatgaaggcttgatggtggcggaggtaaacagacttacccaaggtcacactttcagtgactgaactggggtttgagtacattgttttccattttcctttctaatattcaaatacaatattagcatactaaaataaatctgaaatttatgttatttaaagggttctttcaaattgtgatatgtatttgaacatattcaagcctaatttgagtatatgatttttttttcctcctgtaagcattacatttgctgttagagtttttcctgtaagttatatttcagactatttattatgtacagtatatttattaatatgatgagcattgaattcttaaattcccttaacccatatattctatttctgtagtctaaggtctttgtttaatgcattgcattgtttgattttcttttacataggtcctgattgttctttgaacgttccttctaccgagtcttactggattctgcctaatgttaaacccttcagtccttctgtaggtcgggcttcccataaagctgttttacatgggaaatttatgtgggtgattggtggatatacttttaactacagttcttttcaaatggtcttgaagtaagtttttttcccatatttttacaatctattttttaagctgggtatttttggataatgaagactatcctaaatgtcttattgctatgctgattcatgaatggttgtctttgtaatagtatctgttttccacatgggactgatttgagaatgtataaactcagtatatccaaaagttatttgtcactatgcatatatgtttgttctttgtagatatttctttaactttctacagtgcttttgttaaattctgaataagaaagtattagctttaaataaggccaggccaggcctatattggcctttatgaatcctggtcaccttttactttttcagaatgaagtataattacttacataaaaataatttcagttttttcccccctcaaattttaatttacctaaactttttctctgcatttactttgcaaacttttattcgtagagcggtaccagtgttgtaaaataggttattgatttactgtggacttaatggagattgtcccttgcatgattggatgataaggagagttgcatgtaatgccagctttatctgatttttttcagctgttgatt

SEQ ID NO: 47068 - DNA, 635 bp, Bovine  19866880998428
  misc_feature (1)..(1): n is a, c, g, or t
naactctgggaccgggtccagaaatccccactctgatcaactcccggtggccctcatgtctgctaacacttgagaaccactgccctagacagtaatttctctgaaagcttaagaaagccagcatcttcacagttaagtctaagtattcaaaaaactcagcctgtttgattgcgatgggacacagaaactcacccctggtgccccccagggcacactggaccgtaatagcattaatcatgtcagtgtgaacacaaatacagtgtttcagagaaaagaggtcatgcctacaaatactcaccctcccccactgctaacaaaatttgcccttgactacacagctcctgccagtttgggataaacatacctctcggtatgagtcaccatcagaccaacacacaatgaaataggaagctgtgctggtttctactgtgctgtgcccagagcaggctcaaccacaatgggaagaaatcctgcaccactcacccatcactgaaccttctgaaaagtctgctgacgctctaatgctggctcaggaaaaccctcagtgttttggctttggcatatgagatgccagcagtatgagggaccctcctgcttgcctcccaagggcagtgaatatgatgatgacatcaaga

SEQ ID NO: 47069 - DNA, 1521 bp, Bovine  19866881037542
  misc_feature (1)..(1): n is a, c, g, or t
ncctgcgtggagattatgaagacctgtgtcacactgccttcaaagcatctgccggctctcaaaaaagtcatgctctcatactagtgtagagcagaacaaaatgggtacctttccttctcggctgaaaattaaaaaccaggaaactgttcccccctgttttgatgtaacctgacaccactgcgcatgtgaagcatctctggtattgaaatgaaggataaagaaaacaccaaggtgctaattgaattcatatctcctcctctcccagatgctagaaaaacagaactcacaaagcactttcagttctcagaatcgaaatagcccaaatggaccccttcacaagttaaaatccttttaaagcatctgaaactgttgccaattagatttgatgcttaatattgctgtgtacaaactgtctcagtggagggcattccccaaaaggaaacaagaatgttatttcaccaaataatgtacttatcacataaacaatgatataaaatctatgggggcttaattaagaactgccagaagcactcctatcaagtcaaaataaattaacaaagatgaatttcttagatgaagaccgagatgcacatttaaatcaatgcaaagcttttgaatcattaacaatatttacgggttttagtgtttaaatatttaataatttgtagtacaaaacagtaactcttaaataaaccttcaatagcagctgttattgttaagtacctatttcatattagactctatcttgacacttcataagtttgctcctcaatacaaaccattctatcttacatgtggagaaacagatgctgagagaggcaaagtcaactgaggtcattcagcaagtggctttattaggatttgaatccaggtctaactattcctaccactgatgctttaaattataaaagcatttaagattatgagtttgacaataagcacagctttgaccacatccagtaagttaaacattcactgttcttgttattttctaaattgtttattatagtttttattttttccttttcagacacatctcttgaagtcataaaatgtttatacatgtatgggtggcagttgtcatactataaaattattagctttttgttgttgttcaccatatctgtcttgactatttccttctacctctgaatactatcaaaaatctactctccgtagttggacattctgctatttttgtttcattctggtcaagagaattaatggataggaatgaataattaagagatgatggaaggatgtgaggtttaaaaaaaactaagcagtgaagaaaacaacagtgtttgtgtcggtaaagaaatgtgcaaaataaaataaaaggttttaaaagaagcagtgaggcaggattctaagagtttctaggtttctagtagctcttgacagctatttacaaaaatgccaaacatttaatttatttattcatgtgtttgtgaaaagcaataacacttctccaataaaatatctagtaagtcccatatcaaaccctcgaaagaacatctg

SEQ ID NO: 47070 - DNA, 876 bp, Bovine  19866881050104
  misc_feature (1)..(1): n is a, c, g, or t
nttaatgggcatttagggttacttctaaaatcttggctactgtaaatgctgctgcaatgaaaagggtacatgtatcttttctttttttaattggagtatagttgatttatgacactgtgttaattattgctatacagcaaagtgattcagttatgggttcatgtatcttttctaattagtgtgtttgtttctttagataaatacccaggaataggattactggattgtatggtagatctattgttaattttttgaggaacctccatattattttccatagtagtcacacagtgtacattcccatcaacggcgtacaaaggttccctttctccacatcctaaaaggactctgtgctctagaagttctactttacaggcgaaaaccctgctccgtgtcccctgggccagcactgcctcctcctaggctgccctgtgcaggagcaggggggtgggatagacagagggtacggaattctcaaactcctcacaagtggatttgcaccatactcttcctccatcttctactcaagctaaatttttaaaaaagattatttcacctaagacattattctattcatctcctcaaaccctttcttcatagcaaatccaaaggtagactttgacatagcatcctctcaagccccctccaatgctgctttacggtgtggggtctcactgaatcagactttgccctgaaatccagagcagtgtgtttcaaagtaccatgcactgtagctccaaagtatgacatgctgtagcccagagctcaaaatagctgaacagagactcataaacaataataagagggggcagcttccaccaaaaataactattagctaatgcatcatcctggaagcaaatactaagccacaaaacg

SEQ ID NO: 47071 - DNA, 1730 bp, Bovine  19866881081371
  misc_feature (1)..(1): n is a, c, g, or t
ngcatgttttaatagtgtctttgcaacaaggatggtgttctgcagctgtgatgtcagtgaactgatgtgctgtttggagtggtctttagaattagcacaggagacagagtggggagggtcaggagatgaggactctgtgctggaggaaggagctagactccaggaaactcctcattcttcctgagctgctgtgacacaccctcggggtggcacaccccctccctggagtccagctcagcccacagactcatggaaggagaaccagggcccaggcctcccctttgaggagtggatgtagcacttctgtgtgtcagccacctcgggaaggaaagctgaagccttagagctttgtgcacgtgacctgggaacccattgagctcatggaccctcatcacatcctcaaagaccaccgaaggtttggctgtctttttcataaacttgtcacgtgtgctgtctggggtgggctgtgcatttaaagatgaggagagctgcagggacttttccattggttaaaatagttgtgcacttattatattaacccttgaggttaatacaaacacatgcttgtataatatgcatatgttatatactaacatacttatgtgctgtgctaagttgcttcagtcatgtgcgactctttgcacccctatggactatagccctccaggctcctctgtccatgagattctccagataagattactggagtgggttggcatttccttgatcttcctgacctagggatcgaacctgagtcttttatgtctcctgcattggcaggcaggttccttaccactgcaagtgggttttttttaccactatttaagtatatttataaatattattatttactactctttaaacatttataaatatcattagaatggggttttaaaaaatggatatgactattatgtagcaggagtccagctccattaagttaaatttgggtaggttggtctgttggagcacactgggggtcctcagtgactgtgagtgagaatctgtgacctgcattttgcttatgtactctttcccatctccatgccagtatatctgtgttaacatagctttgaggtgaattctcccatctccttatgttatgttgtttttgtctgcgtagattgggtacaacgcgacactctgtttgagctaggggttggcttaaaaatatttacaacctaaaagctgagagttatgtttcattcagtggaaatttttaagacttcagtaccaggaggcagcatctcaagtaaccctgagagaacgtctctgaggaggcaagaggaggaaccaagttacatagaagttttgcaacaaaaaagcaggtcgtctgaacgtgaaaaattattgctaattaaagaaaactagatatcccagcttaaggaatttagcacgtttatttgtatgggaaggtacaagagtctgggctcaccgaacttattcctttcatatgcacctcagctatctggggccagtagcctgtgtttttcacatcctgagctcccttggggctcaccacagggagtggctgcagtcttgtggctgctcgatggcaggtattctccttcctgagtgccctgagggctcaccaactcaccttggagggctatgatcactgatgactgtgacatccttatttactgatgtggcaggaaatattccattttcatagggatgctgtccctaggatgcatcccttacagttgtgctttatgagacagttggta

SEQ ID NO: 47072 - DNA, 2259 bp, Bovine  19866881101729
  misc_feature (1)..(1): n is a, c, g, or t
ntttcagagtttagccctaatgcttttgtgttagtgtctcaggattgttaccataaggatagaacataagtcttttatagttgcattttttttctcattagttttcatttcaattctaatgaaagctagattttcctatttctttgaaatctcatattataatccctaactgattttaaatgaaagggaggagaagaagccatgtgtagtgttgtagcacttttctgaggctaaaacaggattctagctacttgcctgggttccctgccttttataaggcaggacagccccaagagggggtgggacatgattcaacatggaaactttgactttttgaagagttagctaataaagtagttccttcctgttcatgggcctccaaatttgacttctgttagctgaaccagagatactctggcagtttatcagaatgcagacacctattgcttaaaaactgtttacacaactgtcttccaattaaaaggcaatggtacacttacattgtcattctaaaatcagagacactgctgtgtgttctttaccttacataactcagtcacctgaggaaactgcagcagaaatctttcccaaaagatgctcttcagaagtcttcccaggaaaccaaaattaaccaataaaaaaattacatattcacctatatttgagaaatgcttcattaagcattgttcagcatggagcttctcagagaccttgataagcatgtgtgccttgtaactctttgagagaaaaataaagtaagatgcattttctaaatttattcgatgagagaatgcccaaccccaacacaaagattaactgaccacaaaactgagtttggaaactgcactaacgaagtagagggctagcaaggaatgtagagatcagagagcaatcttagagccagaggaattcaggaacttgccaaggccacacagaatatacaaggaggagaattctgaccggcaacattcagtcctgttatctaggtggctaccacaggcctcagtgcctggttctgtttgcaagtcaagtctggtccccagtaatgctatgcttggaacatagatactgcgtgttcctaggcaaacaacacatcttaaggcaaattatgttaaaagaccgggcctaggagatgccgcctaccataatacaatttaacgacagagctgagagtaaaaaatagcagatatcaataacaaaacacccacagggccctggcctcatcttttaaactgagcagaagagacagaaacttgaagcaaatttaattccctaagaagaatgattctattgggaaagatggaaactaaatttctcaaaaggtcatattcaataaggaagaagacccccctagaccctaatgagaaaagcacaggaaggaaaaaagttaagactgatttgtcttttcccttgaacttgtattccaatgttatctgattatacgccgggataattgccccaacccaagctcagccactgactccatgagaaagaacaatgtcaagaactaaaagaggccccctggtccccaggcaggccctcgggtggcagtaaggcggcaccaatggccgcgaggagagggtgacgaggccaccgcgtgaaggcgagtgggctgggcctggctgggcaaccgccgccatgagcagctcctcaggcaccctgaacctgggcagcaagatcagcgtcatctccaaggcgcagatccgctacgagggcatcctctacaccatcaactgggacaacgccaccgtgaagcttgccaaagtgaggtcctttggtactgaagaccgtcccacagataggccttccacccccctagagaggagatttatgagtacatcatcttctggggaagtgatgtcaaagatattactgtgtgtgaacctccaaaagctcagcacacgctccctcaggatcctgctgtccttcaatcttccctgggcttggtttgggctcatccttccagccacaggtgccttacagccccttctgaggcatgccaccctacagccagctggtggctagctccctgcttagccagcagtatgccggcctccttgggtttccatctgtctcagtcagcaagagccccatggtggagcaggccatccagactggatctcttgataacttgaactccaagaaagctgttacctggctagggcaccatgggcatgcagctcaacaggtgcccagccccacccgcagcaaggccgccaccaatgtagctcagaggcagctgtgcaaactcaacggcag

SEQ ID NO: 47073 - DNA, 1320 bp, Bovine  19866881129468
  misc_feature (1)..(1): n is a, c, g, or t
ngcttgcatggcagagcagcctaaaattttaatgcctgacttgagatggcagccagccccttcccaacccatttgcccaagtagccttacataagacactgctaatctctgctcctgcctgctgaaactccagccaagagtgaagcctcacaggaatttaatcaaagcaaaactgaatcatctgatctggaaattcatttctaatttcaagacttggtagcagaagagtcttctgaggtcatggagggaacaggtgggaacaggaaatggggctccaaggtcagggtctgttgtacggtgtgcccacgaccagacagctggagaaccagagctgcagtacaactccagtttcccagctcctcctccaactcttcccactagaatatactgtctcctgtggagtgcctgccaatttgattatctgtaagtgggaagatttggactcggtcttaaagagaattaattttcaggtttcattttttaactgagggttatgagtgatcatgaataaggataaataatccagcctctgtgaaatgtatcagcaccggactgttttgtgaatatcttatcctaaaatccatggatcattctggagaaaatgaatcctgccacaggcaacaaggttggctttagatgaagtaaggaaaatatatatattcttttttttcctctaggctagaagtggtctgtccctttatataaataaaggagatgtctgtaacattttctagtgctggagaaacaagctgttcctactgggcagagactgaacaagcacaaggcaagagatacacacacaggagagagcccagaggaagtcagcctcacaggagaccacgctccctcgccatttcctctgaaccatcagtaaagcctcattaaaagttatagctaacacctgtggctatctcgaaaagaatccccctgcaatgcaggacacccgggttcaatccctgggtcaggaagatctcctggagaaggaaatagcaacccactcctgtattcttgcctggaaaaatcccatggatagaggagactggcaggcgatagtccacagggttgcaagaatcagacacaacttagcgactaaaccataaacatgctctaaaaatctcaataagatatatgcacaaagatgctcaatgcagcagcaggtataaaagccaacaagctaagtatctatcaaaaaggactatcaaatcaggtgtggtacaaccttctgcatgaacactgtgcagtcattcaaaaaataaaaagtgagctatatctgtagaaaccaaggtagagcaacttcaatacattatgagaaaaaaggca

SEQ ID NO: 47074 - DNA, 1263 bp, Bovine  19866881280139
  misc_feature (1)..(1): n is a, c, g, or t
naacaatgattaacatttgattcttaatctgtgttaccttatactgccaccaggattttctccttatctcagttgcaaacttattgaaggcaaaacccacttcttatcatgatacttagagagatggaaacttattattgtccctttccacctattcataccgctttaaaccaggctggcatccggactgtgtgggtggagccaagttgctctggcacagcataaagagagccagtaatcctgcctttgcttctgaaagtacctaattggcatcaagatagtggtgccaaggtagcaactctaccctctctcaacttcttcaatctcctaagactcttctttcacaattgaaattgactacaactcaaaacaactctagagatcattttaattcgcaagtgtagggtcagactatgctctgctttgtgctcagtaataaccaaaaaggtcttgatcacagagaataagactgcagctggttaagtgctccatgatttgaggtgcatgagaagaaactagaatgagattacagggtagcaacaagagtaatcctgtctctaagagagaacatctgaggggggaaaaagtagatggaattgggattataccaaagaaaaagaaggcagagtaataatggtctttaagtgtatggcaggttattttaaggaaatcagtaatcagctcttttccgtctaaaggagaaacggggaacgtttgctttacatgtatgaggagatgtaggttagataagcttatagctatcactataggaggtgattacaaatgagaacaagctcctgaaagacactatcttacatctatgattaaaaatatttatggcaggtgaggtgagatgttagttgctctttgcgtgtctgactctttgcgaccccatggactgtagcctgccaggctcctctgtccacagagttccccaggcaagaatactggagtgggttgccatgctcttctctaggggatcttcccgacccaggcatcgaacctgggtctcccgcattgcaggcagatttttcttttttttttttttaccgtttgagccaccagggaagctatttatggtagaataaatggcttttccattcaggacagaaggggacttatctttttgaatatagacaaggtgataatgtgactttcctgacctgtacacctacatcaaatcacagggattacggtgcaatgaaaaaaaacatcaaatttattattttaccaacacctaaagttccatttggaaataagata

SEQ ID NO: 47075 - DNA, 1795 bp, Bovine  19866881332263
  misc_feature (1)..(1): n is a, c, g, or t
ntggaaatcttgcttcattaacaacttcaaaagaagtagaatttgtactggatgaaatacagaagtatacacaacagggtaacaactgtatttgtttttattatgggaatatgcttataatcatatagctattggcagtgagtcattctgtttctattttcacttccaaggtttattaaaaataatgtatttaaattgtttttaaatacgttatttttaataaacccttggaagtgaaagtagaactcatttcaatagtcaatagtcagggggctcattccatacttgtatttggtaatatgcccctcaccccaggtggcagtggtaaagaatccacctgccaatgcaggagatgcaagagatgtgggttcgatccctgggtcaggaagatcccctggagacagaaatggcaacccactccggtattcttgcctcgagaatcccatggacagaggaacctgtcaggttacaatccacggggttgcaaagatttggacgtgactaagcacagcacagcatttggtagtttggtaattttctaaattgcttatctcatgttttgctcagcaaaccattgcattaccttagcaaaaagtcatctcatattaataaatatactttaaaacttgtgtgtataatttaataatttgtttgaagtgttattattcttgtaacttaggatgtctcttacaatcagaacactagaccagcatattggcaatatttgtataggtgtatttgtgtgtatgtgtgtttatgtatatgttctgagggttaaaattttgaattatcctcttagtatagatatgcttgaaataatatacaagtagttagctggacttaaacagatcattaaagtatatggaagatttggaacatacaacacttggaagcatttttaatttccttgaaaactgttttatggaaaatatttccatagaaatggactatttgcttggaaatggtatcaaatatcattttacaataaacttttaataggaatccatagtagttatttgctgttcttgggatgttaaaatatagtcaacccttaagaacagattaagttggagatttggaaataatttacaaaacatagttttgaaatatcttagttcatatacttacttgaagtgtcttgaagacatttgaaaaaattgagtagattatattatacattgtattgttttaagtgtacaacataatgatttgatatttgtatttattgtgatacatgttgttcttggatttcttttagattctgcatataaaaatatatggtatttttcttatcctgacttacttaaattagatctatccatgttcttgccaatggcaagattttagtactctgtgatctcacatatatggtgaatttaaaacaaacaaacaaacatgctaaaaactaaaaaaccaggctcacagatagaacagtttggtatttgccagaggtaaggatggagggtgggcaaaatggatgaaagcagtcaaaaggtacagacttacaattataaaataaataagctatgaggctataatacacaatgtgatgactatagtgaataatactgtatttcatgtttgaaatgtgctgagagagtagatcttaaaaatcttcacaaaaaactgtgtatggggacatatgttaacctagacgtataattctacaatgtatacaaatattgaatcattattttgagttctggaaattaagataatattatatgtcaatcatgcatcaattgatggagcttttctggaggctcagacagtaaagaatctgcctgcagtgcaa

SEQ ID NO: 47076 - DNA, 1487 bp, Bovine  19866881348348
  misc_feature (1)..(1): n is a, c, g, or t
naccaggggatccgggttgctcacaagtgctcaacgtgcagcagacatcaggatgcagatacaacaagtgagtgatggtggcccgcctgcgagcgggggcggggctcccggggaaactcacatcctcgacaaccagtctccttttgcacgagcccctggtgctggttttcgcagatgaggtggctttgcctttgcccgagttgcacaatttccccagagactttaaaccaaggaagcaaggcatctcggcacagattgcaaagaaatgagaaatagataccaggcttccacgaagctgtgcttctccacaactctcctgactccttattgttttttttcctctcactgcccagcaaagaagattaaggaagatgtatttaagtgattaccttcaagggcttaggtacagctctgtatacacagatgatcaggttaaaaaaaaaataactaccaggaattcaagactattttagtctgagacatgaatgaagagttaaaaatcagattaatatccagagcaagagaaaggacatagcttcaatagcgaaaaagattcacccacagacattcctaggatattcaatatcatctggtaagagtgctgtgaataggcatatctattgatatgaatctaaaaatgcatatcagaaaaaattcaggatagtaattccaagttctctcgtgtttcaactctcatggaggacagagctcaagaaaagttcttcagctacaactaacaaccaagctagctccaggccacagtaaataatccttctcattttctaccctcccctccccctggtgtcatgaaaatccttcagcctccttccattaatccaatggcaataatattcttaacgttgtttcacatgttttctgctactgcagaatctctagcagaatcacatgatgagagagaattaccatgaaggtggctgcatgaattaataaagttataagcgagcagcagcatcacacagtcaggctgctgatgtacaaagcagcaaatgtacaaaggctggtaatgactttttacccttgacacccactcagtcaggttaataagcacatgtgactgaaataccacacaagagtcacaagtcagcgtgaataaaaccacactccttctcctgtcattgggatattatattctaatagcattttcttttcaataaaacccttacacactttaaacaggatagaattatagagctggaagggtcttcaaagataagctactccaatggttcacaaatatcactgcatgcaagaattttctctagaacttttgaaaaatacagagactggggcaccggctcagacctctaaatgagattctttgggggggtgaggcccagtattacttcaaagttccccagatcaggaccaacattcaggaaacagggatcttctccagacttttaatttttaaggggcacaaggtaagccttagggatactaactggctttcccaggacaacacagca

SEQ ID NO: 47077 - DNA, 704 bp, Bovine  19866881380592
  misc_feature (1)..(1): n is a, c, g, or t
nattctccaagcaagaatactggagtgggttgtcattttctcctccaggggatcttcccaacccagggattgaactcgtgtctcctgtgtctcctgcactggcaggtggatttgttagcaccgagccacctgggaagtccctttctaaagcaagaacagaagtccaagaagaaaggggataaaatgtgcacttatttatgaatagaccaattgtattaatttatgattgttgttaatcattggcatgcagaaaatagtaatattcagggtactgagtaaagaagtttattttttaccctaaatctaagggatcttgttgaaagcttccattttaatattgtgaaagggtggcatttgttagagatttgtgtgagtggaagaaattgcattggaaataattttctatttggaggcttaatttatatttgatcacacgtgtccttcaatgatgatatagtgtgttcatatgtcaaaattattaacttttttcttaatacctgtgatttctattgagaatagtttttttaaaaagtagacatttagtcacagaataagggaagtttgttgtctaaattctacagactgttaagcaaagttgatttttggtgtatggtaaaatgaacactgggctgtaatcatcatgagttgtatactggctaccttatttactaagtacgtacaccctgagcaaatcctgtaacctc

SEQ ID NO: 47078 - DNA, 955 bp, Bovine  19866881408370
  misc_feature (1)..(1): n is a, c, g, or t
naaaaggatcgattttcccaagccttctgcctcttcttttcacttaatgaattatcatctcaccagatgggcttttagtacttttttttttgtactaggatttaacaaaaatactccaacttggggaggctcattttactatcagcctggttgttcatcatggctttggatgttgttcccagacaaaatgctggtctgaggccagtcatggactttgagtccttttgtattaggtaaaggctgtctgaaaacaatggccccatccggtaaggttcaggaaagaggcatttttttcctttagtaatcagtaatgccctgatgcagggctggattacccaccacccacagtccaatttttttcccagttatttttgaacaccaaggcttttgcaaattagaaatgttatgaagactgtttaaatgggaaaagatacttaggacaaatatccccagcatcagatgcatttataggctaagatgtagaaggaaactagcataactgttttaaacgtgagagcagatcatgtgattcctgcaagagacacaaactccagcacccattctgaaacagtaatttaacataaggcacataatttacccaatgaaatggaaagactacgtgatcacattgtttaaatataaagcttgattaattcaacattctcagcttactttcttctccgtctaggtgggttttttgatttgttttgaaatggctttgggccatactctggggtcaccccaccctcccttccttgagtccaggccactgcctggaactctgtacccctgataacatcctcctgacttggccaaagcaccaggcgccaggcaaaagatcacaactggaccactcgttgataaaatgcttggcttttgcagagctgtcatatgttagctgctgccaaaaggccagttgcatttattgaaatcttcgattacgcctaatgcccaa

SEQ ID NO: 47079 - DNA, 953 bp, Bovine  19866881452682
  misc_feature (1)..(1): n is a, c, g, or t
nttggaatcctgtggcacagaagtggctgaggagatcagggaggagtaagagatggggggctgccttaaggagctcacaacctaattgggaagatgagttattcaagaagccttcaactcagagtggactgcaaaaaattctgctgttttctaaagcagccactgtggcagccaccttccagaaaagctgccataatctcataaatttaaaaagataccataagaaaggaggctattaatatcatttacattctgtggtgagaaacagaagggagaccttctcctctagggtcattcattgcagaggagagctgacagacctcgagttatagcctgtgtgttagttgctcagacatgcctgactcttctcgaccccatggactgctgcccaccaggctcctctgtccctgggattttccaggcaagaatactggagtgcgttgccatttccttctccaggggatcttcatgacccagggatcgaatctgggtctcctgcactgcaggcagattctttactgactgagcttccagggaagcccatgagagttatttgtcctgatttatgaaaccacctccaaggtcagggtagttccagttgttttttttttgtagccaagctcccaggatatttctgcaaagacggtttgtttctactactgaggattaaaaagacaaaaaatagaaagcatcgttcagagagagctcaaaattaaaaataaaattcaaatcaaatcagcctctgaaacatcctgaaaacctcccaccaatgattccagactttgttatcaggagatcagtgactccagctgtacacaaaatgcaataagcaattaaatacaggatgcaaaaggaaaaaatgatatagtcacgaagctactggagccttcctttcttcaaaatatttaagctctagcttctttaaatttaatttcacttaaaaatttcaagag

SEQ ID NO: 47080 - DNA, 2014 bp, Bovine  19866881511264
  misc_feature (1)..(1): n is a, c, g, or t
natgatggtatccggtcctatcatttccggcaaatagatggggaaacaatggaaatagtgagagactttattttggggggctccaaaatcagtgcagatggtgactgcagccatgaaatcaaaagatacttgctccttggaagaaaagctataaccaacctaggcagcatattaaaaggcagaaacattactttgccaacaaatgtccatctagtcaaagctatgatttttccagcagtcatgtatggacatgagagttggactataaagaaagctgagtgcctaagaattgatgcttttgaactgtggtattgggagaagactcttgagagtcccttgaactgcatggaaatccaaccagtcaatcctaaaggaaatcaatcttgaatattccctggaaggactgatgctgaagctgaaactccaatactttggccacctgaggcaaagaactgactcatttgaaaagacactgatgctggaaaagattgaaggcggaaggagaaggggatgacagaggatgagaaggttggatgacatcactgacttgatggacatgagtctgagtaagctctgggagttggtgatagacaggcatgctgcagtccatggggtcacaaagagtcggacacaactgagctactgaagtgaactgaggttttctttattagaaaagatttctacataacagtgtttttccttcataaagaatatgcaaatagatcagattacatttgtgaataaactctggaaacacaatatgtgagaaccacagaaatgaatgacaaggtacagaaaatgcaaggaaaaggaaattatcgtgagcaaaaaaggaactcagaatgtactgatgacaggtaacatcataaatagtaaatgaataccacatgatatcttttaatattaacttgaagtttcatagtaatactatttgtattcaaaacgacactaaaaaacaaatgatatacattaatattttaaaagttgggtaaacattttatttatccttacggcagagctaaataatgtcatacttgcagtgtttctttaaagaattatcattgtatagtaactttaataatttctgagatggaaaaaaattgtgttaaaatacttttcaatgtaaactcattttgagagaattcccttgaggtactatactttgggctaaaatggcacaaatgtattttaaattcaattgtttaaaatgtatattttatgacatgacaatgttgaaattattctatttttgtcagcatttggggttatctttttatgctgaataagcacctataaaatcatcatactgtggccttttatttggtaaattttatatgatgatgattttacagcttagatatacactagaggaacattatgtggtcacatggtatttctgtttccctataatataaattttcaatatcaacttataaccgaaactaaaaaataaggataggaaaacaaatgctataaaagttatttaaataaattgtatataaagaacatacttagaaaactgaaatcgaacagtagtcactggcagttttgtttcaaagtcagtttacttgcttagagctttaatttctacatcattgctatttctcacaaacacatacgacttctgggagttgggaaatcatgtccatttaatttcctttctacatttctagcataattatacttgatatttagtagatatacattaggtttcacatatagtaagaattctggcaaagacaaatgttcaaacagccacatgacttaaaattatattttccttcttatatttttatttacagttctaagttcaaatattcactatctgtggcttatgcaaataggaaaaaaacatagttgaaataaaataaatatgaaatgttgatatcaatatcttagcaatctgatttttctcactaaaaactcaaaaagtacaaatattatcacgtattaacctgttacttagagtacgattttactttcttcggaaagataagtctcataatttaaaata

SEQ ID NO: 47081 - DNA, 637 bp, Bovine  19866881674871
  misc_feature (1)..(1): n is a, c, g, or t
ngaatagtgctatagtgaaccctgactgttacgtgtcgtatccttttgtatattatgaattattgttttatatttatcagtgaatgacatgtttccaattagacttctacaaaaatatacgacaatattttgtttaaattacattatttatttttaattatccctcttagtcctgcatgcattgttagcacaaaaatttgattacaacctccattgaagagatagtaggtacacaatcaccatctgaagagtttcttcagagatgaccgacctagaattccaggccatcataacactgtcagtaacctatacaatgttcaatagaaaaatttaccaaatatcctttgtttaatgtaaacaaggcaggaggcaaaacagatattatagtaacactattttacagggcccagaaatatgattacctaccatgttttaacacatcaagtgtcacaatgacatgcatattttgattaactgtacaatccaaaatacaattaccatataaattgtggttttagcaattcactgtaacttctgtcaatacttataaacttcataattaaatggtaattgtatattaatgcaataacttatggaaatatgttaccatgaattatgaagtaattccataatttgt

SEQ ID NO: 47082 - DNA, 1287 bp, Bovine  19866881695057
  misc_feature (1)..(1): n is a, c, g, or t
nctggaaccagtctttgaactcaggcagtctgaccctaggacacagcctcttaactgctgaagtgaataccgccttcatctgatttattttaaaatactcattatgtaggacagtgccctagtccatgtaggtgctcaatttcattttttaaaatataaataagtgatttaaaaatataatagtgataaatggaggagcctggtaggctacagtccatgggatcgctaagagtcggacacgactgagcgacttcacttcacttctttaccactagcgccacctgggaagcccatctggcctttagtccccttatattcactgggaatttggactggatgatcattgttaccttcctcctgtagggtagtgtgattttgctatttctatagcaaaaatccattaatgtggactcatgaccataaataacatgctagatcatccattagcttaaaatttgtgattcataatgacatttttatgaggtcattttattcctaccttattctaattatgtgaaagttgtccagtatgatgctgaaaataaaactgtgtaaatggtatcagttggcttttgtgatggaaataagtgaaatccagagtgtaaacataaagactttaagcttctctgttgaaaattgcatttcgttgatttttattttactttttaaataataaagaatattcttgaagtattttctgatcttttccataaatgaaaattaggctgttttgaggccatttcagatttctttggtgctggtagtattacttcagtcatcatctgggctttgcttttcaaattgaaactttgaaaatctttttgatcattttactcttggtcattttattttataaaaggatagtaacagtatacaaagaactctatatccagtttctaaattctttgtattcaaaaaatgtaattctatatggcaattctaaagtatatcttgttatttccatatggctactatatatttctaaaactgtttcctccctagataaaaaatgtaaaatgcatatttaaattattttagaaactcattagatactttttttttaagattcttgttttgtttttaataggtccatgtatatatttgggaggattttctagtgtactccttaacgatatacttgtatacaagcctccaaattgcaaggctttcagagatgaagaactttgtaaaaatgctggtccaggaataaaatgtatttggaacaaaaatcactgtgaatcttgggactctgggaatactaataatattcttagagcaaagtgccct

SEQ ID NO: 47083 - DNA, 997 bp, Bovine  19866880435742
  misc_feature (1)..(1): n is a, c, g, or t
nccctctgcttgcccactgagcgactcccgggtccagacccacattctgcatccacagagagagggcttgtgagcacaggaagcggcccctgaggcactgggcagggggtgagctccccgtcagcagcggcagccaagcagcagctggtcagccaagtagcaacctgtggctgagcaggctttagcagtgaatgtttgatgagaacaatgacctttcatggccccagaggggagtccgtgaggccgaggcccagagagggactgagcttgctcagcagcacagctggagggtctcaggagaaagacccacatcaaatggagttttctccccagacccgccagctcagggccagtcagggcccggagtcttggggcgcagcggcagcgaggggaccaggcacctcacctgtcagagacttggctccacacagccgctcccaccgggttcccggccaggtagatggactgcgccatgggcctcagggcctgagcgtcacacaccaggtcccactggtgggagaggagtggaccggggatctgagctcaggaggcgggaaaggggccggcgagggtgctagatgggaaggcccagggagctagggctgggtgtccggcccggtgaccttgggggtcatcaccccttgcctaagcccctccttagctccctgttgccccaggtccggggtcaggccctctctgggctcatccgcctccttgccgggcccttctacagtagctacccacgctggcgccttctcccggctttcagaggccgcttccctctgtttcatagagtccccttcctgcttgctgggtgggccgcctctcctgtctcccacatccgctggaggttgcctctgggaacccagtgactctttgcggactgcccctgaggttcctgcaagctcattcctgccatcaaccctggtaggatgatgtggccaaggaggaactggaagctgcctgtgaatgtggaggccaacagtggtgggactcc

SEQ ID NO: 47084 - DNA, 753 bp, Bovine  19866880463175
  misc_feature (1)..(1): n is a, c, g, or t
naaggggacgacagaggatgagatggttggatggcatcactgactcaatggatatgagtttgagcaaattctgggagagagtaaaggacagggaagcctggcgtgctgcagtccatggggtcacaaagagtcagacacgacttagtgactgaacgataattagcctcttatcagatatatggtttgcaaatattttctcccattccatgagctgacttttcactttgttgctggtggcctttgatgcacaaaaggttttcactttatgtccagtttatctgattttcttttgttttgcctgtgctttcggtgtcacgtccatgaatcattgccaaatccagtgccctgaagctttccccctatgctttttcccaagcgttttatagttttagccattaagtttaggtctatgctccattttgagttcatttttgtctatgatctaaagtaagggtccaacttcattgttttgaatgtggctatccagttttcccagtgccatttgttgaacaaattctttttatacaaacaaaaaaagctatgtttaccattcttacagaactgtaagccacagtgaatatacaaatgaaacacaaacaaaaccaatgaccagtaaaattcaaacagcactaaattaacacaagagatgaggttattttgctgaaacaaaatccccgttgctcagcaagagcacagcaggttcaactgaacggctcaccatggttctccactggaaccgctgcctgaatacat

SEQ ID NO: 47085 - DNA, 1001 bp, Bovine  19866880468881
  misc_feature (1)..(1): n is a, c, g, or t
ngggcagcaggaagcagggcttgtggtcaggatggtggtaggctggtgatgacagttgttaatctcatcctgaacggcttggttccttcacaggcaccttctgaagtcacgtccaggctcagcttttgcctgtagatgaactgagaccaggcgcgcctcatcgtcaggctgcccaggcagcgggtggcgctgggcctggcgctcgctccacacgcctcctttcctcttgtaggttgaacgtctccatcgagtgtaagcgagtgtccggcctggagccagccactgtggactgggccttcgacctgaccaagaccaacatgcggaccatgtgagcacgcctgggcgggaggggctggctgtgctctgcagagcccctgtcctgactgctgctgtctcccaggtacgagcagagcgagtggggctggaaggaccgagagaagcgcgaggagatgacggacgaccgagcctggtacctcatcgcgtgggaaaaccgatcagtgcccgtcgccttctctcacttccggtttgacgtggagtgtggtgatgaagtcctgtactggtaggggccgcggcgcggggggtgggcgccggggaggaggcagaggccacgcggggtgtctgggcctgggccgggcctcagggcccctccaggctcaccctgctttcctccccaagctacgaggtgcagctggagagcaaggtgcggcggaaaggcctggggaagttcctcatacagattctgcagctcatggccaacaggtagggagggggcggtgtgtgtgtgtgtgtgcaagcgtgcgtgtgtgtgtgagcgtgtgtgtgtgagctcctcatacagattctgcagctcatggccaacaggaaggccttgtgtgtgtgtgtgtgtgtgtgtgtgtgtgtgtgtgtgtcgctcttgggaggagctgcctctgctgtatgtctgggaagggaggtggggacaaggctcacaggaatttctgaagaagggtatctagaacctc

SEQ ID NO: 47086 - DNA, 700 bp, Bovine  19866880481023
  misc_feature (1)..(1): n is a, c, g, or t
ngaagagcaccgcggatagaattcgcaccagccccggtggcacgtgccacttctgcagggaggggccgaggagtcaccaaaacctccaggctcacaccccacaccccctcttctcagaaccaccagtgttagaggttcgcgggattcaggcgccccgccccgctcacatgccccgggctgggacggacgtaggtaagggtatcccgaacccaacgccagggcgcacagggcttggagcagctcaccaggaagatggcttcgatgtgaccgatgccacggcgcaaggaagagcctagccggtccccgaccccggccagcagtatcccaaacagcgggatccccaccagcgcataaaagatgcagaagaggcgcccagcgtctgtgcgcagggctgcgttgccatagcctgggcagaggggccgtgcagcaggtctaggggctacctggcacccccctagctccccctgcaccttcccccatgagaaagcccagccaccccttgccccctctccatgcccaatcccttcccccaccgatggttgtgatgatggtgcctgagaaaaagaaggcactgcccaggtcccaggctgaatggttgctgttactggttgagttggtgtcagggttcgcgccccctcccagggcatcagccacatcctgcaggacaaggcgcagaaggaggaacctcagttccttgcct

SEQ ID NO: 47087 - DNA, 1874 bp, Bovine  19866880527755
  misc_feature (1)..(1): n is a, c, g, or t
natctgtgatgaggtgagtgaggggcaggcagaacagagtagtgggcaaggagggaggaggtagaacaagccagaattccataggtccagactggcacacggcttgtgggatcttagtttcctgaccagggattgaacccagggctttgacagtgagagtacgggactcctcctaactgctggactgtcagggaagtcctaggcatccatcattgagcaaagagcttggctttgcagctaggcacacttgaagtggaattctaacccttgcctctgtgtgcctcagggttttcctccctacagtggggataatgataaatgtcttgcctacttccccaccaggtttgttgaaaagaggggtaaataggagtcccagttactaaatcaacttcccttgggtgactcagggcaaactgttccatctctccagttctagttttcccacatgaaatgaacgtgcccaagatctgactttctgtgactctcggcacttgaactacaaactgtaaaacgctgtactagggtaacatgctattcttcattgagggggcggggacgtgggaattgggcactgacaggtggtatccctggccccaggtgaatgtgccgccactcaccctgagtcagccgctgctgttgggcatcgcctgcaatgagaccagtgccggccgtgccagtgctgagttctacgtccagtgagtgatctctgggggacagaatcctgggtcctggagtaggtgggtggttgaggggcatggctgagggagctggtgctctacagggcccctccaggggctaagcactcaccaggccactctcacatcctgtccaggtgcagcctgacttctgagcaagtgaggagacactacatgagtgggggacctgaggcccacgaatccacaggaatcatttttgtggagaaacaggttcgaggtggcaaagtgtgtcatttggataagcatctgggttggggcttgcagaggcctggttatgcacgtctgtctcccaggcctgggtcggacggggctcccagatctcagagcttctctccagagcccacaagtcctcacggggttgccttcagcccaagggagagtgccagggacctgctcagcccccttaacatgaggttctgaggctcagaactgtgggcacagctcccacaggaaacctgacgctgagatgtctgggtctcactgtctctccccacagagtatgcagaggttgcaggagactgagatgtggcctgagctctgcccctcagccaaaggcgccatcttcctctacaaccgggtccagggaagttccacctgagtctcctggagtccccagccctatcaccacagctcggaagacaataaaggactttattcttggattcctttggcatctgctgtttgcatgagacagagggggccactgggagagcccagggagggtgagagagacaggacaagtgacttgggttaaaaaaaggcccaggctcagtcttcccctctgcaagctgagggccgtgcccctttgccaggttccagtgaggctccaggctgactatggggtggaagggtttcccgaatctgcctgcaatacaggagacccgggtttgatccctgggtcgggaagatcccctggagaaggaaatggctactgactccattattcttgcctggaaaatcctatggacagaggagcctgcagcggggctatgcgcagggtcgcaaagagacacgatcgagcgactaattttcacacttcattttacggggtggaaactgctttgtgaaatgcgtctcggtgcagagtggagtaacagctgtgtccgaaggagtgaacaacagaggttgagctgaaagccgcactcagagcaggaccag

SEQ ID NO: 47088 - DNA, 472 bp, Bovine  19866880533972
  misc_feature (1)..(1): n is a, c, g, or t
ntctccctgctgagccccggcagggattaggtcctctgtgttcactgctgtgttctcagcgcctggtatatagtaggcactcaatatttgctgaataaatgccagaagcccccaaatgcttcctcttcactgttcctctgtcctctgcgcgttaggcatctcacgccctccctcctcctcgaggtgaggcagaggggacaaaggtcgaagcgggatgctgggagagaaaaggagggtgaccttgaacaagccctcagcctcccctctccctcctcccaaaggcgggggcggctccagccaatcctgaacccgtagccctgccagacagactgggactgtcctgagctctggccaggccagcctggccgctgcggcgtggtgcctgggaccctggccaggccctcggtggccacagccaaggggctcagcttggggagggtggcaggcaggcgggcccttgggtgggggaggg

SEQ ID NO: 47089 - DNA, 1185 bp, Bovine  19866880585751
  misc_feature (1)..(1): n is a, c, g, or t
ntggaagtccacgggtctccgggaggaagaggacgatgaggccagcagcaatggggatgacaccacaggagagcgggggcagcaggggcaggacctggtgggtcatcctgatcagcgggcccatcacagaccccagccgagctgctgggtacaggaagccttctgtgattatcctgtgagcggaggggagggccgggacccttgtcacagctgctgttatggtgggggccagggggaggctttcctagaggaggggcactttggctgggccagggaatgccaggggagggaaagctgggctgaaggagtcaccttccttgaggtctctgctaacatcacctcctccatggagcccacctggattttcccatcaagagggggtttctgctttctgggaccatctggagtccttcacaggaactctccaggcccaggccattcttcctggtcttgggtactttggaggcttgtctcaggggtcctgctaggccgctgagctcccagttcaggcttcccataaagtatcaacaataccaataaatgtggtttctataggcttttcataaagtatcaatgatatataaaaaaagagtgaacgagtgagcgagcgagcaccatgagtaaggctgggccaggcctgtgggggctgaggtccacccctgctcttcaactgagtaagtccttggccaccctaaacctcagtttacccaactgtacagtgtggggcttgtctaactcttgacaagggacagtgggaggcaaccctccgggctcttataagatttcacctgagcagcgggctctgcggctcaaagtggttcccagtccggaggcctccaggagccctccttggggctgcctccgagcctggactcagcggaggggctgtgtgtggaggccctggctgagctggggcctttgcggggaggactccggggcgtctgctcggttccacgtcggcgcctggtcctctagccctccactgtatgttcctgggtgccaagcccctgcccgccctccccacgggcccttgtgggggtgtgccttccacagctgcagcccagcctaccgcagtgaagttgggaagagttcaggcttgtaaatcatgatgcaggttaagctgaggccaaaacacccctttcccagcacagcgaagaccacacgcagggtctgcaggtctaaggc

SEQ ID NO: 47090 - DNA, 1848 bp, Bovine  19866880647188
  misc_feature (1)..(1): n is a, c, g, or t
natgaatggtagtctaaaaaagagatctatctgtctgtctgtctgtctgtctacataaaaagaaatccagaggtcatcagtctagggctgctgtggtgtcttcaaggagccaagcttgattttttctttttaaatgctccttcatttttagcacatagcctccattcccagggctttccaggcggtgctagtggtaaagagcccatctgccaatgcaggagacaagagatgtgggtttgatccctaggtcagaaagatcccctggaggagggcatggcaatccactccagtatttttgcctggagaatcccatggatagaggagccgagtgggctatagtccgtggggtcacaagaatttgacgtgccgagcagctaatagctacagcctgcattcccacggttgcctcctggtatcaaaatgactgccagacctcttgctgtctaggttgctctccaggtgggaagcatgaggaagaaggagggaagggcaaaaagggtacttaacaactgctcaccctcctcttcaggctctttctctggatttctccctcataatttttgcttacaagtaattggtcactgctaactgcaaggaagtttgtaaaatactattttttagtttgtacattggttcctgaaataaatgggggctatagtgctaagtatgacagagagaatgggtgttggacaggcaacaagaacaagctatgccacactagtttaaacataaaaaggaatgttttagctaccataaatgaaaagtcagggaaaacggtctgacttcaggcaaggctggatccaggtgctgagtctatgttattaggaatttcttactttgtctcctgcttctgcttttctgcctgggcatttcatcactagacactgagggggccccagcagttccagactcatatcctcccagatttaagtccagtaggagatttttttttttttttgcataccagttctattaaaagtcccagaattggctgagtgcggtggaggggtggttctctaagggaaacagggatcctgttatcagaggaagggaaacagaagctggggaggcaggaagaacagctttgcacacaactgcaaaggcgagacctttgcctcactgaggagctgcccagtgagggtggcccgagtggacagtgtttccacttcctgccctttgatcccttatctttcattccttttctccagggtctggactgggctgctctggctgctaggaagattccagccccgttccgaccccagatccgctcagagctggatgtgggcaactttgcagaagaatttacccgactggagcctgtctactcaccccctggcagccccccacctggggaccctcgcatcttccaggtgagtgagagctcatggaaccacagatgcaggggaagtggggtgctgttgcaagcctcagccccagctgacctctggacattacatagccctgtgtcctgagggggactcagcatctcccttcctctccattcatgatgaacttggaattgtcagtcattgaggctgccttggcaggacacgtctttgaatttctggtttatcttgaaatttcatttcgatttcccttctccatcatctctctttattgttaggtaaaactgttgttttaaggggacacctaggaagagatgctttgtttatactgtggcataccatatcacattcctggggacacaggccccctccacccagttttagaagcttaggcctgttggacaagtccaagctcctttgcctggtatgcaaggccttgcatgatgtggtctttttttttttttttacattttcttttcttttatatggaatatagcca

SEQ ID NO: 47091 - DNA, 5492 bp, Bovine  19866880650306
  misc_feature (1)..(1): n is a, c, g, or t
nacatttaaaatgtagtggagcagaaactaacacaacactataagataatttccgtctggggaaatgggggaattgggtcagaaggtaatcaaagggtcctttagtttgaaagcaaatattaattaacaatagaaatgaattctaatatacagaaatacaagtgtatttctttttgtacttcacatcaacctataacaactccaaaggctatataacattcaactgcacaggtatgttacacactccaacaatctttaattgttaaggcactaagatacctgccactattgtaaacagccctacaaagaatatctctatagttgtttttgcacataaatttcttttccccttagaatacatacctagaaacaaaattgctaggtcatttccaggtctgttatatactgccatatataccacagaatagcaaaagaaaaataaaataccattaattttttcatagcttcctttgcctattttccccaacaactttaggcagaatataattacagaattggttttactttagaaatgaagactgctcagatacactgcttagagctagatggtggtatatattagtataatttacatcttaaaagatttattcacgatgtaagacaattttaaaaggttttcaattctgaaaccttcaaaggaagaacttttagcttcttggtctaattatactagttttctttaattatcatctaaaaatgtctattaatcatagaatttggtcagtgacaaaacaacttaaacttccatagtccttttcacctcttacactaaataactcagttgagatttactaataattagtatttacacagtactttatttactataggatcttccctggtggctcagacggtaaaaaagcatctgcctacaatgcgggtgacctgggttcaatccctgggtcgggaagatctcctggagaaggaaatggcaacccactccagtattcttgcctggaaaatccctctcttatagctcctgtagcttctattaccttgaaaagaagcctagtcaggctaccagattgatgagagacatatgaattggtaactccattgacctggctgacaatctgcaaaccattcacatgagtgaggccaaactggagtatccaataaccaaactatcacactatcatgcaacagaaaacccagcaaaaatgaattcagctagcccaatgccgaataattgccaaaagagcctacaaaattatgatctaactaaatggttgctgttttaggccaccttgttttgaagtggtctgttacacagcaaaagctactcacacaaagaagtacaaactaatatgttaggggttgttaactctgttaagcgacatgctgaaaatggaaggttgcatggcaattttaaggattataaatacagatctataaagagtagaatgggttataataataaaacttaagaaccattatttatctttttcacttagaatgcatttaatgttgtttcagttaccttacacatatgaacactttatattcgtatgtcaacctgataaattggtagtatttttatctctctcattttatataggaagaaacagagaataaatcagttaaacaagatggatgattgatttgaaatgaggcagtctgtctacagaaactgtactcccaaacattgtatggcttcttgtgacatactcacagtacactgtagggtgactaagacaggaaacaaaatattatgtaaatttcaacctacatttttgtttaaaaaattaatagtctgtgcagactagacaagaataagaagtgacatgaacattagtttcttgttgttattgttacaaattactgtaaatcaaatggcttgaacaacacaaagttactatcttacagttctctaggtcaggagtccagtgtgtttcagtagactacaatcaaagtactggtagtgtttctttgggagaatgtagcagagaatgttggggagaaggcaatggcaccccactcctgtactgttgcctggaaaaccccatggatggaggagcctggtaggctgcagtccatggggtcgctaagagtcggacacaactgagcgacttcactttcactttgcactttcatgcattggagaaggaaatggcaacccactccagtgttcttgcccagagaatcccatgggtggagaagcctggtaggctgcagtccatggggtcgcacagaatcggacacaactgaagcgacttagcaacagcaacagcagagaatgtgattcctgccaattcatcacattggcagtattcatttcattgaggttgctggactcatgtccttccttgttggctcctagagacagctacattctttggttcctactccctttcctccattttcaaatccagtgatgatgagttaacgatttttcaagctacatctctctgacatgcttttctttttttgttttcctcttaaaagaaatcatatgattagattgggtccacctagataagctaggataatttctttatatcaagatacttagccttaattacatctgcaaaatccctaatactgtataaggtaacacagtctcagtttacagggatcaggacacgagcatctttgtgagctattttctgtcaaatgtatctcataaagatatatatcccaaagctaacaactataatttctgaatgctttcagttgtaaggtgagttttgttcacttctttaagtttaatagaattctctggtattcccaaaggggaaatttattataatattcatataaataatatttgtactcatagtacatttcctgaacaatatttagggtatgattttcagatacccccaatttctgtatcttttaaatataaacaattttatttaattaaattaacattgcttgaatatcaaattctttattgctatcatcaaaatcattgtgccaaatggcacaaaattggacttattttcaagtctacatatttacaggttatactgcttttctagtagtccacaggtattaaagaattaggaatttaggttattctgatttttttattaacctattatagtattaccataagcttctcatgaataaagttagtaatccttcttgaatatctttttaattccttccagaaactgagttaacagagaaattttcagaaagctaatattttcaaaagttttattaaaattttggtgtccatttattaaagtggtattgtgacattgttgaccttttaagctcttattaactcatattctctctgtgtctccctgctttttccctctccttgttcttttccaccccatctcctgtccttaaaatgtctctttccttaatatctcagcacttttacattcatatttccaactccatttcctttgtatctgtttctattatatttgggggccttaaatgacatatagtgagtcttactgaactctcacagtattggcattctgtacacatgacacattacaagtaatatgtgtaatggaatggcaaggaatgttagacatgcacattgcaaatattcctctgatcacatgcatgcttcattgttccatcacacatcacttacgaaactcaaattaaaaaaattgttaagatgtcaccatgatggtgagagcaccacacagaattatgggcagtgtccttcttagcataggccccatgtgaaagcacagcttgtatatccatgaagccagccctgtcttcttgctcccatatcactttccccattttctcatttgtgtttcttgtgattacctcctggacaaattaattgcatcccaaacctttacttattttattttaaggaaatcatgccaaaatgccaatagtattggtgatcaaactgaaatgctggaattagtcagagagcaccaagagccccacactgctggtggcagatcaggtcagactggtagaccgacaatgcatgctaaactgaagcatcagttacttagaccctcattttcagagaatgaaatcatgtgcaagtagaaaggaaaatgtttcatgcagtagttcaaaaatttgaaacatactggtgcaacagctattctaatgatatcaaacttggctacatattaatattatctactgacctagggaaaaaagagaatgacaaactcatgtcaggggactagcaacataagtcatactgcaagtcagaaatccttcaaggcaaaatgtagcacgacccatatatttagtaaccaaaggtcagatttggctgaagcttaaacccatgttttgattttaagagctctagaatcaccaaacaatattaaattcagagccccagagcatattcacagaaaaacttacaccctttatagagaagggttggaactggagatccggaaaagacactggataggatttccctgaaccctctgaggggatggaaatgtgtcctcatctcttgctataggagggaaaagttgcctgaagatcaagaactatcttacctaagagagataatatgttaatgatactttccctcattgatctttatcatttgccttcattgcctgcaaattaatagccaagctaaactctcagcatgtatcaaatgggaagtatgactatattacgtgaacaaaagagttatccatttgtaagaacaccataaactggtcaacaactaacaggagaagaatcaattctgtaatatataacatcttataatgtaagattaagtatataacatggtgactatggttaataatgcagtattgtaaacttgaaaataagtgactgagtatagatcctgagtgctcatcacacacaaaaaagtgttatctatgtaagatgatggatgtgttgattaccttgatcttggtaatcctatcacaatatggatgtatatcacatcattacattatatactttaaatatacaccattatatttgtcaagtatttctttaaaagttgggaaaacaaaaaaaaacagtagaagccagtttactatgaaagtgaactttgagtatattgcacagaagaaagaagaaaagacataaagctacttagcaagagagtatatagttatgggagtgatatctgactcatcaggactaacagactggcaggtttgatgaaacgcctgcagccagtcctaatatactgctgaagtagatctgtatcagttttctactgttaataacaatactgtaaaacagataaccacaaaacccaatgacttaaaagaggaatcatttattcagtgttttgctgttctagatctcaataaatggccagtggattatctctcaggcatacaacactagcagacaggtggtgtgaatgtagcttttctagtaccaccttagttcatatagccttttatccccttggagcttaatttacacttccttggatggtaagacagaggctgaagagaaagaactgaagtatgtactactctaggctagatacacatacattgttccttccatttcattctagtggtcaatgcagg

SEQ ID NO: 47092 - DNA, 2262 bp, Bovine  19866880826088
  misc_feature (1)..(1): n is a, c, g, or t
ntcaccaataatttcatagatagaaggcagtgatgaggcagagacaaagtgggaaagagccagggcctcaaatgcagctccagtaggacttttgttctcacatttgagcccaagttaatccaagatatctgtatgcaaagtgtgcagtcaccgcacagtgggaccaaccccccacccactgctggccgctcagagcctccccgccagcccaaccggcccctcccctgaggaaagccctttgctgccccatgcagggcaaggaagccaatagccaccaggcccctgtcagcagagaactccaggccccgtgtccctggcagcgagtggctcctggctgtggccgctagacagagcggagtcactggttgcaccccagctttattctcctgtgcctcacatctgagccaaggttcagaaatggacccaggtcaccgtccccagggaatggtccttggctcccctcctgggccgggctgggggctctcttgcccactcccgcctgcctccctcagctgggagtttccctggggactgcctcctcagggagggctgcagggccgagccccagcagggagctgtttgtaggggccagccgtcccccctgtccacaaactcgtcccagctccagcttgggcccccagtgcaggccatggaggatccaggggcccaggtctccttgtccaaggactcgccatgagtgccctgcctccccgcgttcttgggctgcctggggtccccactgagattccagtgctgagaacactccgctcccaagctctccatccatgcggtgtcactggctgagagaaggggcgagagttcgcttctccggttcctgcacctcgaggcctggagagaaaagctcagctcaggcttaccctctccaaggggttcccagccgcctggccgggcctcgaacataccaggccttcgcttcagctcttccctctgccaggaacaccattccccagatacatgaacagaacacaccctgacctccaagcctttgcttcagcttcacctcctctcggaggcctgccctgagcaagctacctgaccttgccacctgcccacccgaggctcctgatctcacccaccctgctctctttttttttccaaggacactgtcaccttctaatactgtagggctgagctccccaggacaggactgggcacctgagatgtggccagtctgaactgcaatgtgcttgggtgtaaaataccactggatttcagacttagtgtgaaaaaaatgaaatatctcattaaggattttttacactgactacatgtctaaaatggtaatagtttaggcatactgagttaaaatatattaatattctaatattaatatatgtgggtgatgttgaaatatattaatatatcgatattaatatgtacttatagagtatatttggtgtatttgatgtataatttattaaatgcattaaatatatacaatatatagtatattaaatatataccatatgtttatataatatattaatatgctaatattaattaactttacatgtctcattacttcctctgattacttccaggggtttccctggtggctcaggtggtaaagagtctgcctgcaatgtgggagaccccgggccctgggcctgggccaggaagatcccctggaaaaggaaatggcaacctacgccagtatccttgcctgggaaatcccatggatggaggaggctggcagactacagtccacaggggtcgcaaagatcctctgatgaggctacctaaacattttaaattacacgtggagctcacgtcatagttctattggacaagctatggtagataattattatttttatgcatatcatgagctgtctcccagctccccataccagaatgttctctgttatattcccaagtatcacatcacctgacattccagaaaggctcatggtcaaatgagggaatgggtgaacgaggcctgccaggggcccaggaagggcaaatacccgctttcctcccaggcccccactcactctctccgttggcatctgcttcgtgttccgccagggtctcgatggagccgccccatcccacgccaggtcctgagggcacaaggtggccactgggccatgaaggccagaacagaggcagcagggtgggcgggcagacacaggagccaggagggaagccccctcccccaaggagccagtgggcccccagggacccttctccctcacctttgccatgggagctgggtgcccccaggggccctgggcgccg

SEQ ID NO: 47093 - DNA, 643 bp, Bovine  19866880854880
  misc_feature (1)..(1): n is a, c, g, or t
ntaggactgtgaggagtgcatccagctggaagccaaccttcagtaagtgtcttcctgtgctactccgctgccccctgtctggccagagggttgagaagagagagcatactctgcctgtgtgtctttggaggttataacgttttgaagctagtgtcaggctgaggagtgatggtgttcagagcaggtgaaagcaggcggaagtgtgttctgggtgatgcctcacctctctccttttctgtctccagtcaagggttatacccggaaagcagctgccctggaggcgatgaaggactacacgaaagccatggatgtctaccagaaagcactcgacctggactctaactgcaaggtggggctgccctggccttcagggatctctgccctgcttccctttctctgattcttccctctcgccctccccctcaatgactcctgttaccttggacctgctgcagcagtgagccaggtagtgctaacgctctccccttctggccctgccggaatgcaggaggccgcagatggttaccagcgctgcgtgatggcccagtataaccgacacgacagccccgaggatgtgaagcggcgggccatggccgaccccggaggtgcagcaaataatgagcgacccggccatgcggctcat

SEQ ID NO: 47094 - DNA, 1547 bp, Bovine  19866880905956
  misc_feature (1)..(1): n is a, c, g, or t
nttcacccgccctcctcacgtacccaggagccttctctgcacccgctcgtcctgagcaactgtcctctcaactgccggcagtcaagaagccagtggagcgtgctgggtaggagagctctgggaaggctggtgagcattgacaggtggagggcctggacgcacccccatcatgaactgtgaccctccgcctgaggaacccctgcaatcccctaacacttcactgcagaggggcggtgggcttgtatgaagaggtagatggatgcctccccaacaaaggaggccagcagagcctgtgaccgaggcgaagccgaaaacaaggtggctgactgtcgttcggctgtctgagctgcaagtctcaccccgaggatgagagaccgggactgcagcccaggtcgcacagggagtccacgcgcctcccagcagccacggcagagccagcgcctgcctggaagtctggtgggtgagaactgaccacagtgaaagctgagccaccctccagctcacaccccttcatgcacagaagccaccgtgccaggagcacccctcagatctcctgtcttctgagtcacttgaaatgctgggctcctcttcaaacacagtggattctatggagcaaccagagctttagaagtttccacactacttcatccctgggcatccactcgcccagggcctggtctctgtctcaatctccaattactgttgcctgttcagcacactttcactgagcgcccaccgctgaagcccgtttacaaagtcaagagagatttggcttctgcctccaagggactgagaggagcgggaccgtacacgagactcatgatgtgcctgtggacggcacggcagagctcaggaggcgccaggcctgctgggagccctgctttgctccttaccagctcagaccaccaccagtgagaacacttggagccgccagatctctagacatgaggactctagctgctcccacttcacaggattagtgtgaagaggaaatgagaaaatccaagccagtgttgaccatggagcctggtgcgcagcaaggtctccgccatgttttctgtgatctctcttcactttcaggtaggaacttttgttttccaactacaggggttctctaagctctgagaagagctataatctctaagaacttgattacaagtgcggcaaagctgatattccttctagaatgaggaaaagttaaattcctaccatggcaaggctgtcagacaaaaaggaccctccttcctaacataaaaccactcctgccaggagaagtgggtgaataagaaggcagccacgcctctgccctcagagcagcccagaagaggaggaaggtgtgcccgctcttcccatccttgtcagctccttaaccccttcctttccaaagaggcccaagagacagccgacataccagtgccacacggtgccacgggctatgggaagctcacactgccagcctcacgctccattcggctcctcccgtaccagtgggttactgtaaccatggagaccagcaagttcctccatatcacaggagagccagcctg

SEQ ID NO: 47095 - DNA, 1639 bp, Bovine  19866880965177
  misc_feature (1)..(1): n is a, c, g, or t
ncctcgagtgtctccagctgcacctgcacacttggtgggaaatctgattacaggtgagcacagttatttgtcaggtaggagaaggctgtctttctaactggcttcagccatcattttcctctggtagagtttgtcatgataagcatcataatgcttcctctggatggactgaacttaatactcacttagcatcccacttttattcttttccctcatgtctttgtatgtttgacctattgaatcctgcctcttgcatggacagctaccacccaccgagactcctttgccctctgcccacctacagagccacaaacactgcaatttttattttgttcacatatagcacacattcacttgtcacatagtaatggttaaaatgtagccatatcttattttctagatcaggaatcaaaggcatagggaatttattgaaagtcacataagtacttggtgttacacctggtactcacatgatctcaccttttccaaatacatcacatgttgtgtacctattgtatgtacttacatgtacatatgttactgtctatattcacgcatgctaagtcgcttcagtcatgtctaactctttgcaaccctttgggttgtagcctgccaggtttccctgtccatgggattctccaggaaagaatactggagtgggttgctgtgtcctccttcagggatcttcccgacccagggattgaacccacatctcttatctctcctacattggcagctgggttctttaccactagcaccacctgtttactgatggcagtgggggaatctccagaacaggagcaggagccattgggcagcgacaaggaaggtgttaactgtcttgctcatgaagccatcatggctcagcagacctaattcagcaagagatcactgtgcagaacccgctggtctgggtcctacacagatagtgcactgaggataacaacgtctgtcaacagaaggtcaaggaccgccacagaaagtactcctacatccgcaagaccagggctggtggaaactgcctctatcgcgcttttggattctcccacttggaggcgttgctggatgacagcaaggaatcgcagcggttcaaggctgtgtctgccaagagtgaagaggacctggtgtcccagggcttccctgagctcacaactgaggatttccaccacacgttcatgggcctgaacgagcgggtggagacgcagacctcagtggccaacctgctggtctccttcagtgaccagagtaccttggaccacctggtgatctacctgcggctgcttccctcgggcgacctgcagcggaacagcaagttcttggagcactgcatccagggtgggcggaccatcagggaactctgccagcaggaggtggagcccgcgccgaaggggggcggccacatcctcatcctggctctggcttctccagctgggtagagggcatgggccgcggcgagggcggtaccacgaccccccccgagggctccagcccaaggtctgccttctctgcctacctggacaccaggacaccctctatgaataggcctgccctcccctctgccaggcgctaaacgcgtacagaggggtttttgggtcataaagatcatatttcactgccccacccccttcccgtcacacga

SEQ ID NO: 47096 - DNA, 1610 bp, Bovine  19866881037958
  misc_feature (1)..(1): n is a, c, g, or t
ncccccggaaggggctctttcctttgagctgtaaggggtaaatcagtacccctttacagctaatctttcttctgtctcttcattttgttttctcttgaacttcatgtcagcagaggcatacacgcagcgtgtaaggtccttttactcgacgtctgcgggatccacccacattactgtgtgccagcggtttgcttttcctcgttgctgggtggcatcccgtggtgtggcacagttttacgtgcagtcttcttgtagccacttggtttccagtttgggacatttgggagtaaagttgctctgaatatccttgcacgtgtctttgatggacacatgctcgcctttctgtgggggatatacctacaagggcggctaaactcttgtctgtgcctgagatgatcctctctcaaagactggcacatagtaaccaaactcacaggagactaatgcatagttcagagggttgaggtgctgttcatggtgggaaatagaatagtagcggatctggaaactcatgtgcgcctgggcagggcctccactccctgtggaaaagccattgttgttcggtcgctaagtcgtgtccaactctttgcgaccccgtggactgcatcgcgccaggcttccctgtccgtcactgtcacctggagtttgttcaaattcatgtccattgagttggtgatcgctagctagcgatctcatcctctgccaccctcttctcctgccctcaatctttcccagcataactgtcttttccagtgagttggctctggaactcactggaattaaccatcaggtggccaaagctgagcttcagcttcagcatccatccttccaatgcatatccaggtttgatttcctttaggattgactggttggatctcctcgcaattcaaaggattctcaagagtcttctccagcaccacaatgttagaagccaagttgtagtctgaagtttgttcagcagcatgtgctctcaactagggagatggtggagtgacttggaagcggatcccgttgtcctgagcacacccacccaccttcctcgggcagttgctcagtgtttcagcccaaacgcagagctgagtgcctgctctgggccccaagggcagcagcctcagttcatggtccagtgggtcctctggacagatggccacatttggcctgggctctgtgcattcctttgttctggctttagactgacagcccacgtgtatggacctgttttctctctaaataagtaaataccatcaggctggatcttccacccaggagacattcagtctttttgagagatctctgcagtatctaatttcactggccatgggttaattcttttagcctaatttcctcagttctaggatgcctcattatccccaccccaggttatgccttttcattagaaagagtgtggaaacagtcctgctataaggtgtgtcagtgtgagggggacttaaggtcaggcagtgggggctttgtcatcacaggaggggcctggcctccagaagaagggcaggtcccttctggcctgcagtaggggtggagccgtgtgctaaaaagagaacggacttttggggtcatcagacacggcaagccccagcaccactgcgtccatg

SEQ ID NO: 47097 - DNA, 1239 bp, Bovine  19866881046940
  misc_feature (1)..(1): n is a, c, g, or t
ncggccatggccgaacccccacctctgcacacctccactgtggggtgaggtccaggggccggcttctgctgggacccaggcttggcaagaggcagagccagcttgggagacccatccaggccagaggacacctttccttgctgggcttccccacggtgaggagctgctgtttctgcacctgcatctccacttcccttctcatgggctcttgcctttctccttgcttccttccctctttcccttcactctttgctccatttcacttcccacccccaacccctcttcttacataataccccttaccgacctgccagacatgcctgcacctggagtcagtctgggctggggaggaccagaacacctgggtcctaaaaatggcccggggcgggggagacacttctgatccttgaccctgattctgctttcagagcccttaacgtgcctcaccacccctgaccttcatttcctataccctctgaggccaggaagagaggggtcaatcccagttcgtttctgagtcaggagcctccaggggttctgtattcatcactccagcttataaagggatctggcatttattttgattcttgttatgggtgtgttcacttggatgtctgactgaatgttttatggcaaggaatgggcttaagaattgaggagatattgttctgggatcaagagagagctgagcccagggctctggatctggggaggaaccccccctggggggtagtgagggtctgtctacaaagagctagtgtgtgggggctgtgggcactcaggcctgcaaccttgctggattgtggaggatgttttatcctctcgtgattctagatctaccagaaggtttctgccatggcttctgatgctgcagagggtctgcacatgtagttttaaccacaggggtagaactgcatgggtggcttttcacatgggatgattattttgtttgggtctggattagctaaccattattaatggttggttggttttttttcccctctagaatgcaggtttgtgggaattgtacagaagattcttggtcatttagtgttttactgggccagtgaatgtctgggtccaggaggcatagagaggaccatgctgggtgtgggcagatggttccaggcctgggcctttgggtggtggccacttaggcctgtgcattttgtgtctggtcagaggcagtcttgccttgggcttcaggggtgttccccaccctgccaccccacagtgtta

SEQ ID NO: 47098 - DNA, 784 bp, Bovine  19866881096851
  misc_feature (1)..(1): n is a, c, g, or t
ngtggactggccctttaagagccgaaaaaaggggaggagctgggagtctttaaaaacaaaaggggatggggaatttctgggaggggagctcggggattaggggtgaagctccagagcctggacgcaagcttcagggctcttaagccgttgaccccgcatagagaaacagcctcctttgagagcaaacggggaggactggctggtcccgctatagctgacaaactgtggcaaaatttctgaaaagatgggaggggtaacgcgcggatagaaggggagtgaatgacattgtgggcgagcccatctctttaaaaactgcccgcccgtggggaaggtactgataggtccccaagaggcgcaagctatgctctcttccagggagaacataggggaaaaagaaaaagggtgcccttctctagagaggccccagagaagacagcccaacttaaagcagcggagtccccagctcagttcctctggagggaagccccggaaaggaacccacggtctgggcagactttttaagagacagctggttaagggagaccacctgggagtctgaaagagaaagggacgggggacgcaagtcccaacagcctagagcgcgcaccccgcggcgccaggccaggtccttcggggcccctccagctctgcctccgaggcgggggccgcggggccctttaagggggaggggatccgcccgagccccgcgggccaaccccgggagctgggcggggggctccgccgctggcgctgcagccacaatccgcgcccaccaggtggcgcc

SEQ ID NO: 47099 - DNA, 608 bp, Bovine  19866881124839
  misc_feature (1)..(1): n is a, c, g, or t
nctcctccccccaggaagcatctctcctgtctggagccaactgcattccagggctgggccagggtaggcagcacagggcaagcccactcctccaccctggcccccggggcctgagtcaccacttgagcaaggaaggagtcacagggtggagaaccagaacccagagagtgggctagcttgccccccatgccaagatggactccagattagcccattagaaacaggcaagacacataaaccccaacaactgggttggctagtgccttaaactggtataggctcgcaagccataggtagctctccttccccagccagcctagactagccccaggtctcttgtccaaggcagcgaataagaaagaagtgacttaggtcagacaagaaagagcatacattgggggcggggagtacagagagcaagggagcgcgcttaagctggatgcccactgacgccgggtgacaggcgggctcaaggtggggtttccaggaggcccgaatcggaacaggtttagggtgtcggcgcagggtgggggacacacctggcagtcgtagaggcgagtgagctgctccaggatccactcttccaggttgaggcgcttccgtagctc

SEQ ID NO: 47100 - DNA, 2117 bp, Bovine  19866881137571
  misc_feature (1)..(1): n is a, c, g, or t
ntttctcgaaccccaccttcctgtgatccgtgatccaggaggaggctgggattattccctgccatctcccttctcttttcaaacccagataacaaacagctggccgcgcgaagcacccttccaggcagttctctagctttctctttttctgggtgggggccgggggtgggaggactaggaagagaaaaaatgaggttccgtgagctcctggccatgtgggggccgcccgcctggcccagcactggctccgcttcccccagcacctgctcctcttgctaaatgtcattcagaggatccaactgggcctccagggcctcggcttccagaataagcgctgcctttccccgccagtgggaagcaggagcgtcagggaaccagaagagccggcctccgggcctccctctgaggccaggccccgtgctgcactcccagctgccctccgcggctgccttccccttccacggagacctgggggcagggccggctgctcccccagatcccaaacgaccccgagccggccggatcgcctctcattagtgtggcgtgctgaaggcccacgctgccctggcgtccgtattccccctgcaggagcccctctttggaagagggcttttattacacatctgagagcgctagccctggtttgaaatcggatccagatgggctcggctgcctctgggtccttgcctttgtagggccgaaggtggctgctttgagaaacacgtgttgtctggggttgtcgcaaataaaaaccaggatatttgggtctagagccaagtctagagcccagactgggggagggggtctgggcactcaccgggcaccccacctggcaccccaccttccatgtggaagaggggcaggtgctggccaggtggagggcgggcagagactgatggctggatgggaggagtggagaggccgcgtgggacaagcttccccaggagcaaggagggttaagaaacagcgaggtttaagaacccacaggacgtcaaccctggatggccaggatctggtaaatactcatggtgtgagcaggcaggtggggggcagcccccctggcaaggggtcgggtgggggctggacaggagggaagatgaagacaaagtccccacgtaaggggtgactgctgggctccagctcggctcttattgctattacacccgcgtgatttcatccaattataaattgtaatttctctatgaaagcgagagatggaaagagtccaatgaggtcatccgcctccctggccggggtgaggaaattgttttctaccttgggggggggtggtgggagcagaggcggctgggcctccgtatttagaaagggtggtgacagcgtcctctggacccagagccatggctggctgatccccccacaacagagctctgctctcgaaattatgaacccgggaaggcagctgcgtttggctggctcagacccttcccagagccctcaggataaaggcgacattgccgtggcagcctccaaggccccacaaagcctggccccctggcctccacccccaccatctcccctaactcctcaagctggcctccgcccctccccatgctgctctcctttctgcaagagtccgtccaccgtcacccctcacctcctctccgcctgcggggttgaacaaaccatgatggcaatgacgtcatgtctcgcaaggaattatcttcctggttcaaggaagagaccacatctgctcatcggaggctaatctcctagcgcctgagtcagtgccttgcacacagtaggtccttaataaatacactttctcactgagagaatcaagagtccgagcaaggctctcagcaggccgtccagccttgtgcattcggggtcccttctccctgcctcccctgtccctgtgtgtggtcctcctgggagccgggcagcaatgccgggcccaggccccctggggatatgggctccttgagtgcttccgggtgatgggcgcctctcgagggtcggggagggtgtgtgcaccgagggcagcctggacgtggtgcttgcaaggtgagagcgctttgttaccgtgcggtgcgtggtaacgattactgcggccgcctgcatgtgctgggcccaggaacacaccctgaacgagctct

SEQ ID NO: 47101 - DNA, 678 bp, Bovine  19866881316603
  misc_feature (1)..(1): n is a, c, g, or t
nagagggaggtgggtaagtggggaggaagcccataggtgagccaactaggcccctggggccccacccaccatgaactcctcaaagggttaaagttcaccccgctggagagagcagcccagtgtggctgggggctgtaggttttagcgatgtctgttacagtccctttaactttttgtcctgctacggatttatcacatctggttatcagcatgtttagtccccgctggccttgtgggggctggaagggacattgggggttttagttggggccggccccagtggacatttaaaagcacagttatcagctggttaggtggaggtttaacagcgctacttcccccctagagtttagccttagaggtacagagctcgccccctctccaaagggaatgggatggctttgcccttggccccaacttcccttggtgacaagtggccttctccctcctccctcacacccagcagcgcctcttagccagctgttctgtcttcctcatcagctcagcgggcacagaaatcctcctgggatgccacctctcccccacctcctagtctccccccaacctccactgcgtctgagaccttctagacccaggtgggccccttccagagacagtggccgcacagacactcttcatctttccagtgggatctgaagcaccccaatcctccctttt

SEQ ID NO: 47102 - DNA, 694 bp, Bovine  19866881402724
  misc_feature (1)..(1): n is a, c, g, or t
nttggccccgcgaggccttgtggtgggctgcaactcctgtggctttcctgtcctctggcccagtgcctgccccgagcgccccccaccgagccctgcttctgggctgggggcagggtgcctttgcctgttccccctgggccaggggctgcccccacactgcacgtatcatctcgtttctgaggctggtactcgtgttcccccagcttacagacgaggagactgaggcacgcaaggggtgcagtgcttggtaaaaaggccgagccaggaagaaccctcatctttcgatcttggggtttgagagggacgtcattgaacttgcattttcagaagctccctttgggtccagtctgggggtgaggggccgagtggcccacagagaggcgtgggctgcaggtagccccctctcccacattagaaagcccaggacaccggagacagtgccaaggcctgatttccaccactgcaggaggagacggctcgtttccacaaggtcgagaagcggttacgtaaattcataaatgatggatctctgctgaattattgagattccctcgagggctcgtggggcctggtccagtgagtcgagctctggccaacgggcgggacttgaggatcccggcaggtcctttccccccaagctcttctgccaagtttccctttgacggtcagattgttcctgtccttccagagggaa

SEQ ID NO: 47103 - DNA, 961 bp, Bovine  19866881420287
  misc_feature (1)..(1): n is a, c, g, or t
ncccttacccgggctgctgatggaggagctgatggaggagctggtcggggaggtggcggggcctgggggccggcgcggggaggcgtccagcgggctgggcgtcgggtgtgggttcagctggcaccccagctgctgagtctgggtctcctggctcgtctccgggccagactgagcctgcaagggtgaggtggaggaagtagaatgctctatgctccttccagaaatgctactctctccagacccttcttttattttttttaaatattttggggggagggagccacaccgtgaggcttgtggaggaccttagttctccaaccagggatcgaacccaggcccttggcagtgcaagtgcagagtcctaaccactggaccaccagggaactccccctctctagacccttccatccttcacaacctccttcagcctgtggccctggactcctctcgtctgtcacgtgggggctgtgagaataactctatgagaacaagacatgcatttctaaccccctttggcacgtggggtctggggaagagaacgtgaggtcatgtctctaggatgtgaggcctcactgcatatggttaggaacttctagattgttctggaaagccctggcccagccccaagttccctcctgtctctgagtcccccctccacccttgcccacagctgctcatcttcctcgatgcttagctcctgattaaatcaacgaaggaagtgaccgcagagggggcactagtctctcccgctaataactccagacagccagctttcttccctgctgccgcaggcccccaggggaccgggcctagatgtgtggccagcctctgctcctgacccctccccgcagaagccacggcccgtctcatggctcccaggaccatgcttgaaaagcttttagggcttccaactgccctggtgaagcggctgaactcctcaccctggctttgagcctgccgg

SEQ ID NO: 47104 - DNA, 1200 bp, Bovine  19866881476244
  misc_feature (1)..(1): n is a, c, g, or t
ncgagtccgactctttgtgaccccatggactgcagctcgccaggcctccctgtccttcaccatctctcacagtttgctcaaacccacatccgttaagtcaatgatgccatccaaccagctcatcctctgtcgcctccttctcctcctgccctcaatctttcccagcatcagggtcttttccacctgggaccaggcaaagactccttaagacaaagtcagtttaagcaacttcctgaagagcggatcaaaaagcgagggtcaggtttgattgggactcgatctggaaataaaactcaaaattaggaaaacattaattttatgctatattttagcacatgtgggttataatggcaaatatgtgctgcatcttagagcaaagaatgcatcaaatgcctctctctgtattttttgcttttctttttctgatgataaattagaaggagtgcccgggggccagtgagtgtccagggctgttctttcaaaagccatcaaggcttcctcagttctcccaggggctgctctgcaccctttgtcattcaaatcacagactgtgaggcggccaccctcctgggttttcttggctttgactgttaacccagttattactggctaagactctaggtgcttgtgcccgcaagtcagcccagcttttctcccagtcttgttcacaagcttcaggaagcacctgtttctgcaggaattgcagcttttctctgcagctggcacctgaatgaagcctcttgggggcagcaatcaggcgctgctgaaggggagggctggggactgtccaggtgaagagcggggtggggtggattggaaaagtggtcaagaattatttacctgcatggccacttgtggagccagagtcaatctccaaggggcagaaattcagctactgaaggtggctcagcagtaaagaatccacctgccaatctaggagatatgggttccattcctgggctgggaagatcctctggagaaggcaacccattgcaggattcttgcctggagaatcccatggacagaggatcctggcggagaggtggacacaacttagcagctaaacaataacgacattcagctactcagaagccaccctcctgagtaggggcaggggacaccctctgggtggcagactctgagatgggaggtctgggagcatgaagttcatggagagagctccaggggtcgcctcctgtg

SEQ ID NO: 47105 - DNA, 1448 bp, Bovine  19866881735113
  misc_feature (1)..(1): n is a, c, g, or t
nacacccggcacacgaactacacccaaccgagtgtgtacacatgctcacacacatacgtgtttggtcacaggcaatgaatgaacagccagcatacacacggacacccccacctccaggtcaccctccaagaacagggtcacccatatgcaaacaatgcacccggagcctcagaggtgctcagagttaagacaccacacacacagtccctccacacctcctcagacgggtgcttcccccacccgcggcaaccctcctggacacctccaatccttccagtccacttcctctgcccctccccccatatgccaacctccccgtcttgggtggggagggggcgattccaggataactatccactgagtgttccacttgggacaaaaccctttctgagccatttatgtcctgctgaggaagccattctccttctagggggcctctccactgagacctgcccctcagacttggcggcacttctgggaagtaagagcaaggaggctttcatcccttcatctggatgccacctctgcactgacatcaacctgagttctgcttggacggggtcttgctgggggtggcggtaggggtgtggggaggccgaatgtagatgaggaagagagggagggagggaatgatgaacctggaaggagacagacaaggagaggcgaagaaagggcaaaaggggagaggggcagggcaggggctggcttctgcttattatccagcattccgttttggagcaaaacctgtcaccaggagccctgaaagagcttcacccagctcctggatgcattcaggacccgagacagctcctctgccccagctgccaccttccccaacttattagatgccaatgccccatttggtccccagcctttcagagggaagaaaggagtcctcagaggcacccagaaagaagtgtccaggtggtgtgtggccccatgagggaggagagtttgcaagctagggagcacggcttcctgccctctcttcctgtgcccgctcttggccctggctctgggatagagactgacagagctctgagcaggcagaaaatgtatggtcccggagggagggagggaggagccggtggcgagaggagaggaagggaaaccgcctagaggccaatcaatactagtgagtgggaagtggagagagccggagggggtgacactggcgagcgaggtggggatagagagggtaaaaaagaagggagagacagaggtgtgcgggagatcaatagaggctgcggagaccagcagagcggctagggagatgagaaacagacaagggcagagatggggaagaacccattgcctgggagagcccgcggacaggcttcgggaggtggagctggagctgcccagggaagcgctgtccagacctcagccctggggcttcaggccctgccaggaagcaggcctccgtccagcttccttcctctctcatt

SEQ ID NO: 47106 - DNA, 2119 bp, Bovine  19866880169248
  misc_feature (1)..(1): n is a, c, g, or t
nagcagagacattactttgccaacaaaggtccgtctagtcaaggctatggtttttccagtggtcatgtatggatgtgagagttggactgtgaagaaagctgagcgctgaagaattgatgcttttgaactgtggtgttggagaagactcttgagagtcccctggactgcaaggagatccaaccagtccattctaaaggagatcagccctgggtgttctttggaaggactgatgctgaggctgaaactccaatactttggccacctcatacgaagagttgactcattggaaaagactctgatgctgggagggattgggggcaggaggagaaggggacgacagatgatgagatggctggatggcatcaccgcgatggacgtgagtttgagtgaactccaggagttggtgatggacagggaggcctggcgtgctgcaattcatggggtcgcaaagagtcggacaggactgagcgactgaactgaagttgggacagcagcctggactttgagtcaggatacttagggatttagacactggcagggtcgcagtgtcccacctgtagaattgagcttctgtcgtggacccatgccaaatgctggggtccagctgtcctcagtccttttatcattaagaatcctcacgggtcaccaggttttgaatattttggccgctggacaaaagttcctcggttttaagtcactaactcgtttccccctttcatactgatccaaagcctgatagccagttagcttccagtcagcaaatgtcaataactaacgtggtgggtcggaattgctgtaattctggccaaaggtaaaacaaaaccttggagttgattagtctgtgttacctagtcagagttaaaaggtactatattttccttacttagttaggtcttttggaaaactggcaatagccctggagggtaaattagcagtgtcattttgtcagtatgtatgagatatcttaaaatgtgcttactcttatgacccagcaattccacttctttagtaatgcatcctaaaaaaaccactatgcggacaaaaatatatatactaggatgggtgggaaaatgttgtttgtaacaacagaaaactggaagtcacttaaatgcccagtggtagagaattagctaggaaaattatggtacaaccatttgaaggaataatatgaaagcatgtaatatgatgtaaaaaagccattaattttgggaaacacgtagtatattgccgagaggaaaaaagcaggccataaaactgtataatacggtctatttaggtataatcagggaagcctggcgtgctgcaatccatggggtcacaactgaacccatgactaagcgactgaacaacaacaaaatataagactggaaggataaacaatcgaaaggtagttgtggtttttatctctgggtgatgggaccaaaggtaattcattcaacaaatatttattaagcacctaagctgtaagaggtactggatcactaaggttaaaggggtgaatgggatcaaaagggtgattttaaaaattcccttatacttttctgcttttcccaagttttctgctcgagcatgcatgtgttactatgtaaattagaaaaaaaaaaaaagtgctattaaaaaccacaatgttagttagaaaccttaggccccattactaccactgaggactcaggaatccaggcccaaagccaaaaaccagggtattgtcagggttctgaggtcacctctagctctctgacattctaagaattctgaggaaagagaaatgctggacttagatcagggaaaaacaacttgaagggcttggtggaggcaagagagtttgggtcagactgtaccttggacaggtcacagaggaactggtgataccatataggtggagcactggttacactgcctcaggtgaacgtcggacagtccacacacagagctgcagggtgaaaggggacaggtcatctcatgataactggcatcaccatgagcccaggtgatgagaacagagcataacccctgggggcacagtcggtatgaagggtgtctggggtgtcctgccagtgtgagtgtaccttaggtggatggaagaggagatgggaatagagtcaactgtgagctcaggtgg

SEQ ID NO: 47107 - DNA, 2161 bp, Bovine  19866880345620
  misc_feature (1)..(1): n is a, c, g, or t
naacttcagctgaagatgttaagatagcaaaagatggtgactggagttaaacccaggcaaagtgagatgttccatcaaagacttgtacagacattaccagaaccagagagagatctgggggagatgtcagcagtctggtagttgaaatcatgaggttgaaagaactctccaaggagaaagatgaatggagggaggaacatggaagtcaggggcaggagaaggtttagatactcaattgcccctttttaacagatcaacccatcctctaacaccccctgccccccaacaacagcctcaagtaactactggagcatgactccatgagacttgttagaataaagtgtggccagtatttcatccggagaaggcagtggcaacccactccagtactctcgcctggaaaatcccatgggtggaggagcctggtaggctgcagtctgtggggttgcacagagtcggacacaactgaagcgacttagcagcagcagcagcagcagtgtttcatcattcatcctgttaggttttgtaccatagaagttaattagaaattagggattgaggccggactacagattatggattgacagagaaagtgagaattctctgcaaacgcagtagcttgaaggtccctagaagaagagaatcagggagctctgaagggatggagcagcactgccccttctcccagtgggttgttgaccagaaaggagagagggccctcctggtggttccttcttatgtttctaggttcttggcctggtttaaggacagcagggtggtggaagacaagggggaggccctgggagggtgtctttggtgtccgtgactttttccctttctgtactgctcattggcgtctctgctctgtcacaagcctccactgtcattcgtatacgaaaagtcctctttctgagtggtaagcactttcggttgttgtccctttacctctagtcttactcctttttcctcttctctggctcactgcttcatagaagagtctgcaaatgcaaccttgggttgaggcggtgctgcctgcaataccgggagatgacattcctgggacaaaggagccttttgaggctgaatcccagcctcccgtttcctccttgggtgtctgctgtactgattgacaagggcagactggctgttctatcttgacatggaggagcatcacctgtggcaactcggagttgagcagtagtgttcccaaggacaacggaccttcccttccctgtcactcagtactctccccattttgcttgctttcaccattatgttacatgtaagcacacagttggcttttattatgcaaacaaaattaatgcttcatctctaaagggggtagatgaaggaaacctgtgggtgtggccagtgctctagactctctgggcaagctgttggtgatctttatcctagattttccagaagcctctgctgacttggctgtataacctttcacataagcatcccatttcctgtagccggatggctctttcatctggttgtgtttccatggtttccacactgacttatttcatacttctccgagagttcattttccagtgtttcagctctgctctggcgctgttcagtttacctcaggattctgttacactatggctgctcaactgctctttctgttagcttgggcccactttgattttccctgtctctgtgtggctgtcagtaacccatgtatgtcatgtatgactgctcatctctgcatttaagtccatctgaggaaatggctcagctactaggattagtaaagccctggaagataaagcgtaaagtaaagcatcatccctctcgtgtcctgggccgtttccccactagtcagccttagcgcccatatccttttctcctcttcttcaccagtagcccgtatctcacttgcacttccaaaagtcagcacaggaagactgtgggccttatctgggtgtctgacttagcctctaaaggaagatttgggtcaggcttttagcagaatactcactgctagggagagatgactgtggggaggtgctgggaaatcactcctcttctaagacacctgatagcaccatccaactggatccgcctgagctcaggaagctcagaccccgcctctctccccgcaaccagagcatgagaaagacagactgtgtaagagtgctgacta

SEQ ID NO: 47108 - DNA, 1915 bp, Bovine  19866880354604
  misc_feature (1)..(1): n is a, c, g, or t
ngtattgccccgttcttaaagaactccgctctagtgaatttagggggcaggggcaggggcgggaagacaagtacgtgtgaaaagtatattgattccacaagaggaatagtgtaaggctgggcagaggtttttaaaacagaggaaacaggtaaaaaggggaaacagcaagaggagggtggaggtgggggcaggagaggggcgtgcagggctgggccccaggacttctacctgccacctgccaagtcagctctgcttttatcaattttatatgaggctttaaatgaaatttctttcaaaaggggaattctgctgatgtttaaaacataaaagagttgaaaactgatttaaagaaagaactcatgttgacctggtttcaaatctcagttttaccacttactcctcagtgtgttcttagactgagctacttagactgagctacttaattcttgtgagctcccatttttattaatctataaaatgggagtgatgatagcatctatttcgttgagctaacgaagtggctgagatgtatgtgacatacttagaatactgcctgacatttattaaaggctcatgagcagagatgcagtgttaacacaatagtatttttataagattttacctcagtggaaaatgggggcaggcagaacagggagagactggaagctgggtacagatggtctgatagtttatggcagggggatgggctggaattatagcagagaacttagaggaagaatgggcttggctagatattggaaggaagctgtgacaggacttggtgattgtcaggatggcgaagggcaagagaaggggaggggtttggagacctggctgataaaaggatagtgttgaccgctgctgttataatgctaccattcactcagcctttctaaagtcaactttgttgaggtataatatgcataaaataagataacactctaagagtacaatttgatgagttttgaccaataagtacacctgtgtaactactgtcccagttatgatacagaacagaaagtttcttcagtaaatccccaccctgttcaccaagcatattgagtacattctttgtgccacatactatgctagttgttggaaccccagtgagataaatgaggcatagtcctagctggtgagaagctcagatcagtctagatagcaaacctataatttggcagttacaattcaaacttaagtgctaccaagggaataagcattgggtgctgagaatcgcataacccagacctggaaagagcacctgggagggctttctgtaggaggtgatatactgactgacacctgaaggatgatagaacttatctgtggggagggaaggcattcgtgacagggaagggagcgacagacattttaggcagaggttacagtatgttcagagacttgggttctagagagagctggcatgcttcaggaactggatacggtaattcagtgtgattaacactttaagagtgtaggggaagagatgagtgagaggtgaagacagagaagcaggatagagctagatcatacaggaggttttaagccatatttaggattttggactctatcctgaggccgttgagaaccattgaacagcaacccaggttaaacaagggattaacatgaccacatttttaatatagaaaaaccacttactctggctaccatatagagaataggttggaggaagaccagattggagactattatagtaatccaagttggagatggtggtaatgagacctagacaggtacaagtgtgactataaagaaatggataaattccagagaagttttagagatgaaattaacagggattagtgggttaaatggatatgaatagataggaagaaggaagacttgaagatgatgctcagtattgaacaagagggtaagattactgtgtatacta

SEQ ID NO: 47109 - DNA, 3008 bp, Bovine  19866880480037
  misc_feature (1)..(1): n is a, c, g, or t
ncatcagagaaaaggaagaacattcggggccgaggctcccctcggggaggcaccaccaatagccatccctggcgtaggaaccagcgacctgagaggtgggagacccattattctggtacagcttcaggactacaacccacaaaatgaaagggaggctgagaaaataggaggcaggtggtatgtgcatggcagtagggaggatgggggtgagaaaagggcagtttgcaggttgaggggaagcacacccatggactacctgagataagcccctttgcttgccgtccactgagcagagcctggatgcgctggagatgctgttcattcttctgtttctgaccaatggtgtggactctctgggcagtctcacttatcagctgggcagcccctagaatgatattccacaccccactcccagcacaactttgactttgggtgaatggtggtgaaagacaggctaatccagacatgactagggtcagagtctaatttcttcaagagtagaggcagggcaataggaacattgtatacacatcattggaagattggggcatatcatacatggttggaggtcagaaccagaaagggaacaggagcaatctccaagaaatgctgtggaagagcaagaacatacttgtgagctgtttgtgttcagggctgttgggacctgtgttttcagccaaagcaacagcgagattctcatacctgaaattagaagtctatgaggggaaagtagagctgggtacaatttcctctgcctgacacagatcaccccctgtacaaacttcagctggggaaccaggaaagacctgcctgtggctgttttatccccctcttccatctgggactcagatccgggttcactccatatggccctcttccatcccacactgaagagtcagggaggcagaccagatccaaggtgaaagttaatcaacccaaggaggatgctacaaacaactgactataagttcttaactcattcccagggacagaaattctaagcctttcatcttcagaaaccttatttactagccttatcacagacccctcacttcagcttaagttaaacaatcccagctaagggcctgaggctgcacagcccaaatactccagtgagttcacatttactcttgcagaaaattttgaggagcaatttgtcccaggagagagacagtgggacagatcccatgaaagcccacaaagattgagagcagccatcgtacagatgcagaattctaagagaagttggctgagtcggggtgagttcacgcactgctggagcctctgcagaggcagagggagcaggtcctggagctgaaggcccccgaactcagggcgaccttcctgaagtcgtacaaatctccggaaatgtttgttcttctttagttgctcctagaatgaggaggaaagggttggcagcagggagagaagccacctccttatactgcattcttctgtgtacacatcccaggccctcaggaagctgtatgctcctgagagaaccccgtctccctactggaaacttaacatagggctgggtacccacagggctctataaatgcaggaacaatatgaatgaagtttgggtctccagataaagaggaaatgtacaaaggacaaggggaaggacttgaagttatcaggttacctgcaagatggtccgggacctctcaacattggcagcaaattgggtgtagagctccaggtggttgcagaagccctccaacccctgtccccagcgccctccttcgaggtagggaagcagctctctgtgtgggtcaggacaataaaagagcagcccaagaactactcaagcaccacctctcttaattctcataaccctgctctggaggtagtacggccccattttgtgggaggagactcagtggatatgaatctgagcaaactcggaaatggtgaaggaaggggagcctggcgtgctgtagtccatggggtcgcaaagattcccacacgatttagcgactggacagcaagtggctggagaacttgggcagattaaggcactgggtcaagaccacagggggaggtaactggcagattctggatgcgaatctggatctcccctactctgagctctctgcactgccagaaaccaggtctccctcctcctctctccccacttcccttctactcactggctggcgccgtaaatgagttcccagggcccaaagagggcctggcgctctggtggtcgcagggtacctttggctctcaaaattgccacgaagtactgcggaaggagagaataccggtatgtggtccgcagaaagaggaggctggtgccaaggcgccgctaggtcaccgacctagtaggcaccctcccactccctggggtccccgcccccctacgggagactgtggggttcgcaccgtggccaccaagccccagctgttcctggtagcgccgctcggtctccagcagctcccgggcagtgcaggcgcgtttccgctcccaacgggcacgctgctcttgcaccgggcaccgggcaccgggggccgggctctccatgccagacttaggggttgccacttccggacgcagcccgccggagattcaaatccaaccggacccgggggcggggctgctggagtgggcccttgaggggagtacgccccctggcgcctggaggctgtgagcaggcgagggcgtgcgcagcggctcgctaaaccgcattaggtcggcgccagcgaggcgttgtaggtatgcggcccccgccagggccgggcagggtgcggcaagtgggtggccctcctttgagtggcactaagttggagcagagacattactttgccaacaaaggtccgtctagtcaaggctatggtttttccagtggtcatgtatggatgtgagagttggactgtgaagaaagctgagcgctgaagaattgatgcttttgaactgtggtgttggagaagactcttgagagtcccctggactgcaaggagatccaaccagtccattctaaaggagatcagccctgggtgtt

SEQ ID NO: 47110 - DNA, 2372 bp, Bovine  19866880493645
  misc_feature (1)..(1): n is a, c, g, or t
natcttgcggttaatgaccctgagggtggggactcacacttcaggagatagcccccatccttactagacggtccagaaggaggaaacaccttgttccatgtcttgcttgctgttggcctaacaaaggatcagtggacatgacctctctggttaagatgtgcttcttcctgaaactatattgtgtgcatgtctaacacctcccttattgtggacgcgagtgttcaatcagtggagaccagggaaggtgcacgaaccttcaccctgacacagaaccacagagagggcaccagaagtcaggtctcaagagctgccaagacaaaagtcaagcgagagcatccaaactcagtcaacagcagcagtcatggagggagcagggccaaagtgaggcaggttgagaaaccaggagggcccaaaatgagaagtggagtgagaagtgatctgaacgaagctagcgtggaagaccctcagctgattcctagattgtactagtacaggtgggctaagtttctacagaagcacctgagcttctgggtgaggcttgcaggctgaagatgcccaaagatcttggtctctgtggccatctctgtgggaatactccagcattcaagacagctccagcccacagttagctggcaccaatcaacatggaagcaaatgagcgctggacagatggcagggggcaggagtggaagcaaagaggccacttcggaggttactgtgacggcccagcagatggctgagggaaggtgctaagagtgaacagagaagtagatgtatccagggcatgctttaggaagagagtctcaagactttttctttatggattagttgtgtggaaataagggaaaaagaagaatcaagtatgacccctaaatgtggggctttgagcaactggtgactagctgtgccacttactgagaagattagagaatgaagaggcttagacttgggagaagtgaattaggaattaaagagattcctgacttcaggctttgtttggatatgtacttgataagtttgagataggtcttagacatcggagatgtcaagtaagccgctgagtataaaatctgagatacaaataaattagggctcacttaaaactcttggaagacatgaacttataggtggtatttaaaactactgtgctggagacacttagtaagagaatggagaaataaaaaggagttatcccaggaccaagctttgggtaccacaacacaaacagatcaagcagaggagaagccaggaaaggagacagaggagggggtggtgggcaggaagaaaaccaggatggttctataaagtcacaaaggacaagagaagaaaatatttcaagaggaaagaggtactaggtaatagctagttactagttaactctggagagggaacgtggagaccgaaaggggatgaagggaagaggaagacttacttttcactgtatgccttttgtaccttttgaatgttgtaccaggtgcatatattacctatttgaaatacaaataaaataacttaggaggaggaggaagaacagaaggaagacggttagcagatctgaaccccttcggttgagatgctgagtgagccacacttaagttcgagctggtggagtcaactgaatttgctccttttctttccttatggttgttttcattattttatctgctttcatttgctttcaaatcttggagctgggaagaggaagcattcaaggagaaccgtgccccaggcatttggagaacttctcctaataaggcatttgggtgccagatgttacccaaaacccaaaggccagcctttcaggacagactggctggacaccagaggatgaacacatgctccaacacaagacaggcaaggagatggaaggcagaggttaagacaaaagaggttgacggaaagaaggagaaatgatactggtttcagaaacacgagtttgagatggcagaagggcaacaaaaatttgccaagcccctactatgtgccaggctctgtgttgggtgctaggaacacagtaacaaagtaaaaataacacacacaaaggcccgcagaagtgtgggaccagagtccaggagagtagcctggaccaggtaagtcaccttccttttacaacatgttaaggctccctattgctctcaggataaagctctagcttctagacccttcctgatctgacccctgttcaccactccagccccctcactcaccctcacactgaaccacttcagccctcccttctcaccttcagcccatgctactcccagcacctggaatgaccccttccctgctttctcaaaatcagatctcacttcctaacagtttcttaaaacctaaaaccacctcttcaccacaccacccagctgagttataaa

SEQ ID NO: 47111 - DNA, 998 bp, Bovine  19866880502296
  misc_feature (1)..(1): n is a, c, g, or t
nacgtggctagctccacttctggatcaaatcaacattttctaagcatctacctaaaaggagagatctgcacttcttcaaggctttaaagagttaatcaaatcagatagtcttccttgaaataaatgactagctttataataaagtgtaaatagaacctacattcattatctggaaaccattattttcttactaaatttggaaggaaagttatgatcaacccagatagcatattaaaaagcagagaaattactttgtcaacaaaggtccatctagttaaggctatagtttttccagtagtcatgtatggatgcgagaggtggactataaagaaagctgaacaccgaagaattgatgcttttgaactgtggtgttggagaagactcctgagagtcccttggattgcaaggagatccaatcagtccatcctaaaggaaatcagtcctgggtgttcactgaaaggaccgatgttgaagctgaaactccaatattttggccccctgatgtgaagagctgactcatttgaaaagaccccgatgttgggaaagattgaaggcaggagaaggggacgacagaggatgagatggttaaatggcatcactgactcaatggacatgagtttgggtaaactccaggtgttggtgatggacagggaggcctggcgtgctgcggttcatggggtcacaaagagtcggacacgactgagagactgaactgaactgcactgaactgaaacattagctggtcccagtgtatcagaagtagattgctaaatcttttaacccaaagcaaattgtgaaaaacatctagctagggattcaaaaagatctaagactcaagctccaaagaaacaaatataaataacataaataaatggaagcagcctgactccaaacttgtaatctcatcagttctcaggggaatgtaattctcacaggtaacaaaatttaattatcaccaaggtgacctggaatatcaatgttagtaagaaagcttcatt

SEQ ID NO: 47112 - DNA, 1709 bp, Bovine  19866880572383
  misc_feature (1)..(1): n is a, c, g, or t
nctgggctacttggcattccagccttgtgccagtgtggaaaacagcctaagggtggctggggtggggcacagctagaggtcagcaggtcacctggtgggccagaggccatgatctgcaggaggcactttgggagccttaggagacaccgtgggtccaggtaagctagagggaaagtccagagcctgccatcagaagcctggtactggggagtggtgtcccttcctattggaagatgcagggttaatcacggtggtcagaagccagccagggactggtcagatgctgcggcacaaacccaaggctagtcttgttctacgtcttggttggtgatagccctgcagagtcttgtaggctgcagcccagtcattagtccctctgggagtacgtgttccttttctatcataatttcagcccctacaaccttatgaagagggtaagagaacactcagtgataggcaagcccttttcctgttaagaggaggctttgggcaactggtgtccaacctgactgttgccctcctttctcccaaatatcagtgattgcatagatcagagcttcttaaagtctccagtattgtggggtcaaggtcaggttgcttctctgttgtggtttgaagggaaggaaatgctgctgagttttcctgccactctcagatactgggcaggctggccctcttcatcacagggagaggatttcttattcctgtctgttagcaggaagggagattgggacacggtggccatgtcagagtgggatggccaggtgtgtggtgccagcggtaacggcagaagcacaagcgtgagctgagcaggatttaaagaacaggacacagagaacaagaaagtgagtggggtttggcctctgagaactgggaggagcagaaatccccagtcaggtgaggatttgaccagctgtctctctccagggtgagttccttgaggacaggcgctctggactgtcagactccccttcccctcctgctgaggcccagcgttcagaggtgttacagtgcttttgaatgagctgagaattacacagggacaagtgtgctggccatactgttgccagagatgggaatgcaggctgatgggaactcaggctgagccctcagtgataggttttcctgtgagtgaaggatgggagaacttcctctccaggcctggaagccctctgggtgagaacatgctgggaacttgcccagaagtggctctgggctctaggttcttgattcccttcagatccaaggtctcttatattaggaggaatatcttcttaggtctttggccaaatcccagagagcttgtttgtgatcccagctgtgatccttgactctgtctgtgagatgagaaaatcttttgggagccatgctatagttacccaacaacctttctgattaaaccagaggaacctggcgcctaggcctgggctgcaattgtgggagctgaagcctggttaggcgagatcagaaccaggcctgatgtgcccacgtgcatctagagacagctagtggggcctgaggaacttggtactgcaagcccggagtcctagccaggagagatctctgggtgtggtgagagagagaacgggcacagttacgccttaccccgggagtggcagctgcgagtggaccccatgacagctggagctctccagtcagccctgttttagaggctgggggaaggggggccaaggatcttctttatgttt

SEQ ID NO: 47113 - DNA, 1028 bp, Bovine  19866880682146
  misc_feature (1)..(1): n is a, c, g, or t
nggtctggggcgtcggggtcaatgaggtaggcctgagctgaatacccgaagggaattaagggctgattgtgcgtacgcgcagttcaaatgtcttttaactgccctgggagtcctttctcctctccctccctcaggtcactggcagttgacaactcggctcagggagccgcaagattcctgggctcaaaggacacgcagggctgaaaaatggatccttctggcctagccacaatcagaggcagcccagcaacctacctaccttcccagcctccgccctggcccagcctgcccatttcccaggtctcgacctttacaccttaaatctccggactccctgacactttctaccttcttggggggtggtgatgccccgagactgcagcgagccctcggccagcccattccaagtgtggccccgactcctcctcatccatcccgcctccctcgaataaagttcagattccagagcctggtcaagtgaccacccagcctgcaccttccttttactgtttcgtccgaatgcccctctctctcaaaagagaagactccacctgtagggacgcccctctaagctcaagatcccaccccttagcaaaaccccgcccctcaaggaactcttcggagacttctctctcagtgacacctctcagtatgacactgccaaccaacattagtgtgtaccagaaccccttagtgtgacaaccctcctttgtgtgttccttctgcccagagagaccccacctctcagagtgactccaccagccattgtgaccccgcctctcaacgtgactcctcccctcagtgtggcccttatcagtgtgaccccctctagacaggtaccgcccccattacgtaggaatccggtccgccggctcaggcgggaggaagttctgccaccggcctctagagcggcgcgaggtcccgagtgcgcacgcaccgttccaggacccggtgcgctcgccgtacccaacgctttctcttctccgctggctcctccttcctgtcgtcggcagtatagccaatcatcg

SEQ ID NO: 47114 - DNA, 1889 bp, Bovine  19866880745621
  misc_feature (1)..(1): n is a, c, g, or t
ntcttcgtggggattccagatgtgtgggtctttcttttgcctcattgattgggagtgggcaatcccagcagcttcttctagaggctcccccttctgtcactctaccctgcgtatgacctgttctgcttggctgttgctttgccttcactcccaccctaccctcttgcctctcttcacctaaagccatccctgccttttctctttggctcgccatcagctctctgtgccaggcccttttggatacccagagcctggggctgcagtgtggttggtaatgtggagtctgcttgtcattctcagtatccagccatgccctgatgtgaagtacggcaaacgcatccatgtactacccatcgatgacacagtggaaggcatcactggcaatctctttgaggtttaccttaagccatacttcctggaagcttatcgacccatccggaaaggtgagaaataattctaaggactgaactcaagggctattgttgtagggatacccaaaagtaaaccttggtccatctttgtctattctcatacatgtatgcatacatacacattccgcacatgtgtactctctccttccctgcttccttgcacttcccctttttcccattcccactgcttgttctagtacagtaagctatcttctcttgtatctctgaaggaagaggtgggcaatttggggtgtatcacagtccacagtgtatttaatacttagcacagttctgctggtggtggtggtggttgtgcaagcttgggttatctatacctcagaagtcaaaaatcttatgggcttcttcctggcacatcaggttttattcactgtcttttgaggggcagagagacttttcacaatttcgttttctctttttgcctgatgcttaatgatgctggatgggaaggagaaaggacagtatctagtgaacttggcattctagatcccaggttctgatggggaattcttagcttggtctggtgatagataacctctgactgctcttgtgctgattgctctcacaggagacattttccttgtccggggtgggatgcgtgctgtagagttcaaagtagtggagacagatcccagtccttattgcattgttgcgccagacacagtgatccactgtgaaggggagccaatcaaacgagaggtgagttctcttcctgatcccggtatcccactttgtgagtgctcagcagggcagtagtgtggtagttccaaagaatcctcaggcttgatggttaagctacttcccagaggtggaaagcatggctattcatttctggacctaggtattttttagaagtatctgatatcaataatctttaaaatctagattgagcctaatgagtcaagtggttgaaatgatttttgaagaagtgatgctaatgatgacatccagacccctgcccatttcccacactttctagcttcaggtcttaggggaacccactgcaataagactaaggacaatgtaatgaggaaaggctatgctagaaatctttgccatggaataaataaacaaatataaagtaaaagcaaagattggaaattccctggcagtccagtcattaggactctgcactcttactgcttagggtgcaggtttgatcccttttggggaactaagatcccacaagctgcgcagcatggccatataaataaagaaattcttgccctggggttttttgaattgttctttgaggcatgatccccttagaggagaatcttctcatacagcagattctctataccacctttagagaaactcaccttctgctgatcgcagcattcttaccttcttttctttttctcttccatcttcaggatgaggaagagtccttgaatgaagtgggctacgatgacattggtggctgcaggaaacaattag

SEQ ID NO: 47115 - DNA, 751 bp, Bovine  19866880774568
  misc_feature (1)..(1): n is a, c, g, or t
nctttccctgtacccctgaatcttggaccacagcatgtcctccaacactggcccatctcacaccacagtgcccatccctctgctctgtcagaggcgtgtgcatcccccagccacaaggttttccaccctgccccctacctcatgcttgtgatcagcttcttgatggagtccgagacagtacgggagtggccagccagcacggaccagcgtggtgggtcccgcggattgaccgccagggctcgggctgtctgaataaggcccccagcactctccaacattgtcttagcagagatcacaatgggctccatggcagcccggccctggggagaggggaggtcgaggggtgagtctcaagactccttgaaagatgaggtggccggcagttcatgcgttcaccctgcctcacctcagggctgatctgggcaggaacactggagaactcagggttggacgcaaaggcgctcagattgtccacagcctccagcaaaggggccgttgctgctcggcactgggcacggttctcctctgtgaaggccccatccagcgcctgaagtgggagtgacaaggaggagctcaggatggactgtagacaaaggcagggaagcccaggtctccctcctgagctcaaagggcatggggcggggctggtggtgaccagcgcggacaggcaagaccttgggcttaggcaggtgtgactgcgtgaaggcctcagggaatgacggggtgcaggggttgggggagagaaaactgg

SEQ ID NO: 47116 - DNA, 1274 bp, Bovine  19866880796697
  misc_feature (1)..(1): n is a, c, g, or t
ncaggtcctctggcagccttccttttcctcagcctagtggcagtttaccctcctgaggtcatcactgcatcacagaacaaagaactcccatcccccacatacctaacaacagtctgtctgaatttagggccaaaacattgcccccagtagacaactcaaacttcattcagtgaaacctgagtgatccccttttgtcttgattcctaagatcagaattaccttcaggcattgtggatgaggacatggattctagcatcaagctgccttatttaaatcctagctctgccacttcttacctgtgaagtctcaaaagactcagtgcctaaattctctcacctgtaaaatggggataatattattacttagcacatagagttgttttgaagattaaatgaagaaaacatttatatgcttagagtagtacatagtatatgctgtgttaaaattttcttttgttgccataaatgatcaataaccaatctaaagtaagattagaatagagaacagttttatttgagtcaagctaaagactgtaacccgggagacagcctctcatagctttgaggaactgctcccaagaagcctggtttccagcacagctttatatcttgtcagaataaaagacatcaaacataacaggggtacatttcttccatgtttcaaaaaagattacttggtacacagcaagtcagtatggccttggtacctgggaagggagccttatcgtcaaaggagtactggcattggcctcccacgaagggaggcgtttatctctaacttcaaaacagatattctttacttctggacaatgcacccttttcttcaatgattaaatcagatgtacaatgtatgtttgatagactacaagacaggcttgtagctagtataaagttcaagtcaaatcatttataagccagaatgacttccccatacctcaatatgtgaaaatgtcttccatcacttttatttttaaaaatttgtatttatttttggctgtctgcaggctttctctagttgcggtgagtgggcttctcattgctgtggcttttcttgttgaggagcacaggctctagggtgcacaggtgtcagtagttgtggcacacgggcttagttgccctgcagcatgtggaattttcccagaccagggatcaaagctgtgtcccctacattggcaagtagattcttaaccactgggaacaagagaagtcatctttcatcacttttaaagttcctaattattaatataagcctcattccatctttaataggtagag

SEQ ID NO: 47117 - DNA, 1117 bp, Bovine  19866880806895
  misc_feature (1)..(1): n is a, c, g, or t
ngtgagacaagaattctgaatgattaagttgaggttgaaaaggacaaatagatcaggaatagccagctgctcattggtgtgagagaaacataggccctaagagggagctgaattgggggtacactgctcaggagccccagtaagacagagttctcttggcctcagaatggtaagaactcaattttggttgctctcgctttcagcccgaatccattcattcagtaaatatgtactgagtgcttgttctgcgctagacactcctttgttctgctatcttcacatcttgcatttctccctcactgccctaatcggagctgtgccctccctccatttggcaatcctttctggccaccagtttcaaagtccagtttcctctaagctgcaaagaagagctgccttcccaccatcccactgttcatcttccctccgtctcccctcactcccagaatgtaccctccctgttctttaatcatatttctcctccacttgctcctgtccctgttcatttctcttatgttccactgtttgtacatacgttctttacaaacccagcaaatatttgttgactgcagaccaggtgccctgccctgtacttgaagctgtgggtaataagcaacaagtctttgtcgctgtccctttccccatggaactgaaaagtatgtcagactcacatgaggaacactaaagtaacaggacagtgtctgatcgggagctgagatagtgtacgtacaagtaatgatgatatgtgacatgtatattccactttgtagctttcctatctattgtgtcatttgtgaccttagaagggcacaggtgtgccaatagaagggtatctattgtgcccttccaaccatctgttgaggtagggacttgaggtaggactctacttcagcaggattacttaccccattacatggctctcagcagtgtgcttgaacaatggggataaacgaactggtgagggaggagagtggaattgggagagagtccggcaggaaggggttgcttagtgaggacccactctgaatggaaattgtaggaagtaagataggctggggctttcctggggctcagatggtaaaggatctgcctgcaatgcaggagatctgtgttcaat

SEQ ID NO: 47118 - DNA, 2816 bp, Bovine  19866880883611
  misc_feature (1)..(1): n is a, c, g, or t
ngccctggggacctctccaaaataagacatttgtttccgccgaccgtccccaaaacctcaatgccgtatctcttgtgtttggagtccctttctcttaaatctcttggtgggctaggacacatggaaatgaaaccaccaccaccacagaaaaactaagtctagctcaccttgttctttatccttaggtgtggcccggaagagcagctcaagacacctgaagtgggatagagagcaggggtaaagaagagttaacctcagaaactctggggtgagtagattaagaatagagcttaccaactcaggtcccagttacaaaattatccctccacatttaccctagggtcctggttggcttcctgaactcaccggctatattcactaattgcctccttttgggcccccagttgcacccaagcttggccctgaagcagatgggtagcagagacccagtgtgagcagtgtggtgactctttggttcttcttctggcatcttcccacagccgaggcctcttgggaagcagaaatgatgtacggctaagcagctcctcacatacggtcaaagcatcctgggctcggcctgcctggatcaacgctgctgctgcctccaaaaacaactcaggtacacagggccctggagggcaaggtggtggggagaactgcggtgggaagagaatgcaatgcagtgtcttgaggagacatgaaccactacctccaaggctctagtatcatcaccaggctctagtaccatgcagggaccatccactgcttgctgccctggatctcccttgctctgggaaccttcccaatctggtctcccagaatggacaaaaaaaagagcagaggaaaggtcagaaaaaagcactcctgctctactccaaaggaaactccaactctcccaccccactacatagaaacgtggcatacccacctttggctctgagccatccagcaacagggcgagcaggtccaggtaatgttctgcagcgtctgctgccctgaagagtcataacccaagagcctcactttaggccatagcagggccctccaaaagctcttagctaagggccctggggtgagggaagggtgaggtgtgggactccaacattggctcagtatggatctacactatttacagactggatctgggagaagactttatagagttttcaagatacaggaggttagtgaaggggaaaagagtcctcagctcacgtccagcagcaaggcaggaagctgatagtggggacccgtgtcccactcttgatttatttatcctctcaacttgcaagaacagaagcagagtcacaccacaggggtgccatcagaagtgggaaggggagttcaggtgagcaagatggaacctcaccttcctgtctgtaggcatcggcttgctagcaggtacttggcctggctctgtgtgccacagtgaaggggtgaggctgggtcaggttgtgggagtaataactctacctcaatgagaagctgacgagcttcagggatacgagtgatactcaaagcctaacaaaaagaagaaagtttctataatctccgggaactatatatccttctacttaaaccttgactagtcacacaagcacaagcatctcagcattacctgcatcttcgcctggcatagttccttacctcaaccagcagctccagactctcaatctccgctgctatgttccccagttgctgatatagcctggaggcctccagaagcgggggaccccaggtcgatccctctttcagggctgcaaccaagtagagcagagctctctgtggactgccctagggggcagaaaggacacaaaggacacaagcctcagctaccctcacaaagtagaaaactgtggtttctccaactcatgctaggacggtctttaccatcttacgaagacaggtccccagggctgtgtatacctggaccaacagagaccgtgggcacagacctgaggccgcttcatgcaggctgctcagtgccttgggcaagctccctgtgatcagctcctggaggcctgtggacaagcaggctgtgagcttagagaggccaacagggcaagtgggcctgatagggaagaagagcacagagaagttccaccaagctgaatggtacaggacagaaaagacatgagcccagaggacttcttaagacaggaagtggagaggaagggacaagtcagattgttaactggccttgacgataggcaaatgctgtcagaaggacatccctcaagcctcgggcatcctgcagggtcagcggagcatctgactcctcagctgggggtctccaagttttcagaagcagcagcatatcttcagaggctctgctctggggaagaaggatgatgagaggttccaggcttttaactaccccctctctatctcagtctgccccgaatggactttaaactcaaggatcctcttgattcttgttccctcatttctaagagattaatagctgaggggaaaggatacaggtaggaataaaaacctggggcagtgataatcttaatgagccttctcactcaggataagtccacaagaacacagagcagggaccatgtttgggttactgacacaaagactgaagcagggaagtgacttcagcaaggtcacaagagccctaattctacccaagataatcaagctcccaagaaaatgcctccaatgaggaacaaatcagagcaaggtcacttaagagtcctgagagaaccggggtcttgtgaacaccaacccagcagcctttccagcacataataatgatactgcagctaggaagggtgggaggaggaaagagacccttagatccagat

SEQ ID NO: 47119 - DNA, 1495 bp, Bovine  19866880887020
  misc_feature (1)..(1): n is a, c, g, or t
ngagggcactagagacagatgatgaaaggtagcccacatgcctctggcaatcaaaggcctagcagtgacgaagtggctgacggctggcaaatcagggcaagcagtaggtgctctgtgcatgcatctctgttcctgtgcatttgcagacttttggtttgttttcccttctgatctttcaagcaggttaagtgatcctggaattgtctgactctctgtggctggggacaggctcaaccagtggagctggggcagcaaggcaggtgggaggcatttattagagaaataaagggcaccaggggtaccttttctctttcaaagaacatgaactctgagtgtctcattcctatagtacactccagcacagggcttggcacacagaaagcatcctgaaaatactacatggaatcatgtacatctctaatcgccacatcctacactagccaagagaccattcctgcctgggaggtattgtccgggacctctgctctacctcctggctcttacttggttagcgatgactgtctggtgctggtacattccaggattaagctgccaacgacagaactggcctctccagcctctggtgatagtgcctcccccaatgccacccaagggacaacctagagaaagaatccagatgtcagaggggcacgggagaagaaaaagagcgcatttctcactttctagactatagagatgggttcccctaaacctggggtggggggtgaggggagaatatcaaattcacacactgtgcactttaaacttatacagtgttctatgttagttatatctcaataaagctggggtgggggaaccctagggaatgggtcagtgcaatttaaagaagctgaaggcttctttgcctagctccaagtgggcctggatgctgctctctctgactgggcaggactggagtgaggctcaccgtagatctgtctcaggggcacagagttgatgaggtcgatgaaaggtttcttcttttccacctgggtcttacggtaccaccactgcaagtacctgaggagcaaggggtgctgtgggtcagggcaagaggctgcagtcacctctctctctttggacactgtgacttcccatgtttaactgttccaaggacccactgccttcacttcaaacttctcctctcaacttctctgtagttcaaggtcctctcatcttcccagtcacccccagtcatggcacgggactatctttgtttctcctttctactccttagaaggagctctctgatctttcctcacctctaactccaccactgatttaatttattccaggagcttctgtctgaggtgctgaaagggccagttagtttcctgacttataatcacccccaccccataaacaggcatgtgaagtcgcttcagtcgtgtccaacccttagcgaccccatggactgcagcctaccaggctcctgcgtccacgggattttccaggcaacagtactgggagtgggttgccatttccttctccaatg

SEQ ID NO: 47120 - DNA, 2145 bp, Bovine  19866880908321
  misc_feature (1)..(1): n is a, c, g, or t
ntaaaatgaagggcccctgacttgggatggaactatccaaatggggctaggataggtcatgtagatcatccccaagtccctctattttgaataggactgagtctttaaaatttagtatatggctcaagggagtaacttatgaatgctattcttcctgtatagtcacgattcactgccattttctctatgcctcttataccaggagaaaaatttcctttccaggtatgggaattcaggtggttgagagaggggattgtgctggtctctcttcaggaacaaaaatgcattaatgtggccctgactcagatcttggagttggactgtgtccattttgtccaaaactgagccatgacctgagaggaactcagttatagatggctctgggatacttcctatgctgccagggataccacggtaacattcatgtcaatgagaccattctccctgaggaatttctttgtcctagcctctatttggcttccattaccttgtgcaggtggttgagggacaattgaaggaacatattcactttcctttgcacattctgaggaacagacctttatatttccaattggagaggaagaaaagagttctcaatttaataggtaacagaaaaaagggagtagagttcatctatccgttttactttgtgaaaattagaaaactttgattacagccactggacaggttgtttttaagaagttcgagcagagaattttaggcataaacagactatttgaataattcttaatgcttacaaaatagcagattaagataaaaaattcttcaaagtcagttgcagggttggggctaagtgctattggagaacccagcatgctgtgttgtttttccttgttgtgattttgctgaatagagcctagttcttctagaatgtgaactttgctcctctcttcccaggaacctcctgtttgtgatccttgccactaatagaatcattatttcctggattcattcattattttgttccagtgtttactttgtatttatttactaatctgtcctcctctcattctcacagccccaccagcagtagtaggtatggctcctcctgtaacgtgagtcaaggaagctctcagttaagtgaactggaccagtgtcatgaacaagatgatgaccgtcgggagagggactccattcattcctgccacagctccagcagcctctccagggatggccaagtgggttttggagaacaagagaaagccttggaggtgacaggtgaagaggagaagaggggagtgtgtgaacccaaggagatgaaagaagatgccatagcccatccacccccagatatggtgctacacaaagaccttgtccgaagcccccaggagaggtaggtcatggctaccttgaggagctcatatggtttcctcagtacctgccctatggtactggtgacagaatgcaattgctctgtttgtttccctgcagctgggtatggttgtgatcaggatactgaggcttatctctgcactgcttccattgttttctggtgtaattaccaaagtatttcaaggaactctgaagaacattgtagctgcagtgtaccaggccttctagagtctgtagttcttggcttactagttgaccccatgtatgacaacctctgagtctggaactgacctgagccctgaagattatttcattcagaggagctgcttcaaataaaacaggcttcctagcctattaatgtttaaatttttttggtgaacattgtttttctttttttttttttctcttgactaatctgggaggcagttaaagaactgatctagaagccagatctaaatcacctttctgtctccctggggcctagcagtacatctggcagttggtacccagaagaaggaaaattttaaacttgtccttttaacagtcacataatgaagcttagtactgagtttgagtattgttattgttgagctaaattggtcagtaagttgctgataggttgggacaaagcagggtttctcagtcttggcactattaacatttttagccagataattctttcttcgtttttttgttttgttttgtttttgatattttagctacattgtgcagcatgtggtgtggttcccgaccaggggtgaattcaggcctccacagtaaagcaccgagtct

SEQ ID NO: 47121 - DNA, 1316 bp, Bovine  19866880947234
  misc_feature (1)..(1): n is a, c, g, or t
nagggatcacagtctaagttccttctgtagagttgaacggtttatgagggggacagcagctgacctaaatgaaagggagtgaggacaaaggctagattctgtctgcaaggggaaggaccaccaaaaggcagtggccataggtgaacaggactccttctagactgatttccacaatttttggctttgttcagggcttatctatgaagaagccctctctcctggattcttcaactagctctcagatatgtatacttaagagcctttcatgtcctaaagcatcactccccttcctaaaggagtgaggtagggagactcctgggcaggtggcccctggtgcttgggttccaaagaaattctgctcaggcctctgaagcaccatgtgaacctggttctactcatgagagctaatctgggggaagggattagcatagctcattgctgaaagatatcttgttcagtctcaatgccctgtactcacttgagctactctacactgctgggttctgctcaacagatggtctgcattctattctgtgtgttcctgccctggccatactccagttcagactacagggctcagcaatacctgtagactcaacggattacttacctcattaggcacaagctccaggccctctaaacatgttcctctaatgattggtatatatggatctaactggattaggtgtggtatggagggggggaaaaaaggggtgtgggagtggaaggatctctaccaagaatggctgacactctcagaaatgtctgcccctccatgaaaaatctccctgtgtggtaagccccacagcccagctcctagcaccacagacctgctggtcagggattcagaccctttctgtgaaaagccacactcacaccaccctagattttcccttaaactttcctaactgaatgaatcagcctcttgactgtgaggatctaagatgactatgtagtaactcctattatccctgactggtggaactggtgccctctggttggcacaggagtctgggtgctcagctcccctcctccatagaacgagactctgatttgagcttcacaaactcccgggccacttcgtcattgctcctctgagacagaatccggagaatggtcacgcctgtctcatccatgtggatcttacggcccaaggggcaccagcaagcacagctgcccttggctgccacatccctcagaggcattacagccagccccagcacatggtcctcccgggcaaagcagtaatccttcacgcatatctgcaactcataggcttctggcccctcttcatttcccaggaggctggagcacag

SEQ ID NO: 47122 - DNA, 4007 bp, Bovine  19866880963402
  misc_feature (1)..(1): n is a, c, g, or t
ntgaatattcattggagggactgatgctgaagctgaaattgcaatactttggccacctgatgtgaagaactaactcatttgaaaagaccctgatgctgggaaagattgaaggcaggaggagaaggggacgacagaggatgagatggttggatggcattaccgactcagtggatatgaatttgagtaaactccaggatttggcgatggacagggaggcctggcgtgctgcagtccatggggtcgcaaaagagtcagacacgactgagagactgcacagaactgaaagaaagtagatcccatttctggattctctatttgcacggaaattatttatctgctgtaagtaccggagagggcaatggcaactcactccagtactcttgcctggggaatcccatggaaggaggagcctggtgggctgcagtccgtggggtcgcgaagagtcggacaccattgatgcgacttagcagcagcggttgtagctgctgtaaatacacaagagtgccatctagtggccactaggatgaactacagctccttgaaaggtcaagtcggagaaagtttgagagtcatttcatccatcttgcgggttaccagatttccagatttcacagaaattttatttatttttaatggcgacttacatggagttgttgaggttttctattttttgttgagttatgatgttaaacaacaacaataacaactattatctactatttaacaacaagaagatagatcaaacatagtctcagaataaatgaaatgtacttcaaattgcaaatttaaaatgtaccacattgtcttttctttcttaataggaaaatgagacctggaaaactttatggacaggtaccaatgtacagcttggtaattgggaactgctgctcagttgataaattctttcttcaacatcctctgcttcagtattcccagcactggagacgtgccccctccactacctccttccagccctagtaggtaggagatttctctttaggtaagagttaaattggcagccttaacacataggtcctgattttggtcccgggcagtctccatgaaaaagcctaaaccgttttttattttgatgtgtgaaagtggctctctgatccccagtgttcacctcccatgatctcgttcctaggctgaatccccttgttccctcagccagtatttacaccctaagctggcagagcaataaagtacattctaagccttctaggagtatggttcctacaaagtgaagattacagacattccagaaaagatcccgggaaattagaaatcagaaggctaaccaattcagagctgtagagaagtctacttattcaccaaccttcttggcagacaggcagtaggcacctggggctacagtatcttatattacaaagtgtatcatttgtaggtgggaggtcaactctcctcccccacaccttctgaatcacctgaataatgctgagttctttcatggatcacacgccattactgaccttcctaagcttcttgccagtggtctgtgctttcactaggaacagatgggttagtctgccgtttaatttgttctagctatgagtgatcaaagagaagactagtacaccctgcctatttaaggacattttccagacattgcacccccacttctgttggccatttctagctctgagggaggctgtgttgttgttgctgttgttctaataataagaatgaaggggaaaacggaggttggagacaaccagctatgttgacagctagcttgtgccacatgtgcaagaccagacagaggtcaaatgatcacaaatcaatcctagtggtcagccattctgtaaaatcactatacttaacatcacattgtataggactccacacctaaaatcccctaaaataagatggctgacagtgaccagtgggcaaaattgggaccaatgaaaatacatccaggagaatcatgatcattcaagcaaatggactgttttaactcagacctactggtttagtgcttctctgcaggaattccttcccagcatttctcagacatgtaatgtgtttccagagcctgaaaaccctaataaaaataagttaagaaatctagaagcctgggaaactattcccctgtgagaattaaaacttaatgatcaacatagagctgtcactagttcaaaggaatccactgataacatatcataagcaagagtagaaaacactgaaacatggattggaaaagtcaggttgacagctcctgaacagaaggggagcaggaaggagggaagtggtcacagtctaatcggcctggcctgtagctgctgccaccttagaagcagtgatgttgaggagcaggcgcataaaggagagagagagtgtggcagccagttaagagcatctttttctgacttttagcggcgtcacatcaatagctcaaaattgaccctggtgggaatatttatacctcccctcctcagaaactggcaaaagctacatatcaggacgtccctccctgccctgcagagggtcgacttaccagcacacactggttacaagtgtatgtttgtagcctggtctgtttctaacagtaagtcatttctataaataaaataaatactggtaagttcatacacataggatacttaaacaaatcctatgagtggtgtcaggaaaaacaacaaactttggaagcagtttgttggcatttgcctcatattggcagtttcaacaagtgattctgtgtggttctattaaagttgctagcagttctgaacactcatgccatttgaaaactttccagtaacgactgctgtcttttccaaatattgcagtattcaccataggctacagttccttgtaaatacttaacagatgagctgcaaaaagaaaaagatgtgattgttgctataggacacacaaacacgaaatcagaaactgctcccaaaatctgaattggcaagagcgatattttttttggaaaactaaggactggatttatttgctcagtatgcgttttactttcagtaaagtaaggacaaccagacaggggatctccaatcaggcccagatagcagccaccagcaagagaaatattgaattcaatggcaaaatcaagactagggcaagcaaaccaatatatatatatagtccatttatatataaaggaaatgagcttctgtgaagcaacatgtaccctctgggacacccaccttgaagatgtttgcatgctcagtgagtgttagtcgctcagtcgtgtctgactctttgcaacttcatggactatagcccatcaggctcctctgtccatgaaattctccaggccagaatgctggagtgggttgccatttccttctccagggaatcttcctgacccaggtcttctgcattgcacgcagatgctttactgtctgagctatggtcactagtgtagaagggaagatgtttgggacatcttcttaattcagccaacatcaatgcaaaatgaaagtttcctacatctggaatatttgtcacaaagcaatggtcaagactatctttaactcttttttttttaagttgaaacaattgattcatttttttctacattctattttcttcctttttaaaatatttatttatttggctgtgccaggtcttagttatggcatgcaggatcttttaattgtgtcatgggaatccttacttccccaactcgagatggaacccagtaaccaaccctgcattggaaatttggagtcttatccactggaccaccaggaaagaccctatagttcatttttcaaatgataacttttaaatatcaaatatttacagtattctatttcaatttcaagtgactttatttggcctttattgggggttaacactcctttcctcttcagttcagttcagtctctcagtcgtgtctgactctttgcgaccccacgaactgcagcacgccaggcctccctgtccatcaccaactcccggagttcactcagactcacgtccatcgagtcagtgatgccatccagccatctcatcct

SEQ ID NO: 47123 - DNA, 2128 bp, Bovine  19866880992062
  misc_feature (1)..(1): n is a, c, g, or t
nttccacaaattcccttcttgttgaaatacagggttgtgctggcctggctcatacagctctgggaagcgtaggctccatgtttcattcacatcctggaagcatcagagggtaaggaggaaggctcagggtctctccaaaggtcccatctccagcagagtagaggcttctcccctcactgagtttgctgttaggctgcctaggagattcctcatggattacttgagatgtggaaccagagaacagagcagtgaccagaacctttctaaagccctactctctaggcagggatatacgtggtggaagaaagctaaaagttcatgatggggagttaagaaagggggaagttaggattgggagtagagggaaggaaggactggagcttgggtggggaggcaactgggacatgagtccctagttctaagtgttcctttggctgagtattctgtcaaaagccagtgggaggcaagaggcggccggtggcatccagttagtccgttagaggtatttctgttctgtgatgctcctcccattcccgtagccactgggaaactcagctgaggtaattctctgtgaggatgacatgggaccatcttcatctcctaaatctaaaactctgggtaacaaggattgaggcttgttttgagaggttgtggatccctagatttagatcactgaagctgtatagctgctgaatgacagaactcatcctcttgctgctctgaggctggcagctacttcacggagagtttccttcctaccctgatggagaccaggaaccacgatcccgtgatgtcctctttcagctactttatttctctttggaggctccctttttattctacgtacccaggactggaggttgggtagaagagggagaggtagggcaccaggaccctcgttgcccagggaaatttccaagaggattaggcagtaccccccaggctgactccctacaatttgaggaatcagacccatacttccaagcttggccttcaggattctcgcctaggcctcgcttatcccattatctctttatgggtctctcctttctggagccccttgatttatctagtcctgccccaacaactatttccttccacttttgtacacactccatttattgcacagcacaatgtctgtgtttctctctatgaagaaaaacttgacacaggaaagtttgggtttctgcagccaatgattattctgtggcagagtatactttactttatccaatgatacctctccaggtggtgagctccctcccttcctctagaaatgattctatttacatttgactttggagcctatctcttggctgctgctgtccttttcattcctgggaatactcttcaaggggccaggggcttcagccttgactaagaggtttgttgctggtcttacctgatcaaacagactcaagcccaggacagggagggaggtgtagaccaggttgtagaaagtgataaaccaggtatcataaactgtctggaagaacaccaaggagatttcttaggagatttctcttttccaaagtctcagctctacctcccagctttaagaggaccccttctgccctccacctacccatcaccgtgataacctagaacatggtttggatttctgaaatttgaccaagaaagctgactgcagactctgtttggtccctgggtcctaggctggggcaaggccacattacacttgtttgtggccaatctgatgaggatgatttagaccaactctaccatgacctgtactgctcctctctgcatggaaaggacccagagtggctgctagggaatgctgagtgtacccctgcactcccaggcatgtaagcctctgtgttctttatctgctttacggcattcagtagttctataaccctggacaccttctaacactggcaagcagaacagacccatgagcctatagtaggctactttctttcctagccacaagaggtcagcagtaacatgtacatatacatacgcctcccacaagctaggctggtgttactagacactaggggcagacaaacccactactgtctgctgactggtctgttttcctggagccttaaggtcatagcatagcaaggtcacaaaggtagtagggatctcccaagatgat

SEQ ID NO: 47124 - DNA, 2131 bp, Bovine  19866881023747
  misc_feature (1)..(1): n is a, c, g, or t
naaatccatctgtgatgcaggagactgcctgcaatgtaggagacatgggtttgatccctgggtcagaaagattccctgcaaaacgaaatggcaacccactccagtattcttgcctgggaaattccagagacatcgcaagagtcagacatgactgagtgactaaaccaccaccaccactgctccttttcctcttttcagccccctaactactgattctcattatatccttggccttctgttttctattttccactttagcagtcagtcgggagctgtgcttagtcactcagtcatgtccgactctttgtgaccccatggactgtagcccaccaggctcctttttctgtggggattctccaggcaagaatactggagtatgttgccatacccccctccaggggatcttctcaacctagggatcaaactctggtctccagcattgcatgcggattctttactgtctgaaccaccagggaatatccctgcccaaataaataaataccccaaatccaaatctaccatcactgtcatgtcaaatgaattaaacacaagaattctatagttaagcaaatgttctatatccttaagatcttgcttctggtttgacatttaagagtaggacaaaacactagttgccaagttagtaaagaactactgatttgtctatcttgggacagaatcagcatagcttttgtctttgttttctaaaaaaaatgctacccaaatgagtagaaaccaaaatacattaactgtaaagtcaaatggaaaatttactaaagccagactttagtaaggtaaaagatcaaaagatctttgggtccaagtgttgtcatctggatttagacactcagaaattcagagtatcttaaaatcaaagaaaaccatttctatgttagaataacctaccctcagggttgggaggggccttagaggtcatttagttagaactccattcaagacatagctgtgaactttccaggacagattttgtttaactctttttcagtccctactactagagtagcccagcatagagctgtgaacagaacaaaccttgagaaatgtatagtgtttgactgatcattaattgaaaagtcatggagaaacaccaaggaaatcttaggtttaacttggatctctaaactcctaagtgctaagctatttgaccagcttctcttccctagggaaatagaccttaagcaagacgtgactgggttgcctgtctagtcttccaaggccagttttagccttaagacaaaaaaagtgttggttctccaagagtattcagatgtcttcccaagttaggacccagaaagagattcttcatgcttaagcagtgtctgttttccaggactgcaggtaggtttgttcttttgtttgaccctataggtggaggaggtgggagagaagccctgtccttggattatttggtctcattctcctacttttcttaagctcttagattcaaacccttacatcttaggtcaaacaactgaagatccaaaagtagaaagtaagatggtcttgtcaacatcttgagattagcattgaagaggtagcaagttcccactgttcagacctctcccaggacaattaaggggcaagtgattctccagtgctgaaagcaaccattgtaagaaccttcagtgggctaaggttgaaagacagtcatttgcttttggcatctgacacctttcagcactgaaagcaacatgtaaagacacagcaaaatggctttgccagacttaagaaaagcttcagtagagagctctgagtagagtgaacacaaatggcaaacttgcctactgtttggcactgagaaggaacttgagtcagaagataagatgaaacagaaagatttctgattctaaggaatgaaagcatttggatggctgcacaagtgaactggggctcagggaacagtacaatctcaactccacaagtaaatagatggtcttcggcaaataaattaacctcagggcctcagttgccgcatcctgaaaaggtgatattactcccttcttgcagttgttttgagaattaaataagttgctttttctaaaatatttaaaatagtactaaagtacttagaatagtactttacatataataaatatttaataagttttga

SEQ ID NO: 47125 - DNA, 870 bp, Bovine  19866881025874
  misc_feature (1)..(1): n is a, c, g, or t
naattgtgtccaccccatggtttctcagcagaacaatgtgggtcccatccagcccaaagcagctccttcccacctatgggctgccctgcacacagtgacttcttcgtactcaaacctggacctctccacacacagctccccaatgccccctggccagtctgcaggctcccctcagtagaggcctcactctattttgggaaaaccccagtaccctgcactccagataaaattttttttgtcctcagatggagtggtgggggaattctgaagacaactattgttaaccccatcttggactatacaaatacactgcccaactctgagacttgggatagaacctctgacctttgacatctggttccctcagccccaccttaagcagctcattctagttcacaggggacagtattagcccgtattagattcacatctgcatggtgtataacgtacccttttccggctgaatgtcctcattagcagtaaacctaatacctttcccatcatgcactgagtgaggacaggcaagtcaagaggtagcagcagtaggacagagaaagaagaatcagttagagtctaagaagttcacaggcattcagagcagctctaacacatagtctgagggagcacagagatggagcagggtgcagagagaagtctaagaactggggccagtgaatgctccaaattatacttaacagtttgcacatcaaccaaatcacagacagaggcagtagaacatacagcaagtttctgagaccagcaggacacaataaagaaagctgtaggctctaatttcctaggctccaagtgacaaagcagtgggtagaacacatacacacaactgcagactccccatggtcaccacccctg

SEQ ID NO: 47126 - DNA, 716 bp, Bovine  19866881030425
  misc_feature (1)..(1): n is a, c, g, or t
ncccaggcacccccaatcattcaccatggatttcctcctcactcccccatccccacaggtggccaggaaactggtgatcctggaaggagagctggagcgctcagaagagagagctgaggtggctgagaggtaaggacaccccagggtagcaagtgaacctcggcctgagcccatggctgtggggcactatgtgcagtgggaggtgcttccccagtcagggtacctcagggacaggtcctgcctctgacccctacctgctggcccccagccgagccaggcagctggaggaggagcttcgaaccatggatcaggccctcaagtccctgatggcctcagaggaggaggtagtcacctctctggacctttctggccaatggcaccttctctcggctcaccttcccctccacctcaggctgctctctctcaacctgctgggggtcgggaagggcctggggcttccagtctctgcctgctgtcactctcacaactttgctcttcttctcttccctcctccaccccttccccactgtgccacctccactgtctcccccactgtgccttcacatcccaccctgccacacacccccctgcagtaaatgtggggacctagaggaggagctgaaaattgttaccaacaacttgaaatccctggaagcccaagcggacaaggtagagggggcagaggggcagtgaggatgggttccttcagggaaggg

SEQ ID NO: 47127 - DNA, 1252 bp, Bovine  19866881038096
  misc_feature (1)..(1): n is a, c, g, or t
nggtcatgaattctatttggatagattcctgttgcactcacctggtccacgctgacgggccagaacagtggtttgagaaactggtacccaatcacaggcaacatgcagaggattatgctgaggataacactcagccacatctgtggcaggttcagagtgttcctggccacacctgtaaacaaagagccagaaagggaaggcgggaccaacgcctggaaggagggggctgtcagcctgaacttaggtacttcttcagcccaaagaaagaagttactgatttggaaacagtttagtctcctgagaaaaatataaacgctaaaggactgtactggggtccttggtgtagccaaagtcactgtgaattcacatgcctttgtctccccctaaaggccaggcaaggcagcagcggtgagggtaggttctaggagtcctagagcactgaccgagacacaaaaatgggatggggggttttggaggggaaaaatgagtggcttgacaaaaaataggaaccagttatatacagtaacatctgtctgttattttgtcctcatcagagtggagatgagagaggggaaaattaatacaggagctaagaaggcattatgtcatagtaggaaggacatctgactgggagtcaggaggcctagatttgagtcattaaaaaaaacttccagtctctaaagtggtgcaataattcttgccctgtctatctctcggtctgcttgtaacgctcaaattaggtaagaaacttaaaaatatcttagagactctaataaggtaaagtattttcgctagctagattttgagtccttttagggctaagatcatgtctcaatcatatctatatccatggagtctaatacatagcaatagctgctcagtaaacatttaataaacaaatagacttggttcacactcccacccccagccccagccccagccccttgccacactgggcagaatattacctaggaactggaagatgtcggggaacaataagcataagccatcactgtacaggaagaataagacgcaaaagtagaaacccaggctaccccaggtgaagacatggcttatcatcgtccagtaggttgtctccagtgtaatctgaaaagcaccctcttatgtacattagcctacaacccaggatcttcagttacctcccttctcccatttcataaaaggggacactcccctttctgcctcccctccctccttcccttcctctcttccagacaggctccccatgcaa

SEQ ID NO: 47128 - DNA, 1296 bp, Bovine  19866881042197
  misc_feature (1)..(1): n is a, c, g, or t
ntcttttgctttttctacaggtattaccttttagggtcttttccacagaatattttatcaacttccctggggtcaggttatgtaatcagtccttctcctccttaaactgagagatgtcttctctctttagacaatgggcgaatggatggctggagtctcgggccagtctcctagaatagctgtggtcaggattagccagggtgaaacaaccctctataagaggaaggagacacggtcgccgagtcccatgctaaggggtgctccctcaccatgactgcatcaccacagttcagcttaaccgtgaaaggccacagacttgattctacacccccgcctcagctgcagccccattcctccttcttgtcccagcctccccgacagaaagttaacacatgggagcaccaagggaggagaatggtttagaacatcagcacagggcacggaagcctagcagggtaggcacaagttgggggagagagacgggtcatctcatttccccttgtgctgaaggggtataggcggttatgtggttctcccatgcccacacttaatgccctaccccccagcaccttcattatcagaagagaggaatggctctttgccatcaagacaaagatattagagttcaggacattacctggcaatttatcatctcctcttctttcatctttaggaggtgtttgcttatactggggtggctagttggaggttataacagtggaaagcaactaggattgttgaacttattatgaatctagggagacggaaatggtggtgcagtgggggttgggaggaaatacattgtcctttaagctttctgacctatgtttctctccccttccctctcccagttgattcctcagatctcctccttggcatggtacacgactgtgataccgctgatggtggtgctgtccataacagcagtgaaagatgccatcgatgatgtggtgaagtggcttccagggcctctcttccctcactgtacctagtcaggcaggggaggaagggagcaggaaggactccccagaactgcctaatactagaaggaagaaggaaagaggtgtttcctttccctatgtccttacttgtgccagaggaatatgagattcccttaagcccaagattggtgagccatccatggccagaaaggggtcactcacgcaaggcctttctctgtcttcttactgccgccatttccaggtttccttccatctccttcataacccacctctgcctttacttagctctctctgggttgctctcacctttctttctccattcacccttctccca

SEQ ID NO: 47129 - DNA, 1884 bp, Bovine  19866881047963
  misc_feature (1)..(1): n is a, c, g, or t
nctggaaggccgttctgtcgtgataatgacatccggaagtatgaaatgtttgctcagacccttcagcagagtcgaggctttggcagcttcaggtaactaggtttcagtgggctatttttaagtcgtcttggggaactatacaaccaaggtagtgggagccctaaggatgctagaaggggtaattgtgaaaatcatacacaagccctatcctaaccctcttttttgcctctgctcttaatacagattcccttcaggaaaccagggtggagctggccccagtcagggcagtggcggtggcacaggtggcagtgtgtacacagaagataatgatgatgacctgtatggctaagtggtggtggccagcaagcagtgagctggcctggctggaccttgttccctgagggtgggggcgctcgcccaggagggaccaggcgtgcgcccacagcctgctccattcctcagtctgaacagttcagctacagtcagactctggacagggggttactgttgcaaaaaaaaaaaatttaatacaaaagcgataaaataaaagcgattttcatttgggaggcagagagtgaattaccaacaaggaattgggcctgaggcctataccatttctgctgtagtttagagcagtgcaggaggaacctctgtgggtgtgaacaaaggcattatcaccagtccccacagcaaagcatctgcacttcactcaatgctgcccaagccctccctttcccctacccaacctgggcaggagggtgaagggctgcagttgctgggtgtttatatagagagtaggttgatttttattttacatgcttttgagttaatgttggaaaactaatcacaagcagtttctaaaccaaaaacgacatattgtaaaaggacaataaacgttgggtcaaaatggagcctgagtcctggcccctgtgcctgcttctttcctgggaagggccttgggctgctcctcactgccaaggcactcttccaaatgtgaaatactagaagtgaggttgcaccctcttcccctcctgattaacattggtgtactgctaccttgcccagtgtctgtggtttcactggataggactgcagtggagggcagggtgcagcctgatggaacttcagaagtggtgaatgtggcatcctctacctatatttgatggggatggtgagactaggcctgtagagtccccttttcctgaccaaggctgggttggggtatagtctctggagatggatgttctcttgatgcatctagaaattttcatatattcatgttctggttgaggatcacttacaattatgtccacctttatgtaatttgtattataaaaacatagctttttttctaatataaaattctagttttggatgtgtttctttctaaactaaacatcctcccctgctcctagtttttcagatgattgcttgcatagttttgtctaggtatagtgtgtcttctttgttcaacatgtaccagcgtaatcacttagtatttctgggatcggtatcatgatgccttattgaagaggagtatgatgcagagaaaataacctgctgaatcaagctagtcattctagtatttacaccagcctccagtttgacgtttataggtaggtaatctgcaaggactcaagatagttacgtagactgattaaattggggcatcttgaactcatgtgctatgaaatagatattcttacacttttgtgatttgcattgactctccctgttaaccgtaacacttttctctaccagatgttgtcttcgctcctcctttggttttcacaccatttaggtatcctgatggctcagctttcagtcttcttactcttacattgttgcaccatctcatccctgtggcagcctaacctcagtgag

SEQ ID NO: 47130 - DNA, 1470 bp, Bovine  19866881087535
  misc_feature (1)..(1): n is a, c, g, or t
ngtttggaaagaagctggatctttcatttcctggctgaaagagaacaaaggggactctgaacaaatgcctgcagaatcctcctctccagctttggttataagcagtgatcaggaccttaaatctggtgagactgacaaaactttggagtcttctcaaaggtctggggcctttgctgagccagctaaggtcttgactcagccctctgggacctctgagcagctggaggccgggccaagtatatgtactcaggagctttcaaggcctggagaagtgaaaaaccagcaagaaatcccagcatctggagaagacaaggataccaaagatatctgtccttcagagagtcatgaggaagaacactgcactgtctctgagctacttcaaccagaaacacatgaagaggaggcagagcctgctagcactagctgtgtttcaaatgtacagcagccagttactctgctggacatcaaggaaccaaagaccagcaaaaggcctgttctcaactaaagcatcataaatgattttaaggaattgaccatttatgatgcaatgacttagtggtagcttaaccatagcctgctttttatcctccttgtgtctttcccagcacctgagcttcatgttaggcattaagtaacaagaaataatatgtggatattgtcatctcttctctctaccaaatataattcacttattggaacaatgcgcttcctggttaaaggaaaggctaaattctaggatttacttactctggcttgctctgccttgaataatggtagaaggggagaagggagggcaagaagaggcagcaagtcattgagtggcatatattattaataattacagccatgtgataggcttgaatgcttccttgggctttgaacacctatatctataatagctgggagagatctactttgctttgcttttccaagtcttctaagatgctttctccagtggcagtgaaattactaagtagaatataaaatgcaaaggatggcttggattaatctatactgtatatcctattccatatggatttgcatagcttcttccagtttctgagttttatcatccgtgagactggtgtttctttaggtgtttttggtagagtctcccaggagctcagggctatcatttgctgtggagcattgtgctctatggtggagcattgtacagggtccacctgcaaagcgtactattatttcccctaagaagatgtaccatacaggacagtttaagagtgctgccttgagcactggcccaaaacagtccaaagaagttggtcaaacactttggagattgtgtgttaggaactactcagcacagtggcctggtacctctcctactgctatgggatgaaaaatcagaaatcagcctggaaacaccagataattgggaggaaccggagggaaaataacactggagaacaataaacattaacccttagttaaagcttgactctttggcaa

SEQ ID NO: 47131 - DNA, 1940 bp, Bovine  19866881198111
  misc_feature (1)..(1): n is a, c, g, or t
ncactgagcccttcaaggaatctgactgggggcagatgggttacttatatatattgtgggaggcacccaacactgcctccaaccaaggagctatccacttggaggtgacacttcagtcatctgtctgcaggaggagcaagaagagctgaagaggaacgtgcatgggccacaacacatacctttccctcccacaataacacagacactaaggacacacaggctcacaccacacaacaaacgtatgcctatgcttaccaacacacaagcgtgtacacactacatatgcccagcattcccacagatcccacaggtacacacacagacacataagcacccagatacctgtgagaatccacacagagctcgcacctctgcaggagcagtgacctttggcatgcattggtctcctcgagattatactctgaatgcagcccgctacctccagctgctctgctagctgttattgccaaagacttcttcaggcacctcctcatcccctctagagtgctacccaccagagatggctgggggctggggccatgaagactctttattacggagccatccttatggcacatgtcctacagccgggaccccctcctctacccaccttccacccattaggaagctggttatctccttctgtcccagtcacttcccctgggctgacaactggcagatgaggaaagtttgtggatgaagcccccttgtgggcagacaggggagaagacaggttgtgcttacagcctttctgcacttggatctgttttcctattgggcatatattacagtaaaaaacaacaacactaggacagggtaggaatcaggaagccgttttctagccccacactgtcactgtcaacacatatgacctcaggtcaattgatcccttgctgtgcctcagtttccctatctgtaaaacagtctccaaatttcaaccctgctctgaaagtgtcagaaataattcctaagcaaatcaaacttatttggaacgagtttcactacaagaagaaaactcattataatggcaactaacccgtggccatctgtttgctacacattattttcaaaactgctttcttaaccctgcttcaatgtatgcccagtacgtcaaaggtttaggccagatcttcccacacttgactagaagttctctgttgggggacactcacccccatcaaacttcacgagccggtacaaagcactcaagacttccttggaagagtcaaagtggagtccagatagacccccagaaagaaaaccatgcagtctctgtcagccacctgctgagctcaagcccacagctgccactattctgaccctgccaattcctctcagttatgtaagacttctctcctcctccctatttctctctgcttcttccccagccatctggttgccaacgtcccacctctcctgaatccctccagtccacccctccctgccagaaccccatccctgcctcgttctttcctgctctgcactcaccagcccctgggccaaggacagacaacagcaacagcagcagtaaggctgacggcagctggagcccagacctgagtcgaggctggtagaggggcggggtatgagagtgagaggtgggcagtgggagagacttgggtaaacacagagatgagggcacagacggggataaagagttgggctgggctggacacagggacttatgcaagggtagggggtgtgatagaaggaggggctgtgatgggggctcgaacaagggcaggcgttgggacccgggcttaagcaaattttgagaatggggttggcacaggggccgggctgggatatggggaaagaggtgcaacagggccagggactgggatggggcccaggtcagggactggagggggcgcctgagctggaacctggatctgggcattcgctgggacccaggcgggaactggaagcgatttgggaag

SEQ ID NO: 47132 - DNA, 1569 bp, Bovine  19866881219302
  misc_feature (1)..(1): n is a, c, g, or t
nttcgaacctcaatgatggtttggccgaggaaatcatcagactctcgctttagccgctgctttactcgtgacttgatgtcatcatcctcatcccacacacgtaccttaatgcggtcagaagagttgtggcactcactgtaagagagtcaggcaggttctgttatggacgggcccagcaaccctctctcttatgacttccacttccttcccaaagctctaccagctgcacttgaggctgacagaggaagagaaggagtcacaggacactggtactcaagtccccagtgagtcgggctatctgagcaaatggctctccactccttagcctgggtagctctcccaacagaaaacagcctgatagatgccacagaaccctaggaagcagttggtagttccctcccctgagtcctgtatgaagtccataaagatgttaaatgttcatggtaagcccatctggtcatatttgctttagttttctacctaacatccccatatatctgggaatgcgcttggtgaacttctctcattctccttcttcgtcttcttttttttaatcattctttaatagccacttgacttgtcattttctctatggtgcttgctttggagggggtagtttgccaggtacctccctcacactctccatcccccagcagttgcttttttggatccctgctgccttatctaaaagttgtacttggcagagtttgctgctccttatcctatgttctcataatgtctttgcacattctgttaaagtattataggataactactggtctactgaaaaataacagacaaatcatcaataagcctcttgaagccaggcattgtcttatacatttttagatgacaatatcatgtagagtgtcttatacagaatacaagtgtgtattagttgctcagtcatgtctggctctttgcaaccccatggactgaagcccaccaggctcctctgtccatggaattctccaggcaagaatactggagtgggtagccattccctttccaggggatcttcccaacccagggattgaaccctgggtctcccaaactgcaggcagattctttaccatctgagaagaatacaaattgcttactaaatgaaaagtggggaaaaactgactatagagccaattcatttagcattaactgtaagtatcacttctcggccttttgccaagattgagtgtagaattaaccataagtaatagtcaagcaggaaccagtcagcttcttgacaaaaaggtgctcccctcagtaactatcgcctctggactggagatggcttttataggccccaattccttttcccaatttccttccaagtagccaagagcagaaggtctctacataagctgcctgtttggctgattcagactcaaagtcctggtcctaggcattaacgggggtggataaagcatctggattcaccagacaccagtccaggttctaggctacagcttgccatttttcagcagtcatcccttgctgtcatatgaaatagtctgtacaaaagtgagatacgaataaaggagaagggagggaagctaggcagaaagaaaagca

SEQ ID NO: 47133 - DNA, 773 bp, Bovine  19866881261154
  misc_feature (1)..(1): n is a, c, g, or t
naacaccacagaggcagaagtctttacaggctcagtaactgggtgggcacagaggtggcaggaactcaggtgctctagaaaacagagggcatcactgccatgtcaacccaaggatctcagacaaaaccctctttcgtctgttttttttcaataccaaaattcttagaaggatggactatgttaattctttctccttaattatttcttaaacaatcagaagtctgtcttctttttattaatacttgagctttctaaaagcagttctaacttttaagctcataatatttaaattgcctgacacttatccaccctctcctattgaaaccgtctttttcctttggcttcctagtttttcttcttagatcattctttcttcattgtttaatatcacaatacctgacctatatttaaatatagattcacagcagggctcagacctgaaatcttttcaacctgagaagtgtttagcccttcccagtattctattgatttccaaatcttcattcttcctgaacttccagaatcaaatctccaataccccattaggtacttcttactcccccaaatggagggacttcccctagtgatctaatggttaagactgtgagcttccacagcaaggggtgtgggttagatttttggttggggaacttagatcttccacttagcgtggtgtgcccctccccaaacaaaaaccaatcaaccaatcaaaaaaatttttttttaatttttctatttcaaattagctttatttaaattaccattatacaaaa

SEQ ID NO: 47134 - DNA, 1562 bp, Bovine  19866881274183
  misc_feature (1)..(1): n is a, c, g, or t
ntaggcccagccgggcctggctgtgggcgcgtcttggaggtggagacagggaacgagggagagggaagaagaggaagggggcgaatgaggagccgcggaccccaccgggcccagctgcgcacccgcgcgccccctaggcggggcttgcgttgggcctgggtcggggcctgggccagatcgtgctgtgtcatgcaggcccgggccggcctgattggctcctttggaagggccgtcccgacctagtgagttctgcgggctcacactgacggcgcagagccccgggggcttgcggcgcccacctgcgatctgatctgccacccgcctttgggcctttggtcccaggagagcgcaggccccgcggcgggcccaacgccctaactgggcccggtgggcgtggactttgagccacgtgaaggccttagcccggagaccgaggcggaggccggagctgggaaaggcctgggagctcagggaagctcacgaaagcccttttagagctgggttggcgtggccagtagttaaagacctgagtggtgagaggctgttgaggagagggcgggcccagccgttcggttctggccgccttcatattaataatacttgaggcctgttattcatacgagtaaggctttcgtcagttttccttgatgttgtgaaatgggattctttaggttcttgataaaattcaaatctcaggtcgttttttgtcggcctttctagatttcagtctttgtggtgtgaaggttagagttcccttaaactcacacattcctttccctaagcagcagtgttgagaaatcctgggccctctgctcaggaaagcatcagataaaacctgaccacctctgcccgttttagaatcaagggctttagatactaggagtataaggggagacactgccatcctgtggaaacccttctatgcaaatcactttactgacttgagagtttaggtggggttttttttttttttttttttgagacgtgttcccttttttcaagtttctgaattgagatgaagtattactcaggtgcctatttaaaagaactacttaataattaaagtagtctcttagtctttagttgccaagactgaaagtaaaaatccagaattcttgaaacctggcatcataagagtttctgatctctatgtcattttgatgactcttaacctgaactctgtccaagtctcctgtggcccgttggggttctgaaaagggcctgaatcatgccgaagaccagggggatgtcccccaaaacagttcttcaggactgttggccggggatcaaactgaattccatcatgtagagattacttcctttgatctcagtagatagatgtggaattaaaggtcttttaagagcatcccactcttctccagtgccagggtcaggaatgtaggccgaatgggagattttcctagaatgcagctttggggttaaaatacaaagtgatggctagaggctcctgatactttatttttgtctagccctagtcctatacatcagacaggaagatgggcagcccttgaaggatactttgatgcataggagagagggag

SEQ ID NO: 47135 - DNA, 803 bp, Bovine  19866881354809
  misc_feature (1)..(1): n is a, c, g, or t
naaaaaggaggcattattaatgtggatgaactcaaggagtggggaagactcaccttaacaaggtcattaatgagtgaataacgaaacatccagtccaggttgatgctgtcattttccagaatatcctggtaggtgacatggaatagatgatgtgactatcctcgccccactgtcacccacacagttgatgtaattttgggtctatctcccttggccccataatccccacctagatcccacacctgtaaactcccacgaggacaatactcggtgacaatgcaaatgttgggagggtctatgcaggcaccaatgaagcgagtgagatggttaaactgaacatctctcatctagccaaaaggaaaaaaaaaggaagaaaagagaattcaaagagctaaaaattagatacagaaatctaccactacaggagaggacctttctcttaattgtactcacaactcaaagtcatttacaaatgacccacttgccctcccagccagtattactattccctagtcctctccttccccttccacatccgtgtctatcctgggccctcaacccatacaccaggacttacatgtttcagttcaaacagaacctgccgggtcagctcaatgcgcttcttattcacatgcttgatggccacaacgtttccctgagggtaggggtgaaaggggaagaggaacatgaatctctgaaggagcctctgggtgctgggaaagactagagaactgtgggagcacccaggagctcagctggacagagagaggaggctgacaaggggcagagggtcacgggaagag

SEQ ID NO: 47136 - DNA, 1515 bp, Bovine  19866881404126
  misc_feature (1)..(1): n is a, c, g, or t
ngaaatcttttgtgtttgagtttacacacatctcctccaggctctcatttcttcagtaagagtttcgtctgtttcctctagcaggtctctctgccctctggtttgtttgcattctcccagcctcaaggactgagaaagatgatccatcatgagttttttggagagtcagggaaattcagcaaagccattcattgttcttgggaacctgactgttctgagacttcttgctgtcctgaggctgctctccagaaacttgtctgcagggaattctctcagccagttcaggagagcccatgtaaactttatcacctgtagctgggagttgcctgagaagtgtggaagctcctgtaggattgccacatgcccagaatctcctcattctgggtagtctaagtataattgacagatacattgatattctgggtttcctgggtggtggctcagtggtaaagaatccatctgcaatgtaggagccacaggagacttgggctcaatccctgggttggggaatcacctgaagaagggcatgcaacccattccagtattctcacctggagaatctcatggacagaggaggctggcgggctacattccataggatcatcaagagtaggatatgactgaagcaacttagcacacatgcacaatgatatttaccaaagacttaaaaatagaagtcatgaacagtaggtacctctgggaagtacagctgggtgtaggaatgaggtgggccggggatggccttttacttcgttttttcccccctctagtaggagttctcaactttagcacttttaactttgggggccagaaattgtctgctgtgagtgactgatctgagtgtttagcagcatccctggcttccacccaccacagactgatagcactccctctccagctgtgacaatcaaaaatgtctctggatattgccaaatgtcccctggggttgtcacggttacttctggttgagtaccactgttgtataccctttagatctattttattttcttaaccatgtgttcacattattcctataattaaacatgtgactgagatcatgagacagaggaggaaacataaaactgttgtgaggaagcagaagcatgaagtagagaaaacacattaagggataggaagcaggttagcaaagtggtaagaaatttggggaaaaaataaaagaagtagacacagagtgattcacagggctggaggagaaggagtgtgaagacccacatcctcctgtcaccaaggtccccagtgatgccagaatcagagataataacagtctgcatatgcccagtcagatcgcagacactgttatgggattcccattccatccagcctcataaatacccaggtgtccttacaataaacaccgctttacttaagctaggctaaaggagtgtatttctttccaaaaaaggtcctgtggattaagtgcccaataaagagagaggcccccacgtcttaggatgagtaggctgcaaatatggtctaaaagaactgtaaaaggaa

SEQ ID NO: 47137 - DNA, 678 bp, Bovine  19866881408570
  misc_feature (1)..(1): n is a, c, g, or t
ntggcaggtgatctgctgaagatgatgggatcttcacttctttcacctctttccctttggagtcatgactcagtaggcaaaactcagtagtcaccgtgactggcttaaagtgtgctttacagagcccttccattgacaatgaaagggaagtgaatggggtagagagggaaggaaggagagatgaacaggttagactctacttctcccaaccccttgccttcaaccaaaacagctcagcctttacctttttgtgtccacttatctgtggaatatacttgaacaaagatctcccctctaaaaaacattttgaaaatttctattctctactacatgttctcaacaacccaataaaaagccatagcttaaggagctgttagtgctccttgttaactgtctatcaccaccacctggctgtcaaaaggactcacgatgcataatgggcaggtggtcctgcttccaggactcccttctccaaccactatcattagggatgaataaactaataatgttgcaagttgctgtgttggatgtgaggctaagcatatcacataaaccagcctataaactgaacctgacattacactatctaaggagtaaaagattggggactgctgttccaaaaaacagtaatttaaacattgctgtctcatgtatatattactgtataacaaacattcc

SEQ ID NO: 47138 - DNA, 1068 bp, Bovine  19866881619274
  misc_feature (1)..(1): n is a, c, g, or t
natgattaatatatattcgttactgataactagctgtgccctaaagggcgttatcaaaacagaaattgtgctgcagagaaaagctatacacaatgagaaaataaactgcaagattaaagcatgcatgtttaatactggggaaaatcacagccctccaaaatttctccacatttcttataaaagccctctgcactcaactaaaattaaaatgatcttaaaaggataatattcgcagagtttacttaagtcgtttcagccacagaaactgcattggaaacaaatgttcagagtaattttcaaaacaaaaacaaaaatctatgatgacattcatgattaaaggtctgtgcaagacacattgttctacgttcccaagaactaggggaaaaaaacctcgtcagtttttagtttgcagataatcaaaggattttgtatcccagcagttcaaatcttctggatcttttcaccaacaagtactggattttcttttctgattttctcagcagccatcagtctttaattgtaagagcagttgtgtacatctgagtaatggtgtacactacagtaaacatttccacctggcattcaaaccaagtcccactttcttcctgcacatgaaacagattctttttctgttttggtttttcaagagacttggttttctcttcagacggctgctatgctgtttctgatactgcagtttgcaggtcatctgtttccagtattgctttgtccatagatgtactgtccacttggggaagacactacagattctgataaaagtgactgatgtgatacagggcttggctacatggacgaagacgtagcgtctagcgctgactgagcttctgggacactgccgtctgtgctctgggctggtaaagactcagacagactagagacagaaagtacaggggggcttattctaccatcactattctgaactactatttgaagatgttctttattgcgcactgaacacatgccattcgtactagggtttccataaaatctgcagccagcagaacaaagcacaggcactggctggattagtttcttagccacattccc

SEQ ID NO: 47139 - DNA, 767 bp, Bovine  19866881649191
  misc_feature (1)..(1): n is a, c, g, or t
ntgacgctggcggtggtgctgcccgaacacaacctgagctatgcctgggcctggccacgggtgggtcccgctgtggcgcttgccatggaggcgctgggccgggcgctgcccgtggacctccgctttgtcagctctgagctggacggtgcctgctctgagtacctggcccctctgcgcgctgtggatctcaagttgtaccatgaccccgaccttctattgggcccgggttgcgtgtaccccgctgcctctgtggctcgctttgcctcacactggcgccttcccctgctgaccgcgggtgctgtggcctctggtttttcggctaagagtgagcattaccgaaccctggtgcgcactggcccctctgctcctaagctgggtgagtttgtagtgatgctccacgggcacttcaattggactgcccgtgctgccttgctgtatctggatgctcgcacagatgaccggcctcactacttcaccatcgagggagtctttgaggccctgcagggcagcaacctcagtgtacagcaccaggtgtatgcccgtgagccggggggccctgagcaggctacccacttcatccgggccaacgggcgcagtgagtgtggcccgggctgtgttagggctaggggaggagggttgcggtgtccctggggctcagcactgggaggctgtagatgtagataggtgttgaggagctgatggtggtggttgggatcaataagcagacatggatggagctcctgggagaggcccgaggcattgtattg

SEQ ID NO: 47140 - DNA, 933 bp, Bovine  19866881651546
  misc_feature (1)..(1): n is a, c, g, or t
ngaagaagagcctaagctgtatccctgagagcaggcactggccagaggctgctgcccttgagatgagaaacggtctggcttcacaattagtctcaccacaaggcaagggtggtgctgagtaaatgtgggaggagatccagagcctttcccactcaggttttctcatcctctgtgagagctgagagtatcccaacttgaagtcaacaatcctgggtctccccctcaaccccccaggagtggggccttcagctctaggactcttaatcctatttaaaagctccagtgaactgccatctccatcaaaaagttgtccctgatttccccttctgtctaggagtccctctcctcctgccttccatgactcttgtgctacccttgtcacagcacagtgccttctagtggactgttcacttgtattctccttccactgtgagttcctctaaggcagggtcagtcttttcatcactgttttgagtcctcacacaggacctggtacaaaacaggtgctctgagaacatagaagcttgactgaataagcgattgagcaaattcctttaggagggaagagagacccagtatttcaggtaaaaccctgaagttccataaggagaatgagaaagagtcaagtgtcctctgctctttgactctggccaggaccacaatccacaattctgtgcctgtcaaactaggttttcttgtcttacccatggtctcttagcatctgaagcctgtccagatgtggcttttggctttgatgcttctgacttacaccgccagcccgttgtattagtgccccatcacaccagggaagcttggttgaaagggggcagagtttagaccgagtcacaatgaggttgggtggaggctggcattccactggaggaattctgaactctgtttagaatagcaggatccagtgcatgaacaggtgag

SEQ ID NO: 47141 - DNA, 3074 bp, Bovine  19866880297518
  misc_feature (1)..(1): n is a, c, g, or t
nattgacccccgcagccgcctgtggttcttttctcctgctggtctgtcaagaatctgtcctgctgggggagggccttggttcctcgtctggaatgagagaccctggagtgcaactcaggcttgctctcggacgtgcgtgccatcctcctgactatgccccttgtccagaaaaaaaaaaaaaaagaagaaatatataatattgaagtaatttatatcatcagggagatgatacagtgtatctcttttttactacagttttatgtttacttgaaaatgactgctggtgattgttactcataatgaagtgctaaaattttttgcaagtggtttttgaaggtcaattcaaatagatctaatattattcctgtagtatctatcacacttgtgtactagtatgttttcttgagtgaaagaaaatgaagtagtttgagctggttatttggaagttgcccgaaaccttgatcattcattcattcaaaaaatctttcttgagtgctggctagctttgagaaggcaatggcaccccactccagtactcttgcctggaaaatccatggacagaggagcctggtaggctgcagtctatggggtcgctaagagtcggacacgactaagcgacttcactttcactttttactttcatgcattggagaaagaaatggcaacccactccagtattcttgcctggagaatcccagggacgacggagcctggtgggctgccgtctatggggtcgcacagagtcggacatgactgaagcgacttagcagcagcagcagcagctttccttatcttaggcactggggatccagtggtgagtgtggggatgcactggggattgtgttccttgtgaacattttgtgctcctcgtgatgttactatcatgtgtgttctcttgtggatggactatatgctcatgtgtgctacagagaacactgatttaggaatggaggtctggattcagagtctaccatctatcctgttaaaattgttagactggagcctattaaccacctgaagttgacagttttttaaaaaaatattaattttttatttgtggctgtgctgggtcttcgttgctgcgcatgggctttctctagttgcagcgagcagggtctggctactgtagcgcggggtgtgggcttttcattgtggtggcttttcttgtggagcgtgggctctagagctctagtgcagcatgtggatttagttgccctgctgcatgtgggatcttcccggaccagggattgaaaccgtgtcccctgcattggcagggagattcttaaccactggaccagcagagaagtcctgaagttgacagttaagtctggggatctgtcttttgcgggggagagagttcagagccttatattagatcctcagagcatttactagccttccaaaatatgaaaaagaactgtgtttagagtctcatgtcttctctgagacctcatctcgtatttgtaataatgctacattcatttcctccttcgttggattcttgtgggcttcacatctggtaatgatataagttaaacaccataaaaggtaaagataaataaaaataagaattctttgttatagtaaagtgttcttttttttttgttgttcctcttagtgaccccaactggtggaaaggggaaacccatcaaggcatggggctcttcccttcaaattttgtgactgcagatctcactgttgagcctgaaatgagtaagtattttctggtctgtcactggacagtaatccttaattctctaaaattcagctttctggagcaagaattctcaaatgttagagcctccaaggtgtttattaaaaatgcaattccccagtcagtttatcaggctgtagacttttatttaggaaaaaaaaaaatgtgtgtgtgtatttatttgtcattgcagaaatgcaaattaaatgttgtagaatttaatcttgtatttttggtatcatcagttgacaatagtgcaacaaatgcagtgtaaccttgtggagattcttcctgttctaaggttagttcatttccctagtgtccagcctcaaacctggcagcagtagcctctaagcaacttaatggctttcctacacttaatgtcagatattcagaaggaaccatacctaaccatgtcagtactttctgacttccaaagctttgctgacaaggagaaacggactaaaaagtggggccaaggaggaaaagtggtattactggcaggcataatcattgcaggagatgtcaactgccagtagcctatcgaaatgttggtaggtgggccactgtatttccacaaaatactgtgatgaatcttcctaatgataagtttgagtcatcaggagtaagtcatattcttcctctgtttaaggaagcagaaatatgttctcatctagaaaggtttctattagtgactgaaatgttttgagtttaaagggcttttgtatgttagttatcttggcaaaatgtctcagctcatcttatctttctgtaacgccagatagaagagatcaaagagagttataaatcaccgtttgctttggtctttttcagtttacgagaattttaagaaaagatctttgtctcagttgttttatttacagcagtacttggtattgagtcttatccagaatactgctgctaagtcacttcagtcatgtctgactctgtgagaccccatagacggcagcccacgaggctcccccatccctgggattctctatgcaagaacactggagtgggttgccatttccttctccagtgcatgaaagtgaaaagtgaaagtgaagtcgctcagtcgtgtccgactcttagcgaccccatggactacagcccaccagtccctccatccatgggattttccaggcaagagtactggagtggggtgccattgccttctcccgatccagaatacagactgtataaatgtttatacaataaatgataaataagtgtctatgtattagtaaagatacacttttctttgaaaatacagaaatgcttttctttcaagagaaggctttaatagcatacattacagatcctggataaaacagtgccgtttcatagttattttcag

SEQ ID NO: 47142 - DNA, 838 bp, Bovine  19866880401978
  misc_feature (1)..(1): n is a, c, g, or t
nagttgtgcttaaattcttaagaaattaggaaagtgtttttttaaccttcaattttacttataaaatcaaccccaattgctgaaatttaaaacaggtttcataataaaatagcacaggactcgaacaaaggcatcatcggttaaatgataattctgttttcttttctcttaaatttcaggagactttgctgtgcttctaagctctggacttccgggtaagattgccatcctgatgaattttataagtgctttaactgccttcataggactatatattggcctctcagtatcaacggatccatgtattcaaaactggatcttaacagttactgccgggatgttcttatatttatccttggtggaaatggtaaggtttgtggtttttctgttttgtttttccaaacactaaaaatgtaaaacagagaaaaagacaaaatggaaggatcaagggtgaaacttgatccttatagaagaagactatagataacaacataaaggactaaaaaagtattctgtgtaaaccaaaaaaagtaagcaggcagaagaaatataatttgagattcagaaaatactgacattctttaagtcaatttaagtggaatgaatgaaacctttctaattctccaaaaggcaacatcagttcattctgctccagctttgcatctgtagaagatgcctaaacttccaactaaagaacaaaaagtttttttaaatacccagccattttgtttatacattagcaaatattgggttggctaaaaaagtttgtttgggttttcccgtaccgacatcttggccaacccaatatttcagctgactttgtcattaagttaaagaa

SEQ ID NO: 47143 - DNA, 1194 bp, Bovine  19866880423426
  misc_feature (1)..(1): n is a, c, g, or t
nttcagcccatctctcaccccagctactgctgcagagaccagttccaagagggcattaactatcctgcaccgagccttgcttcaggtccatgctacattcttccttctgttgccatccatgtgatggcatggaactgccagtaaacgcccttggcactcaggcatccataacctgaagtgtgtgtggaggggttacttacgggacagataaaccacagggacagaagcaccctcagaaggtcttgtgcagagggtgccatgtggcagcgttgaacttaataaaaacctattgtcttaccgactttttatccttctctgtttcactccacctgtccttccctcctgcttcctgagatcacctccctagtgaattgaggccttcacagaggcctttgtcttagactctgcttggggaaacccacatggatctttctaacagagaatgaatttcctctggccacccagagctgcattcattcttaatttcctttagaaaccattcagtgtcactggaagttggtgtgcttggataaagcaataccactttggagaattttaggctggctgactgccctggtgaagactttctgctttgttggcatcactgccaacaaatggcccaattttttgagttcttttctttttaggagtttgaaataacacagctgattactttgaaacaaataagcaaggcaaaaatatagctaatcttttcacattaaccctgctcagaaggtgcctggtacatttccaaggtttggtaaatagccagggtatgaaagtattcctccttaccctttagttactgtcatttattttctttgctgttgtacagtcttgaaaccttgttttcttcccttgaaatgacaagattattttctttggcacagccccagagtacgacaacggttaaacttgccgctatgtgaaagggctgtatttgtttagaagttactcaaaaggccgtgagagcaggcgacctggattatagcaagtagccccaggaaactcagagtattttctttcctgtctttttgccaggatgctagtttttctttggccaatagtaatttgcaataaggtcaggatttcttctagttggaatttcataggatgacaaccacactgttttcttacaagcaattctttatccttacaagactgggaggaaaaactttgaggggaaaaggatgt

SEQ ID NO: 47144 - DNA, 3941 bp, Bovine  19866880576809
  misc_feature (1)..(1): n is a, c, g, or t
ntcttttttttttcttttagtgactctctggagtgttccaagcttcatttattaatttccctacaaaaccctaaaggtaagaatgtcagaatatttaaaacttgaattttaaagtatacctatattattttacccagttgacttcaattttcacttaatttgtagattatctacacatttcacatagtaagtctccttaacctacggtccttagatcgcaaggagcctatgagtagaatttaggaagttcaacaccttgaatggaaaaattaacatcttattttcaataataaacttcagacaaaaatttggcatttctttcaattacgaatgtcagcaaaaaaccatagtagtggtggcagtacctctgacgccagcaatagaaatcacagatattttcatatcagattataattactccagatatctggaagtatgtctgtcttctagtttataatatacatgctgagttatttaggggaaacctgcaatttgctttgtaatttacaccgacatgtgtaaaaacattaggatgttttgatgatgcaaggctggctggctggttagatagacatgtgataaaacaagtatattaaatgttaatgggagaatctagagagagtacataagtattctcagtagaatcatcactattattatttaatatgtaaaaataagtcatattaccatattaaagatttggtttttaatatattttgaaaagtatatcattatatgattagtttcccttgtaattctacaaatttcatattacacacttgaaagtactgttacaagaaataattcttagggatttaccagactacaaaagggtccaaggcacactcaaggatttcatctatttagccaacaggctatgagaaggtgttgtcatcacttagaccaccctaattatcagaaaaatgcaagtcaaaattacaagtagaactaccatatgatccagaaatcctactccggggcatatatccagataaaactataattcaaaatagatagatgcatcccagtactcattggagcactatacacaatggccaagacatggaagcaacctaaatgtccgctgacagatgaatggataaagacgacgtgctacacacacaatggagtattattcagccatttaaaagaatgaaataatgccactgcagcaacatggatggacctgaagattatcatcctaagtgaaagtcagacaaagacaaatatcatatgatatcacttctatgtgaaatctttaaaaaatgatacaactgaactttttcacaaaacagattcacagacttaaatgaactcatggttatcaaaggggaaagatggggggagggataaactgggaattgggattaacacatacatactctcatatttaaaatagataaccagtgaggccctactgtatagcacaggcaactctgctcagtatactgtaatcaccaaaacaggaaaagaatttgaaaaaaggatacatgtatatgcataattgaatctctttgctgtacacttgaatcttacccaacattactaatcaactatactccaatataaaataaaaattaaaagaaaatgagaatgaggtatcacctcacaccagtcagaatgaccatcattaaaaaatctataaataataaatactgaaaaggatgtggagaaaagaaaacactcttacattgttgatgggaatgtaattggtgcttccactacggaaaacaatatggaagttcctcaaaaaactagtagtaaagttgccacatgatccagcaatcccactcctgggtatatatccagacaaagctacagttcaaaagacacatgccctgctatgttcactatttacaatagccaagaaagggaaacaacttaacatccattgacagatgaatggaaaaagaagatgtggttcatgtatacagtggaatactgctgctgctaagtcgcttcagtcgtgtccgactctgtgtgaccccagagatgacagcccaccaggctcccccgtccctgggattctccaggcaagaacactggagtgggttgccatttccttctccaatgcgtgaaagtgaaaatcgaaagtgaagttgctcagtcgtgtccgattcttactgaccccatggactgcagcctaccaggctcctccgtccatgggattttccaggcaagagtattggagtggggtgccattgccttctccacagtggaatgctacccagccataaaaaaagaatgaaacaatgccatttgcagtgccattaatgaacccagagatttttatatcaagtaagtcagaaagagaaggacaaacaccacatgacattgctcacccgcagaatctaaaatatgacacaaacgcacatatctacgaaacagaaacacactcacagacacagagaacagacttggggagtgccaaggggaaggtgaagtgagggaggggtgaactgggagtttggggttagcagatgcaaactgttatatatagaatggataaacacagggagttatattcaatatgctgtggagtggagctccactcttttccattcataatggaaaagaatatgaaaaaattatatgtataactgagtcactttgctatatagcagaaattaacacaacgctgcaaatcaactacatttcaatgaaaaaagaatttcatctgtaaaagtatcaggaggaaactgataaacaacattactccacaaagctatttcaacaacattactccacaaaggaaaaaagaaaagcatgtctttaaactgtcttataacaaccatgtgctcaagtaaaattctgatatctgataaataattgatttataatctgtgctaggtaactactgatgttacatacaatattccaaaacttaatggcttaagtaacaattaattaatattctctctcaaggttctgtggggtcattgggctcagcggaggggtttccatttggggactccaatgcggttatggttggatggttgctgaggctgagtcatctgaaggcttgactggggtggacatcccagatggcttactcatatgcctagcagatgacactggccatctgttgggacctcagctggggccggtgaccacagcaaaacgtgtgacctctgcatgtggctacagtgtctcctggcatgccatgtaggttccaagagacagtgtcccatgacaaagcattccaagataccccagggggagatgcaaaggttctttcttgaccttaaaaatcacacagcattacttaaatcatagtttacttgtcaggactgagtcacaggaccagtccagattcagagggaaaggacagtacaagggtgtgagtactggccacgtggctcttgtggagggcagaggggcacctgtagacaccagctacaacacatcccaaaccaccacacacagctgggtgaggacctgggcatgtaaacctggatttgatgggatttctgctagtcatgcttatccgtgtctccaacatagctaattatctagctaattatttctcaaagagtcccaaatgaattcctttcctggtgaatttcttattttggccctgggtggtaaaaatggggccaaatatgtgatttagtactccctagttctccattatctctaaaattcaatcattctcatttaattccttcagtaagagagatctttcttgaaaacaagagattagtggggctttttttttaagtctttgtaccctttccatttcaaagatcaagcatactgccaagaacacagaagtgccctcaaaatgatcaagcaattttcatcatcagtaaattaagatgttcaaaggtctcgtggcctttggaagctttggaggaatacaatagaagtaattatcaatatgaactcacaacccatctcaattcccatgccaactctcctggattaatttctagggagag

SEQ ID NO: 47145 - DNA, 2664 bp, Bovine  19866880581010
  misc_feature (1)..(1): n is a, c, g, or t
naatagtgtcagaggtgatggtaataaatctatgcaagttcaatctgttatgactaagtcccagctaaaatattagcttcaattttctcaggagcacaggaaaatttgtaaactctgtatacgtttcataagtactggtgaagacattatagtttgcccccaaacaaaccaaaacaccaaaacacccaccacaagcttttattcagtagttaatactttgggacaataagtgctataacggtaagttaaatgctaggaatatgaccttgttcccaccatggagcctgacattctagtgaagaaggtccattaaaataattaccagaaaaataattacagggagaaaacagtgaacaggctgagatgagagaatgatggtgggaagataccactttaattgggaagataagataatcctaagagatgatatttaagttgaaatatcccaaaagataaacaaaaaacaagtcagccttgggaggtgctgggaaaagcaatataggagagggaatggcatatgctaaggccctgaggacaaggaatgaagcacgatcagggacgctaatgtgctattctgctggtgtgtttatttaagcttcctcctctttctctttctgtaggtaatacatgtggaatatgtcttctgggaatctcttcatttatgtggcacaacctcacagaaaaacttcttacacaagtttgattttctaaattagaactggcatttaagttgtcagcaaattccacattatggggaaaatcaagtcttctaaggtttaaagggaattctctcattttcttccttctaaattaagggctatctcataaaggctaatgtcaggatgtttttgagacttttctatattatgtgaattcaagcagtcaatttattaaggttagacaatgtacacaagtgataataacaattgctatttaaaaaaaaaaatcttttagcctcaccatggggcatgtgagatcttagttccccaatcagggattgaacccatgccccctgcatggcagtgcagaatcttaaccaatgggccatcaggggattcacataactgctaatcttgaatgaatgcctatactgtactaggcactgtgtggattcgccaatattacataatttaatcattaatttttctccatttttcactgatgaaaaaactttagcatagagaagttacctgagcgaggttacaaagctaaaaattgatggagataggggtcaaccctttagcaatctaaatttaagttccatacatgcaatcagttcagaaaattaaaagccagaacagatccttacatgcaactcatcttttctgttaatcaaaaatacatttttaaaaattctttaaaaagttgaagtatagttgatttacaatgttgtgttagtttcaagtgtgtagtaaagtgattcacttatatatattatgtatatatgtatgtgtatatatatatgggttctcaggtggtgctatggtaaagaatccacctgccaatgcaggagacaagagatgcgggttccatccctgggtcaggaagatcccctggagaagggaatggcaatccacttcagtattcctgcctgtaaaatcctatggacagaggagcctggtgggctacagtccatggggtcacaaagagtcagacatgactgagcacaaatatgtgggtatatatttgtgtgtgtgtgtgtgtgtgtgtgtgcatatatattctttttcagattcttctccgatacaggttattacaagatattgaatatagtttcctgtgttatagaaaacatgtttctgtctgccaggcacacacataaccatttctaaaggtcctaatttgtcatgacgactttcaagttattagctctatctttgctgaacctggaactctccccactccctttctccccttcccttctcccctcccttctgacacactctccccctccaaccactccacacacacaccttcacagattctccaattttatcttcccaaaggcacaatgaaggtgcaatgaaacagataatttctcattcatcagtgtaacacaattttgtgacaatgtgcctactaccctgaaattttcttcacttcagagtatctcaactggaaagcattctttttgttacttatctacaatggaaagtaggtaactagaataggaaaacaatggaagtcaagaaaccggctattgaaaacttccccttttccctgaaaatgaacataagtttggcaagctggtcttcagtagcctctttggcagctactcttgtctgaagctggctggaattcaagtgtctcctgagtaatctttcagttcaataggaaccattgtagtggcactgaaactaaaattactaaaaagtagaaatggtaggtccaaggctcagtgatgtgacttacatatttttcagagtacattacattacattaaaacacttacactcaattattcttcgaaccaagggtatgatggttatttatgttttgtagaagagcttctgtccaatatttgtaaaatttgacactttcacaaagaaccattttgagaaagctaatgtggctcagaccatgaactccttattgccaaattcagacttaaattgaagaaagtgggaaaaccactagaccattcaagtatgacctaaatcaaat

SEQ ID NO: 47146 - DNA, 1518 bp, Bovine  19866880582687
  misc_feature (1)..(1): n is a, c, g, or t
ntggttctcgatttctgggtccagagcccaggggagccttgaggttattccaagaagcctgtgacttttttcttctttaaaaagattatatttattttggaaaaggttgagaggcactgatttcatgtgtatgttatataatcatggctgtacacgtgctatttcatagcaatgagaagaagtgatatttcaaggtaaaaaaaaaatcatgcagctagaaattgcagttactctccttacttccttaacatgcagaaaatcttttgcttcaaatgagatggccatgcctggcacgggaacatcgtcttcgtgggctgcactgtagctgacatttgtccgaactgcaaatgcaacgggctttgtctaaaatggaaaaaggggggaaaaataaaaaaagaaacaagtgttccttctctttccccctcaaaatacaaacatacacggaataacggctgtcacagttgttgtttttcctcgatttggttctttatcacaaaacaccatcttagtatttccaacaggggaaacctttgggcgctcagccacatacacccatttctgaactagaaaaaggccattgtgctttatgaaagcactccaagcaatgaaagtaaagatgaactactgaaatatgtttacacaacataaaaacttgtaacaaatggaaatcaggaaacatacacggggttgaaatgccaagttcttgtgtttcagtgaaaaagacttggccactgccatatccacccccaaatctactttaattaataatagaagatggaacttccctagtgccccagtggttaagaatccatcttccaatgtaggggactctggtttgatccctggttggggaactaagatcctacatgccatagggcaactaagccctcatgccacaactaagacccaatgcagccaaaaattaaaaaaaaaatttttttttaatgacataattccaaaacatactatgttttgcatgaagaaagaaccaaggaatatatcttataactattaaaaactacattcatggctgctgggtatcatgaaagcaatgactttctattctaatatttgtcctccttgagttttcttagtcactaaagatgataacatttaataagttatttttcattatttgatgctttgcaaatttacagatacattttgtcctctatcaagcaatacttgcttaatcacaaggttaaaaaaaaaaaaggtaaactcagaaatagtaaaaggaggtattgctctaactagcactgggtttctttcacaatgtgggcaagtggatttcttctgagctgtttcttcttattcaaagagctcttcatcagaactgctcatgaaggatgatggggaactggaatagaaagaacccatcttcacttctgaattttccatagttaatctgttctagctgactactgtctgggtgaggactgagttcagaagagccatggttacgtagattcatccacaatatgcagaaaggaggtccaggtcctagacaaaggcaca

SEQ ID NO: 47147 - DNA, 908 bp, Bovine  19866880662993
  misc_feature (1)..(1): n is a, c, g, or t
nccaatgcaggaaagtgaaaagtgaaagtgaagtcgttcagttgtgtccgactcttagcgaccccatggactgcagcctgccaggctcccccgtccatgggattttccaggcaagaatactggagtggggtgccattgcctacactttcaaaatatttttaattatataagttacatgtatccattgtagaatgaagagagagacaaataatctctgcctgaaatttgcccacccaaaaagcctcactattaaatggtagcatagtttagcctccagagttcttgcattttcaaaagtcaccctcccaacgtgtgccttacaattaatctccttcctttaggaagtgttgatttatgcagttagaagtggtgtatctaattaagcttttgcctttgggaccataaggactttctgggtcattctgccttctgtcaggaagagctggcggtcattttcgtaaatccaaatgaggttcatcacaagctgtacccctgatctcttgggttccttcagtacgattagttgaacttttgtaatatttgccctggcaggtacatctcagatttccttttctttatcttaatattctcactcctcatcatacagttccaaaatgcaacctgctcctaatatctaacaatagctcatctgggatcacttacttatctcctcaggacctttactccaaatgtgcattctttacttacaggaaatgttagttaattggattaattgatgcttctatttattcttcaatttctgttgttttccaatttatgtcaaatagttgcacacaaagcattgcctttttcctttaacacattttcctggatttataaagttggcttttttcatgctgcactctactgtttcaatcatatgtctatttccatgtctatcttcacat

SEQ ID NO: 47148 - DNA, 1362 bp, Bovine  19866880709522
  misc_feature (1)..(1): n is a, c, g, or t
nattctgaaaggaatttccatctcagatttctttgaaatggaacttatcactccataaccaaatggcatgttagagatgggaaaagaaatttaaaaaaaaaaaaaggacactgcttttctctgaataaaatgaatggcatctcaagttcccctttgcttctttttaagaaaaagcttatcacacagtctgaacccgatgtgctcactggtttccataatgtgttttgcaatgtggttagagagcacataagaggaacactgagtccgcagccatgccaagaaggggagggaggcatttccttttatactctccctttgctgtttagaagaaggaagtttcagaaaagtatgtcagctctaggattttttccccccttctcaagaaacaagtagccatttaccagactgggggtgagagaagggtagagtttctgatttataacttctaatgaagcaccagctgtcaggattaggtcagtgcagacccggccagaaattagactgccgtggtccctgtgccaaacaacatggggcatcaggtgctgtcaggtctgagctgactccctttgagtaggacagctttacgtgagcatagcaatttggtatttaattgttattttttttctctaggaaggaaataaaatgtatgaacattttaaatatataaagtgcagtttttgagaattgcaaggtattttcaaaataaacattttcagggtctggtaagagaaagagaacataaagaattcagcgggcaatactttattttttttaacctgactttattttattatctttttggccacagggcatgcggaatcttagttccagaccagggatggaacctatgccccctgtgtggaagcaaatccagcatgcattactttataataacaacaaaaatttaaggccccagctagaaattaaagggatagatcatggatttttggtatctaaatttccttgcataggattgaagagagtgacaggttgtggagctgatggccagagagccttttaagtcgtgtatactttagtagtgggacaccagtttgctcagactctgttgttgagagtggagtgggtgttgtaaaggctgcttcctatgaactcacaaactcttcttggaatcactcattggcatgtctgcccgtgctcagtcactcctgtcgctgctggtgcttgggaggctttagaaaaccttgagtccccgccaccttcgcggggtcctagaggctgggtgagctcacaccgctcatgcgcatgctctgtggtggccacggtcgctggaaggtacccaggctgcactgccaggaattccaaatgccttccaaagcttctcattcttgcttcaagggctgt

SEQ ID NO: 47149 - DNA, 1521 bp, Bovine  19866880713006
  misc_feature (1)..(1): n is a, c, g, or t
nttttttccttcttgagtaaatttattgtaaattagtctttccatttcctcagttcttaagattaatttcctttgtaaagtttttaataaagttcagttaaagtatactcaataaaactagtcgtagcatattcatttaaccacaaacctattttagtcaagtgatgattaaattataaatcactcaggcaaattataattactttctattgtgcatatttctcaaaaacagtaacacatatgtttttcaaaatcttgaatatattcctttctaagaggcgtgtgtgtctttaattaccaaaagagactagaagttgttcaatgaacaatactactaaactaaaatctaactgtcatgatgtccacttatttcataagattaaattcagtacaataaataacctgattatcactctagattttaatactgttctctatgctctacactacttaagtgaacagacagatcaattgcatggctataaaatagtacatactttaaaaacacatacaaaatgtcttactatctcacactatgcaaatatcaagtttttcatctatataaacttaaacctatggtgttcattttggtgagagacaatagaacaatgtagcaatgctgatttttttcagttaacgtaagtacatgaaatgcggcacttgtaagaagtcacctttctcggccccctggtatttctctaaggcagtgtttctcaaacggatagtggaacctctaaactgcctatatcaagctgcccaggtccttgcaaaaaatgcagatttctcagttaccaagccactgatgcagagtctctaaggcagggggtctgggatcctaggatcactcttatagaagctgtggtcaaaatccttttttctacagtcttaatcctaaaagtaaaatccacaaaatgttaagtggatttaaagaacaattttaattttcaagttgtacaaatgacattttaaaatataggggaaaggcaataccctaaatcaagaaataaaatgtattaaaaaaaatttttttaatgttttagtctcactgcatggcatgtgggatcttagttccccaatgagggactgaacccgtgcccctggcagtggaagcttggagtcttaaccactgtacttccaagaagaccctaaaatgtactttcagagcacgctcaaccttgcattatgtatcatcttggtaaagcagaatatcatggtgagagtatacagtaaagtagaacagaaaccgtagttaagaacttgaagcaaaatcaaagtatattaattaatcacagagttttgcagtctaggagcttaaacatcaacataaaggttgaattcataaaacgcctggaaattccaggtgtaaaaatcatttagcactttttaatcccttaaaaagacatcaatcttcatgtatcagagcaaggcatattaatcaggttaaaaatcccaatgccacatttcaaagccaaactccagtgaattagaccaaaaagacctatgtgttactctgcaaccaaa

SEQ ID NO: 47150 - DNA, 1521 bp, Bovine  19866880716202
  misc_feature (1)..(1): n is a, c, g, or t
ncaggccagtgagcccccagctgtccctgcccgctcccgcccttctcagaactgcccaagctgaaaaggagcgtggaggaagcgcccacttttaaagggcttctgaaattagggaaaccctcccaataaggagatatcctgtcacatgagggtggttggaaaaacaggaattcaaagttacaactttgctttgtaagctaacttctgagaagagcagacacagaggaaggggagagagggacacgtgtgggagagagatgaggaagagggtggaggcgactgggcgcctgtgagaacccaggagccagggccggcctgctgggaaaggggggaagtgaaacagcgctggacctcccggctctgcttggatgcgggggagggcaagctggaggccactacctgggctggaaaagtgagattctctctgggcagcagctgaatccagggaccttcagcagacaagccctggaatgtagtggagatggcaggcaataaagaggacagttttctggacttcttagcagtccagtggttaagactctggcctttcaacacagagcgggcataggttcaatcctttgtcagaaaattaagattcccacatgccacatgcggcccctcctccaaaaatgaaaattttaaaaatcctgaattataccaatatggcattacatctaaaataataaactattttttaaaggatagttttctggtggaaatgtcttcttaagcgctgaaatggatcccatcctactctccatattcaacgtttagagtttccttttttctttgaaagcttcgaaagtggcttcatatggatctttgttcctttcagctagaagaaatgtaaaatagagactaagcttaagaaagaagctcagttgtaaaaggaagaagaaagttcctagaagtctttttctagaaagttctcaagagatccagagaaaacagtgacaggacttgcagtaaagccccactgcccatccttaacaatagtgatcctcttcaggtttacaggggtcgtcttgccaggaggaagtctgctcatttggtcatttcatgataggtgggataatttctttttaaagaaatgaaaacatctttcatgaaccatcatattaaccctacagatctattgtgttatttttcagaagtaaagcatgaattaagaacattttgaagcagatatcgataattagatagccagctcacaactggagtgtgggaaatgttagccaaacaaaaggaagctgctggagtatttcttgaaattttattttagttttttaatttaaatttactgattttaattggaggataattgctttacattattctgttggtttctgccatacatcaatataaatcaaccataggtatccatatgtccccaccatcttgaacctcccttacacctgccaccccatcccacccctctaggttgtcacaaagcactgtattttgagctccctgcctcatacagtaaatttcactaattttacatatgggaatgtatatgtt

SEQ ID NO: 47151 - DNA, 793 bp, Bovine  19866880735234
  misc_feature (1)..(1): n is a, c, g, or t
nagaagggaatggcaacccactccagcgttcttgcctagagaatcccagagacaggggagcctggtgtgctgccatctatggggttgcacagagtcggacacgactgaagcgacttagcagcagcagcagacattagaaatgagtgacagtaaatatcagcaatgccatctattgaaacaggcaaggatgaaggactgagcaggtttggggaagaaaccaaacactgttattatctctatttcccatactaacaataaggaaaccacagcacagtatatttcagcaactaagcaaagttacatggctggtcagcagctaacctgggaattgagtttagacagtgcagcttcagagtctgaattcttaacactaagctaagtcgcctcgtaagactccaaaggggaaaaaaaatatatcaaaaaataagttctaagaccgaacatttggaagtcacaaaaaaaagagagagagagaaagagagggaagccaaaaagacttaaaaagaactaagcagaaagttagaaaaagtttggtgtcctagaaaccaagagaatgaagtacatcaaaaacaggaatgctaagagatcaacaaagaaatggactaggaattgaccaatggatttggcaaaatgggattcaccagggactttgaaataaaagcttgatggaatgagttatctttataattcaagagttcaactgagcaagaaataaaacatctgaaatgagattcatgtgttcaataaatgtttactgaatgtttattagtgccagacagtggtctacatgttg

SEQ ID NO: 47152 - DNA, 1235 bp, Bovine  19866880739283
  misc_feature (1)..(1): n is a, c, g, or t
nttttttgggctccaaaatcactgcagatgctgactgtagccatgaaattaaaagacgcttactccttggaaggagggttacaaccaaacctagatagcatattcaaaagcagagacatctctttgccaacaaaggtccatctagtcaaggctatggtttttcctgtggtcatgtatggatgtgagagttggactgtgaagaaagctgagtgctgaagaattgatgcttctgaactgaactgagtgtgtatatgttaatcccaaattcctaatttatccctcttcctccttcccttttgaagaaataatgagaatgattgaaatgtcaagtcaacatttaggcccagatgttttaggaggagtggtcattttgttaaagttaaggttcctgtttgctaagtctttgggaatctctccacacacacagacacacacatcagtacataaacagagtcattgccaggagactaggagctacagtcttcttgattttaaattcagaaccatctgcccttgctctgccctcaacgctgtgttttccagtagaaaacaaacacattttgtgcttttccaggagaaacctagagtgaggagcaagttcttgctgttctacttgcaacagacactttccgagcattgagactgggttgagttctgaattcagcacattagagatgaggacaccttttatgtcttcatcagtcattccttgtatgccaaggaaaactgcaagatgattcatgaccacatcgtgtctactcaccttattatttaagagtaattattgggagtgtcctcatatttggtttcatacgcatagggtgaggaaagagaaagcctcactgattgtgaggggaattgacaatgacctgccacccgatacccaccagaggacactgctcgttttcgtctctgatccctgggaagtttacagttttccagaggagctaaaatatgcacactgtgttcagtagaagagagtgggagtgtcttaaagagggaaataaagaaagtgctttaggagttgagtattggaagactgtgttcttttcggggaggaagattatgttcttactagggaatcacaaaaggattgcagaagaaattagatgtgatccaccgacagtgggaaaggaagggcattctaggaatagtgaccagggagatgcagacatggcagagggagaagcttgatttctgtagagtactgaggaatcttttacctggcattcagg

SEQ ID NO: 47153 - DNA, 1024 bp, Bovine  19866880804595
  misc_feature (1)..(1): n is a, c, g, or t
ncttctgtgcactgatctgaacattttgattttctgtttagaaatttaacaatgactggtggatagggcgattggttaaagaaggctgtgaaatcggattcattccaagtccagtcaagctagaaaacatgaggctacagcatgaacagagagccaagcaagggaaattctactccaggtaggagacaaatatcaagtgtttgtgtcagagttcagactgtattatcattcatgaaccattggttgctgtaatctccaatctttattttgtgttagaaaacttacattgtattcgtttctataatgatgcaaaatccattgtcaatgaccatattttagtatcaccaagaatctcttttgagcgcccacaaataagtcaaatagaagatgctttgtggtttggaacatccatctccgttcactagtattttataactctcgggctcttttagttcagactggtgatacggtttactgacagcattacaaatcctgtattttaaaaacatcacccagcctttcattttcatcctcttcaagagagaatcaaattaagtgttaccatgaaggaaagaaaagagctaaggtcatagagtattaaattcaggctttagtgcagaggaaattctgaagccctaatcttgctgaaaatactctggcatcaagcaatcgtggtgactaatcccagtatccggagctgcctggcatggtaggaagatgttttagaaatgacagtctcagagaccagcaaagagcagctcttgtggtctctgagtttcactttcacttaagaaactcaattttcagttctacccactgcttaacacttaaagagaaactcggtaagaaagcagttaaaattgtccttgcagatagcaattagaagagttatgtaataagctggggccaaacgatcttttttcctaggagtcttaaggctgtttgcccctcaccagaatctttagaagggctcctcgaataggagtaaatgtgaaaatgacccccttgcagacaagtacaggaa

SEQ ID NO: 47154 - DNA, 2534 bp, Bovine  19866880823639
  misc_feature (1)..(1): n is a, c, g, or t
natattaagtaaatcaaaatcctaaaaactgatgtttttcagatgtcatgaaaaacaataaatcacaaattgatggttctgtaacattctttcccaaataacctgtccgaaatcctaatcgtcaagaaatgtctactatagatttttctagattcaatctcagcagcaccacctactgataatttgaattcagtactttatataaactcagcaataggaaaattaaccaactaattggaaatcacctagaacatgcttggcttttcataaaatatgtatgataatttaactgacagaggaaagtgttttaatatttttgcaagtggtgaatcaaactgcattcaatgacaagggttgcttcaatcatgcaacagattgaatacttatgttccctgaaaaatttgttggaattctaagccccagggtgatggtgtttggaggtagggcctttgagaagtgattgggagagagacccattgtgaatgggattagtatcttctaagagagacgccaaggagctgtctccctcctttcttttgccatgagaggttatcatgagaagacagctatgaaccaaaaagcaggccctcacaaactgaatctcctagcatcttgaccttggactttacagcttccagagccgagaaataaatttgttacttatgtaatttccatctcccctctgctacagtatttttttttttttggctttgccatgcagcatgtggaatcttagttccctgaacagggattgaatccatgaacccttcagtggaagcatggagtcctaaccactggatcaccaggaaagtcccctggctatggtattattacagcagcctgaagggacaaacacacacccagatatgtttctactatgttggctattctccatccatctcctcacctgtgctcccaccattctgtattccagttgggtttggccagtgagatgactagcaagaaatcagagggcagtgggagacactagggtgtttattcctctcgtccttctctcctgaccactgtgccattcatagctctgtccatctgtccctcctcctctagtccagctctcaccttgtgttgctgtgtaacacttacccctcttgactcagaggtcctgacagtaaaggatgcctccatacccttgctggctccttcagtcttcagttaaggagttcttttgcaaaagcctgtttagttgacctcttgtgtgtaatctgactttctggcaggcccctgacagggacacggagctctctggagactcatcgtgcttactgtaaaactgaagtgatcacttactcaacacttaggtacctgagtacagtggaaaagatattgctctaggtacaatacacataaaaatatgaaaaagattccactattaggaatctcccattaatgagaagttcatattaatagacatacaaggggtttgggttgactgaaaacttcaatgattccacataactattctaatttctatacatagtatcactaatcttaggtatcaaataagtcagccttttagctatcacgtttagctatcacgtttccacagtgccctaaaagagtttcacccagtttatcaccatcagactggaaccttgtggtttatttaaataatcttaaataagccagctggaaacctggaaccaactacttaacctgaaaatgtgtatttttacattctaatgaggtagtctcaccaacaaatgtttactgtagagttcttctgtgggacataaacacacacacacacacacacacacacacacacacacacacacacacactacaaaattctgcctttatgtgaagattctggagagaaggggctgcctcattctcccctgtagcttctggagttcctatacgttagaaaacgaatcatcattttaatgacaagctgatgaataagagcacaaactttacttagctttgagccccagccttgcccccatctggctggacaaccttgagtaaattaccaaactctgtgccttggtttcctttcttcatcagcccactttaaatgagagatttgaaaagcacttaagagtggtacccattctacagtaagaacaatgcaagtgcttgtttaataaataaaattaaagtgatgccattttttcacatcactgcaggaacagcagcttgaacagaacttaagacataattctctcattttatagatgataaagctgaggaccaggaaaagttaatgcaataagccagggtggaaaatgtgactgacggagatatcacccctaggaggctcactcaccaacacagcatgctttagaaagaaatgcagcaattttgtccaagaaacaaaactctgatgtcaaaatgaacctataaatgacctgcatttacatctcctgatttataaaagtatttaaataagtatctactaagtgctatgaaatataaaaatttagaatgcagtaaacctgaaaaacctggtacagactcaaaagtcagccaactgaaggtcaaatcgatagttatttttaaaaaatcag

SEQ ID NO: 47155 - DNA, 1699 bp, Bovine  19866880995722
  misc_feature (1)..(1): n is a, c, g, or t
nctttaccttgtttaatacgttgcttacttcactagcaaaatctctcgaacatacttctaagtgaaaaattttgccacagtttgatacacatgctcctagaagctaaaaggataaaatcggaagttaaaagggcttgattttggcagacaattttgctgtagatcttaaaacgaaatcactcacagtgagagcctgcatagccacatgaggatctttatggtttaccctcctcataatagaccgaagacaatctttaggtctaaaaaacgaaaaagtgtaacaattagttgtatattccgcttccccctcccaccttaactataagaggcaataagttgtgatataaaatgggagaacctggtagagaattttaatttttattaatgacacaattgaaaaactgtacactaaaaagttccttcaaatttttcaacaaaattaacaggctctatccttagcaatcatagactaggcatttggggctaattctggttggaaggttttgaaaataaaatgacagatcaagagttttacttctagtcatgatagaataagtggaactcctgttgtaaataatcagaaaactggaaaaatatatttaaaatacacttgagacgtcaggccacaggtagcacggaatgatgatctgtaagaaagaatacaaaatagataaaccagacatttgcttcaactttctacacagcggcactgcagatactgcaacaggctttctgtctataggcagtttctggatctcagtgcagagaaggtgatcccaggaagacagcggtgatctcactgagttgaggggacattaggattttagcaggctaatttttgcacttttgaaaagcatgttgacaaacacaaaattatcacttcaaagcatggcaggggccaaatataaaaaggattatctgaatactaaaattgaaatcattaaaaaataatgatccaaaagtgatttagcactatgagtaaaactttttagaaaataattcccaatacttgctttgccaccaaggtttaaatgaaatttctcatgtattgttcataaatcacattaaaaaaaaaaaagaatctaaactgcagggacttgtggaaggaagatggagaaaggcactttgaaatggatcttgtactttgtatttcactcatttctatactgctgaaacattttgccacagccaattttaaaaaccaaagcaaagacatgtctgacaccaaagtaaagtttgctacggcaaccataaaaaggataatgcaaaacaggaaagtggactagaatgcttgaatcctgataaacacttcatatatgctaacaaagcaatatctttttagatacattaagctaaaaaaaaatccattcagagttgtacataaaattggtgctattaaacaacggaagtgacccacaaaactctagtattaactacctcattctgttccgtgtttttttaagtcatcttttcagtatttccacaagattataagtaaaatacagaagtgaaactgaagtatttgtatacacataccattattaaatcttactatgcaacaaaaaattatggctaaaatattgttttcaaaaaggcataagagttataagcgattttatatgtatacttatagctgattcacgcttttgaatacagcagaaacacaacactgtaaaacaattatcctcgcattaaaaaa

SEQ ID NO: 47156 - DNA, 3540 bp, Bovine  19866881038579
  misc_feature (1)..(1): n is a, c, g, or t
ntaatgttttccccacatttcatatgcaaatttggaagtttttgctgatattcttcaaaaggaggtttctctgaaagtctctctgctatagagaattctccagaatccaaaaagagtcacttctggctccaagaaatatgaaggagcttaattgaattctatcttgaggtacaggaattttcttccttcttctctgcttttgatggtttaaataaattatgaatggaaagtattcatctttcaattatgtgttggaaaaagaaggctagtaaatcatggcaggaaatatattaggattttctcaacaaggaggcagtgattctactctgacttacccatttcatggggaatttcatgacacaagatagcaatggtcgtggtcactcccgcctcggatgaagatgagaaggctgctcctattactaggccatctgcaaaattatgcaggctgtccccaaccagaatcattattgctagcaagctaatggttttgcctaaagaacaaaataaaggtgtgagaagtattaacagagcacaacacagttcatgaaatccttcgattacaaccaattttcccttccatccttgacattcttaaatcgcatcagattaagtaactctactttgtttcagctttcaaaataagtcaggactagagatgcaatatggcactcttgcaggtatggtcgctgcttttctaatgcattcaagtaattaggaaataaactatatttgctcttctatctccctactcaggtgtgccaaaagaagaaaataaaagtaatactgcgataacttttcaaaatacgttcaatgacctttccacataaatcttttgtaaagcatttttaaataatttaagaccttctgggcagaatgtcgttaaaatggagtctattttccaaaactggcccctgaatcagactgttcctcgtgtcaatctgctggagtcaactgttaacctcatgcccctctgtgatcatccccctttctggttggtgctaagaaccccccactgccccttcactccctaaatgtgactgtgatagaaccgctgccaacacttgtgattccaaagttagctttggaatgttttgtctttcagaaaaataattcagcactagatcactccagtactcttgcctggaaaatctcatggacagaggagcctggtaggctgcagtccatagggtcgctaagagtcagacctgactgagcaacttcactttcacttttcactttcatgcattggagaaggaaatggcaacccactccagtgttcttgcctggagaatctcagggacgggggagcctggtgggctgccgtctatggggtcgcacagagtcggacacgactgaagcgacttagcagcagtagaccaactagatgcccaataaagtagagagaagctgtcttcttgggattctattatatcgtatacattatctgattaaggagacagccaaagaaataaaccggaccatatggatttaattaatgaaataattagatcattaattcggctcaagtttttaacagacagaatttctgctttcagaaacctgaaattgtatattactatttggggtggaagcattaacaagtacaaaaagtacttcagggataaacacatatcatgacagtgaactacctaggtatactacttgataagaagagtcattaaaatcaattgctgtagtctaaaaattaattagtcagttgatataaattgtgtgacaggtttgaggggttgctattgttactattagaaccgcacacaatattctaacaattggacacccataaaaatagggagaaatcatctcatttctgttattggatctgaggtggtggagggactatattataatatgatttgttattttattgggggaatatgatgtaacatttcatagcccacactgtgaaaaaaagaacttcagtaaacagcatactagcccagacaactggccaggaggtaagtgcactgactgtgttgtaaagacatcccaagtatttcacttttcaaaatcattctttatttagaatcatctctgtgagactcagttctatcgttcttgtggtttcataatccattttcttccttagtaaaaacgagaagattttaggcaaaggtcagaaaaatacagaataaatatcaaattactgaattagagagagttgttattggcattgcctggaagctctctgaacctaataatgcaaacaggtcacttgagctgttcctgccaatattcagaagtaaagcttttctttgtggaaaaaaaaagaaaagcaatcgaaagtagtgcatttgacaatgttgtagcatacaaataaattgtgattcccaatttctgtgcatatgcctacatacagttttgatattaatagcatatattcagatggaaaaatctttacccaatttatactctgccaagaaacagtccaacctatttttgtagcctattattttattatcactgatgtggggttataaatgtcagatcatgaccatgtaacaagctacaggcaaatatacatatttgcatataagctataaggaacacaatgtacatactggttaagacaattgcaacattattcaatggaagataagacaagcatgcattgacaagtcaatgtactcactatagaactattgataatattcaatattttccctttcctaggaatctggcagtcatactgagttccacatttctgacttatcagaggttttccatggtgatacatggattggatatggtatcatgttgctttttgtttatttaaatcagactgtggatagaccttcacatcctgagctctaccaatgaggtaataaaaaacaaggaatcaaatatttgaagttaattcaatatgtccctggcaaaaatggcggttgggtaatcaaatttggatttgttcactgttcattctgtatgccaagcttcatatctgaagtggaaagatatgaggcctacaaaacatttgaataagaccgtcattattccctgagctagcaaccagtctctgctcctaatctgactaggtgtggcctttcctcttccttttttccaaaaacaaatacaaagaaatgtctctaatataacttctaaagtgccaggcattctaaaatttctcctggagctaaagattcgggagttaaaaatatcactagaagtgtcctgaaaatagaattggaaggactatgtagttatatattttgaatcacagaaagaacctacaggatttaaaacatcaaacacattccaaatagtgattgttaccatcatgttcattgctcttagcatttaaatcctcaaacacattgcaaactagggataaagaccatttctaattttatttcctggtgcatagacagtgcctaaaacatccatttcttggatggatggatgaacgaatgaatgaatttgaaaaaaatataggaatgcatgccgaaagaagatcacaaggaaattgttggtgcattagcattccttagttcctcaatgctgagtccggtcagtacttac

SEQ ID NO: 47157 - DNA, 1333 bp, Bovine  19866881052456
  misc_feature (1)..(1): n is a, c, g, or t
nagacacagctttgatctctgggtcaggaagatcccttggagaaggaaatggcaaccaactccagtattctggcgtgggaaatcccatggacagaggagcgcggtaggctacagtccatatagtcacaaaagagtcagacacgactgagggactaaacaattcctgctataggaacccctctgagaaaattaggattaccctagcatgtgtgttggtgtagaaaaactcctatcacccctgtgaattttacaagaaccaaaaaattgcaatgcattttctgtgtcccatgcattttatattcacttgataaaaatataagtaatctattaatttatgttatgataccacagtgagggtgcatttgatctacagtgtttattctagagcctctcctgtattttctatttaagtcatgaagattggtcttaacctagaaatgaaaggaatagggatggggagaagtgagagggtggtggggtggaaggagggaggggaaaagtaaggaagattttcttaagaatgctttatttcatttgcacgagactttacaaaataattgcccccccagacaaaacatagtttagaatgcagtgatagaattttatgtttactttaggaagcctggaagtgtgtatttcttcataaactttcaaaaaagtattcccattaatactggaaatgaataagtatgattctttcccaagcctcagtcactttatttataagaagagtttggactaaatggttctataaatattaactccagctaataaatcaaccaagattttacatttgttcctaattgctgtgatagcaatttcacatggttatttatcccagtgactttatttggaagggtagttgctcagttggagaagcggttcaaagccactttgagctccgttattgcttagcgctgtggttactttcaagtcctatttcagtgagcaaatctctctcttgcattttgtttaggaaatggagctatcaagagcggctttatattgaatggatgagcatgatttgatttcgattgcccaacaatatcatatatcatatgtattatctatgaattgtcctatggcataggatatactttccgcagcagattaatggaaggatattgttaagaggaaaagaaaaagggagagagcacaggtttcatctttgagacgtttcatctgaaataggagcatgtcaaacatcccaggtgcctggtactatagagtcaaaaagccctttccagctgtttacacttcagatgcaaaatggcaatttgacagactaaccgggtgatgtgagcgtctgcgtaaaaaggctacagacggagca

SEQ ID NO: 47158 - DNA, 1029 bp, Bovine  19866881188032
  misc_feature (1)..(1): n is a, c, g, or t
natcctattaaaagcaattaatcttgctgttgggaaaaatcattcctgcagatgtcatctttaaaaatcttgctggcacttactactacatttattccttacatgtcaactgttgagtccaaatgacaaatgaccctgaatagataaccggcacaaaaaacctttaagagacttcgtaagcttttactattgaataaaattgaatattctctttaagatctgataggaatacaactatccctttcacagccctggtctctaataactttattaggttgatcatatcagattttgaccttgtttgtcctggccgtgtcacatatctctctcatagtggccaattttccaaggtcacagatttctttacactctgcccttaagtattgatgagctctttgtcgatttcctatttgttttgcagccaggaatctcagatcagtgttagcaccgcagtttgtccagcctgcataaacctcttgttgcctttcacatcactccccgaaaatcaagtagccacatgcaatgcaaaaggaggctggaaataaagccagcacttcctctgagcttgtcggctagcatactgcactgcatctttcaattagcatccaattattttaagtagtgatacttcagtgtttgtgtaagcctgccttgtagaatttaatactcagacagccattttgcaaaacacagcaggtccatgaaataagggctatttcagtgaaagagtcacagaatgataaagctgctgtaaatgctggcgtaactgcaacagctgtgtcatgcatcaaataattatcatctactctttttctaaagctgttcaaaacaggatttaaaaggagcttctgtggctatctttaatttgacaaactccgtggtatctctccctaaaaagattttttttcatgccatcattcaaagatgaaaacagcactactctacgtaaaagagaatatcaactggtttgaactgatacagacctctgagaaaatacacttcccaagcaatcccagtgcaagctatttc

SEQ ID NO: 47159 - DNA, 873 bp, Bovine  19866881425815
  misc_feature (1)..(1): n is a, c, g, or t
ntatgcttgactcttgtcttcccgacttacaatctgtctctggaaaatttaatcataaatgttaaattttataatctagataaattcaaattaacaattcaataaacttagtgacaaatattaattatgcctaaaatataaaaattgcatagtaacttaaagaatttctatcactgagagaacatttgattttttcctttaacaaggaatcagcttatgcatagcttttaaaatattgtttttctatataaaacctggatttagagcagtcttctttaaacttgtgaacaatatttcacttattggaatttgtgtgtatggaggtatttctattttaaggccgatattttctctcacaggaaaggtctctaaatgaactatctcatcctttggagtttattttctctgttaatctagctgattctgctagaatgatgagcagaaaaatcaagaagatgtttgattggagtggttagatagtggcctaaaccttttgaagtaattcatatatccactttaggactataatctaagagatacagagtaaatgtagaaaatatagaaaactaacatattgtaaagttttcaaaaattggctctatcagaaacaattgaaaagtgggtaaaggacttgggaatgcttatcctgaagaggaggagggtgaggaaggatataataatgatggacaccccatggtacttgctgattaaatgatgatcattttcttcttccactgatgagattgctgaatagctggacctgttcatttccagagagcaaaacaagaggaaatggatgatggtgatgctgggaatgcttcctgacacttactgtatgaaaattgataggagtgggggtaggggagaagaaaa

SEQ ID NO: 47160 - DNA, 967 bp, Bovine  19866881913091
  misc_feature (1)..(1): n is a, c, g, or t
ntcctctatatcaagtttctttcattcttttccatttgaatggcatagttgacacaacccaaattaatcctgtcttctttaagaagctgtatgcctaacccatatacctaaacctttcaatccgactttttcagtgctataaaataattatattttctagggttttctcaacaaaatcatctgctaaactctgttacccaaatattctctcacaaattgattttcagccaagagaattatgttgcttggggccattgtaatgtcttgcttttcgctaaatgaaatctcgtcaaaagtagataattatttctcttggtttgataagctgtgaagtgtaaaataaattctgaatctgtattacttttagctgtttgcaaaaggaaaacatgagaagaaaacctggtttgaatctcgagatttttgtagagctctgggtggagatctagctagtatcaatagtaaggaggaacagcaagcaatatggagattagtaacgtaagtatcttttctagttaatactccttcctttgaccctttgagtacacatttgttgtatgttattcagttgtcaagttgtgtccgactctgcaaaccatagactgcagcatgccagagctccctgcccctcatcatctcctagactgtgcccaggtcacgtccattgaactggtgatactatatcccaaatctgtgggtacttttggacctagtttcacttccaaattctggcctggagaattccatggacagagtagcctgacaagctacagtccgtggggttgcaaaaagtcagacacgactgagtgactttcacttcatttccaaatgctttaattttatagctataaatcctgagatgaattgctctataaaagcataagacacttattattcgtttattaaatgaatgaatatctcaatgctttacaattatttcaaacagcagcttgttttcaggatatttaca

SEQ ID NO: 47161 - DNA, 747 bp, Bovine  19866880554239
  misc_feature (1)..(1): n is a, c, g, or t
ncttctgatgtaattgctccttcttcctaaatttcacattgaaagtgaaagtgttagttgctcagtcattaaggataatgaaattagcctttacccaacttttcacagccataaaactggatttgcagctaccactgaagagttggtgaatgctataagagccatggataaaaacaggcattaaaaaaaaatctatgtaataataagaaatccagggttcaatgttctcagaccttagagttgcataagactcacctgggtaacttgtgaaaaatgctgattcctgattccactccagctctcctgatttggatctggggtagggccagctctatctccaggattctatgaagtgtagggcttaggggaggccatctggttggaagaggaagctgggagctttgccacgaggctatgtttgcaaagcaagcactctctttttaacttagtgtgtatgttacagagcactatcgatattaaagtttcctaaataaacttctagtcacactttacataagaacgattaaattggacatattaaaaatatattttatttatgaatggaggaagctgatggaaatcaaagcagctacagccctaggtactaacaatgaatggagcccaggcatttgagtggagcccagatgtctgcccttctagtcatcaccatgggaagagtcttgtttactaattcactcattcaacaaaatatttactgaatgtgccaggtattgttctaggtaaatt

SEQ ID NO: 47162 - DNA, 1461 bp, Bovine  19866880661518
  misc_feature (1)..(1): n is a, c, g, or t
nactttttcccccctgttgagtaatactcttctaatatccttttcaacagaaaaattaaactcaacaggtttatttaattttattctattgctgtgaaccattttaggattattaaattatatatatttctcttttcctctcctgaattgtaaatcttttcccccccccaccccgctaaagaaatcctcacagaatccctatgtataaaatgtgtaacacaatttcctgctttagtagaatcaaggaaaagagtgtatgtttccattttctcagtatccccttctcacatttgggatgatctacctgacttgtggaacacaacttaaagaccatccttcttgatcaagggctcaaagtcacacccgtattactatatacacccaactccataggaaagcaggtgatatggatactctgcactatggctgccgccactgatttctcagctattaatcaatggttatataaatacccagcattatctgaacttccctaagttgctgtagtatggccttttggtggcctgctgtagtggctctttttattcttctgtctgtgcgctccaagatggcctattactaaataatttcattacttctaatacattagaaaaatatatgagttatttgcatcaaatattcatcctacagccttttcactaaatggcagacaattatttccctcacattcagatgcagaaactgtgttgtgaaatatgagggaatggtaataaatttcatgagggttattgattcttccaaattcaatctgggatatgaagacattaatccagaggccctaatatttctgtgaagtttcctcccagaggcagtcatatatctgattgtattagtaaaatgaaaccatttaaaagtactagactcttaattgtaaagataatttgagaaacactcagcgataccttgaaagagagctccatattttctccaccccaaacatcgagcccaggatcatatgttccaagttcaaaaaagtaatttttatcaatagaaaataatccacctgccatgacgggacatctacaaaaagaaaagttggcttttaaatcttgcatgtcaggggagctcaacttttagggagtgttccctaacaagaggcattttagaataattaccacatgcagggaggtcttggataaagtcacaaagaacacctaagtgacaagttccctggttcttgtggcagaacttgattagaggcagcaaagacagggtctagaactaggattcttccttggctttgacacttcaacacaaattctccaaagatgttatttttaatcagttatttagtgctatttaggaaagatgagtcaggcactgttttaagtgttatagatgtattaactcaggcctcacaaaaatcctttgagtatctacccttaagaaactacagcccccaaaggcaagaaaatttcccaagtttacagacccaccggt

SEQ ID NO: 47163 - DNA, 1078 bp, Bovine  19866880703584
  misc_feature (1)..(1): n is a, c, g, or t
natcttgattaataatgaatatattttgtatttcagatacattattattttatatatttattaatttattcaagaaatgtttattgagcacttaccatgtgtttatcactgagctatgctttagagatagaaataaaaacaaacatgagataaggtccccacttttctgtccactctaggcatcaggcagaacaaaggcagaggagtacatgcaaccccagatgaggacatctgagtcatactaggtggatgtaatcggcctcccagagctgctgactttgattctgtccttgaagaagaactaggatgaactaggcagttccaggcaggtgttctgtgtgtaagggcacaacgcttctagaaagtaggtatagtttgatatggatggaaccaagggtgagtgaggaaaagaagcaagagatgaggttagagaaatagtcagtggttgcagtggtagagggaaggatggtttggaagtaaaatgttttagatcagaattctagaaagcattgcataataactgttcttcttgtaatgacagaatagtagcctttaaagaattttttagcacatctataagtttcaagtcatgtaccagaaaaaaaaattaactatacatcaataacattatttatgagaaatttgcgaagtagatattattattctcactaaaatttggaaaaactgagcttggcaaggttaaataccttatccaagttcataaagataatacctaacaaaaccattcctaggattaaaatactagtggtcagattttaaaatctacatttcttccatcagcatcttcatagtctgtaggtatcctgcaagctgccttttcacagcatttaactagggcctgaattggtgaacccaagttacaaccaactcagttaatgcaatagaggagaattggtctcacatatattttccaatttgaattatcctggagcttgggttactagcttccctgatagctcagttggtgaagaatccgcccgcaatgcaggagaccctggttcgattcctgggttgggaagatctgctggagaagggataggctacccagtccagtatt

SEQ ID NO: 47164 - DNA, 2539 bp, Bovine  19866880714034
  misc_feature (1)..(1): n is a, c, g, or t
naaatcgctctttatttaaaatgtgattttactagactctggcaataaactttgcaaaatactttgcctttcttattaccttcagattttaagttgttttgcttggcatctatggcgtgaaattctgtataggtcgccttcctaggtgttaccattcactaaattttctcactagaggggctgagcaattgtcagtcaggaaaattctgtttactaaatgttggctttatgctctcaagatgaattaaacccattgtgagattgctagaaggaggggttggaagatttgtgggcaattgactaaagagttatatcagatagtttatttctgaaactgaaaacaaaatcttgtctagcacagttaaagtcattaaacatgaaaatgacagctttagcacaattttaagaaaatacccctctctattactacactttctcttattaacagaatctcagaataattttctttccttagaaacctgagacaactctagtcataactgtactagttactatgaaaatggaaataattatcttagaatattttcaaagtagagtgtgagtgtgtatttttagtgagaaagctttgatggttgttgggaatatataatttactggacctcagcccaaatcaagatgcttaaaactgtgctcgtgaagcttcactcaaaccaatgtgtcaaataatgtactgaatatttatgaaaaggggagaatctatatttatattcttagatccataatttttcatttcatgcttctatatatattaccctcaactttctgtcaccacagataaagacatttttttggccctgggaataaaaagacaattccttattgtctgactgtaatacagtcttcattgtactattcaaccctttgtttacttattttcattttgtgaaaagccctgggttagcccttctcagatttttgcttctttatgtgtaacaaatcccacacattctaaaggcactttctttaattctctgttgccatataatatgtttccatagtatcatacactattattaagtgtttatgagactcaattttgaatttttccttttgtttttttcaagcagatactttatagcctgaccatatcaaagtctgtcatgcttagtctatagaatctatacattttattcttgacaatgtaagttttcagaataaagtcaggaagatcaggtctttattgataaatttaagtagaagattgatgcactaggacagtcatctgttaatttagtgcctttaaatctttttacctggacaacctattttcttttttggattactggtgacccctataattttctgcttaacttcaaagcacagtattgtattatccatcataggacaggacccattgttaacctacaatcaacagagcctgtattttgaattatttcagcagaggtggcaacttccagtggaacttgagtgaggtgtgtggtctgtgatcatttgatgtggccaatcaactatctctgattgggctccaaaatatagtaaccctggcccttttagctttgtgatatcttatcagatgattaaccaactatgaaagatttcgtcaacaagactattgcagggtatgttcaatgagtaaatgcttaatgctcacagaggaggcagcatagttgcagagcattgaaactatcatttggcatcagtgctcattgccctgtgctgccatgttctgtatcgcccagaatgaaggaaccagaagtgcaaaacagtgataggtggctctgtgattctttctaacttaggaaaagacacaggtctggttccaactgtagtgggtgggtcttcaacatttgaaaagcatatgggacacattaagaatacaaactgggagctccatgtgaaggctgactgcctttgggattcaaggttcagggatggaagaaggactctggtagctgttagcagggagaaccgatttattatgaaaatgctgatatttcttgcctgactttttatcttccttagatgctgggtgaacaggaagtaataacagcttctatttctcagtcaatataaaacttaccccttcatataatgctacctttaaaaacacagcatgtacatcagactctatcgatctacctattaacagtttaaacaaagaattttgtgtttgcttgttctcaataaaagtttgtatccttgttttttttggtgtctagattttactttctctagttgccttttaaaatttagaagaaccctcgcacatcagcagctactaagaccatcaacaaatgctttttcaaaaatcaagagaacaccttattttaactcacttgcattatttatttcaaaaaggtcttaaaatacttgtatatgaaattgcagaaagaatttctgatgggtaaacatgtaatgctcatgaaacatttctatcatttttacaggaactgaactattgtttgagatgcatcttaattccaacaactcggaacatatatatatatctatatatatctatatatatatatatctttgtagtctctaaggtaaaaca

SEQ ID NO: 47165 - DNA, 1327 bp, Bovine  19866880894968
  misc_feature (1)..(1): n is a, c, g, or t
nctacctgatgcgaagaattgcctcactggaacagaccctgatgctgggaaagtttgaaggcaggaggaaaaggggatgacagaggatgagatggttgcatggcatcaccaactcgatgaacatgaatttgagcaagctctgggagttggtgatccacagggaagcttggcatgctgcagtccatggggttccaaagagtcagacatgactgtttgacttaaatgaaagtctcagtgaagaattgactttggggtaggactgactactcaactatatatttaccctcttaatatttaactgaatgaagtctattttctctactcttttctaaaattattttttctttttcttctcaactgaattcacatctttcagtcttcctcttttttccccaagatttttcctgttcactctaaatttctagctcttcctatctttattttgctcctcatctttcttctcttttcgggttcttcttacctttttttgttccctttgttttatccctgcccctccaattatctcaatagtaattgctaatcataaaagttgtcaaaaaagcaaagatctaggttttgaaatctgtcaaccataaaagcaagtcatatccatttctaaagcctcgtggagcacaagacattctctttaggatctccaagagcacttttttctaagttgacttgctggtaattaaatgccagcattaaagacaaattaagctcatttagtttcattattttaccattacaattacttaaacaacaatactatttccaattgtttttatagcacatgtataatatttgagttacatttggggataaagacttgagctaagattgcttcagagatgaactattccatttataacatcatttctaagggaaaatgtgcgttgagttcctaacaactgattagcaaattaaattctgggatacacctgtttgttaagaaggaactgcctataattagggaggtaaatctgttaggaaaaaatcaaataggtgagccaaaatgcagaagctggtgttgtgataagagaactagtatgtatttgggtatttcatgactatttcaaagcacgttgatacacatgcactgctctgagtgtcaaaacaagcttgaacactaagcagggtggagttttctattatttaaaatttgcagatgagaaaagtgctttaaagggccaagtaactttctcaaggtcaggtaacctggctagatggaactgctgctgctgctgctaagtcgcttcagtcatgtccgactctgtgcgaccccagagacggcagcccactaggctcctctgttcctgtgcctggg

SEQ ID NO: 47166 - DNA, 1484 bp, Bovine  19866880935676
  misc_feature (1)..(1): n is a, c, g, or t
nctgctgcgtcgtcatgatgttagttcattgtttaatttaatgctttgcttttcctacagtattctggcaagcccctctataaagcaattaaaatgggtctattctcttagcctagagctgggactgtcaaccaataatttgattccttcctacacagctaaagagagttttcttttggcacatatgaaaagcaaaagatagcaccatgcatttgccacaaaccagtctaattcactgagggaaaagaagaacctttctagatccttagtttctatctgccctgttcttccaatcctagtaaggtccaaaaccacaactaatgaactgctggaggaggagctcgaagagagaaaatagactgattccagagctctccatacttcaggcttctagatgtgtgtatcaggctgaaagaaaaagaaactgaacagtgagatgaagctcaatctcttagttttacattggattaatatttcagttggtgaaatgagatagcttttgtgatttcagtgactggaaaagctatgacatctccctaagaaaccaaacaagggcagagggggagaaaatctcagaagatggattttaataggttgtttcctgctttttcttctataactgtacacaaagcaatgttgcgtgttgcttctgaattgtgtgtgtgtgtacacattcatgcacatttgtgtgtttgtgtgtgttagagggcagtgtgccatttcactaaaaagctgtatctgaaagctggaaatacacagcagaatttgtttaaaaggtgcaagatagaccataacaaaacaaagggtaaatgtggccaaaagatgactatagagtttttgatgtttttagttatcacactctcctcacaattggggtgataaggagagaaatgatcagaaggtataaaacacacttccgctactgacttgaagagaaaaaaacaggtaagaaatgactaatgaatgtaaaactgagaaatggtaaaacaaatcaatgactttgtctcctaaatacagccaaagacctagaaatatttatgggagaaaggaattggtaaatgtagaaatttgaacctgcgtacacttcttggtacagacctcatccaaggcccagtttaaccatcgtaaaataattcatcaaattcttacagtgatattgcagtgagtactcttgtcccataaaatagctttcttttgggctgttctgggtgaaccattcagagcagagtttcctaagaagagaacagttttaggtcaaggctcagaaaattggggaaaagtagcaatatttagaagctctgttttgttgtttgctttcagaaggaagggagcattttagaatctcctctatgtttaaaaaaaaaaaacaatctatatttttctacactaaaataccttctaaatcggccccacttctaaaacatttgtgtatggatatgtgtgagaaggagctatagagacacaagcagagtattcacaaaggg

SEQ ID NO: 47167 - DNA, 767 bp, Bovine  19866880946832
  misc_feature (1)..(1): n is a, c, g, or t
ngtggcattattatatgaataaatgagttagtcaatcaatcactgacaaagcatactctgtaatcaaaagatttttcatgttaagattaatttcatgtaatacaagtctaaatattacataaacctctgtgacattgagttatacttcataggataaaaagagcacttggagcagccaaagaatggcagacagtcaggagcaattcttttggatttcaggatatctgggtggcccctaaccaaaatctggggatacaaattcaaagtatagacttacactgtctaatgccataaccaatagccacgtgcagttacttaacagtgctggcagagacagaattgaacaacaggagcaaattccttggaactaaaaatgttagcctgtcacaagcatgaactatatgctaggtaatctagttcaacggtagaagcattgactattgaatagatatttctcctcttgtatctaaaaacagtaatagcatatattgaatgtatatgtatcattgcaaggctttcacattctactgggaaatcattcatcctgagcatcacattgacacaaagatccaccagagaagactacacatttcaagtcagttaattatactcacctcttttgcaggtatgctcaaacctgactctctcagtacacagcaaaatcttctagcaaagtgaggatgataattgatacaagaaccactttaaactcaaaatggttctatatgataaattaagccagaatggaggaatccagaaaaatagct

SEQ ID NO: 47168 - DNA, 1449 bp, Bovine  19866880959013
  misc_feature (1)..(1): n is a, c, g, or t
ntggaatccttaatagaaaatgttcactcactctaacagtttagccactcactacaaaacaaactaagggccaggggtcagtgccaacagctcttttctgtttgtcttgttgtttttaaaatatgatatatgacaactgtcccctgaatttcagtttcctgaagacaatatgataaatttatttcaactattctgatgcagaaagctaattaagtaaactagtttagcaactgatcacgtttcactaatttcaaccatctgcttcaacatttgttcctatgtgcactagctttcatagcttctttcctctaatagcaattaatgaaattgttaataagctacatatatgatatgatgttgcaacaatttaccaaaggattacattatgaggcaaatttaacaaatgtagaaaaatgactctgataatcaaatgttgtacaacagcaactagttttcttcttaactcatacttctcaattaatcgtctaattaacacacattttatacataattcataattttaaactcatggtcatatttaccacccctttttacatgctaactgcttatataagacacatattaatgaaacacaacctctgtgcaaattctgagccttgattttgttttaattcactgagcattttcataacatttactttcaattattgtggaatgcatcaggaggcaagctatgccactatccagtttctatgctatattcagagaatggtctatgcacaaacatacacttacatcatgattttagtatttttaaatgagattaacttataaagaccttgaaacatgagtccgattgaactactttagcttactgcaatagcttgatacattcagtaacattcatacaaatgaaaaatataaaatatcattagactttactaagtattggggctttattttcatggcaatttaaacaaataaatattaacacctctttaatatgcttgcatgaaatacatggtcagtgctaaaagttcacctcatcaatattgtctccctctggttttagctactactcttgcccaaatatacatgcctatacagttgatccttgaacaacaggaatttgagctacttgggtccacttacaccaggatttttttcaatagttgatactacaatactacacaatccattgttggttgactctacagatgcagaggaacaatgaatatggaggaaccaccaatatgaaggaggaaccatcaatatgaagctatgaattatatgcagatccaactgcagtaggttgcacccctaacctcctgggttgtttttgtgcatgccctcacccatactgaaaactactcccttctctctgatgaccaccaccttttatttccatatacacaatcaaaatattgttatagaggggaataaaactggatattgtaaatatccaaaacatctttacaaaggtgcaaa

SEQ ID NO: 47169 - DNA, 688 bp, Bovine  19866881050990
  misc_feature (1)..(1): n is a, c, g, or t
ncacttgactcactctgttctactttttgtcctagtgttctgcccattgttacaaagcctgtttcttcgctgctgccgctgccgctaagtcgcttcagtcgtgtctgactctgtgcgaccccatagatggcagcccaccaggctcccccgtccctgggattctccagacagttttaaaactattttaaaactgtaaatgttctcttttgaggccaacactagtggcctcaaagtgttaatgaatatttcaaaactgtctaagttgaacctagaggggcttctgccttgagtaaagctgactgtataggtagcaccccaaatcctttcaaattattgtatttactgctctatggagcatcatggtttgatgtgttcatggcattcaacaaacatttatgaaaagcctatttcaattattttcccagtttgggggataaaggaaattcagagatgaataaaaagtgaataaaaattccatgaagagcttggaacaaggcagaatgaaaaagtgctagctctgactttaatggttaacagtgtttgaattaaaaacaaaaactctcatcgttatttccctgacttatcctaagggtgaactaaatatttaagtgtattataaaagatcacattctctttactatttttttcttttacctgagaattctcatcagggctgaaactggaaaca

SEQ ID NO: 47170 - DNA, 1282 bp, Bovine  19866881347651
  misc_feature (1)..(1): n is a, c, g, or t
ncagccaatgttcatatcagagatgcacttcaggggagcttatacttccccccaaaatttttaaaactgagtctgatcccagtaaattcaacgtattctactcattcattcactcattcatgtattcatccagcaagtttgcaggccatttactcattcattctagtctcagagttctactttatatttctacttagataccactataaaatgacttaatatattatatatttattatattgcaagttgaattgtatttcctatatacacagtgaagtgaagtacaataagttgattacatagatgttgaacttgccccagtaccaacacaaaatgttaggttcaatagtcataatgacataaatctgacaaacctaagaacagatctaaattgtctaactaaaaatgtaaatcattatagttaaccagaggaacataaacacttgtttgaaataagacaatgatttcactctcagtacacagggagaattttattgttcttatattgtttctcaataatgatatatttaaattttatgataaaagatcattgttcacacaaattctatcagtgattagatacatgtattgggttgattcaagcattatggagtctttttctgtctagttcaccgtttgacccctcatcagagcaaacttgcttttaggttagactataaaattagtttttgactactagtttcaattgtcagctttctagaactcaagttatatcttcaaaagaaaatttacaaatgactgtgttttttaaaaagcaatttttacctcttaattgccatcattagggacatactttctacagctgtcaatattgtatatgtttgtcttctatcctgctgataggtaacaattttccaagcaagctcagagagtagtgactctttattaaaactgacaagagagggaatcagatttttaaaaattattctggaaattattactgacaagtctgtctttaattcctaagcagaaagacacagtgagaagttaacatgccccgtcaccacagcaagctagtagcatttctgccttgtttgtataaaaaagtacttcttagcaggtaccattctactattgtctaaagttccatttcggtccgccatgttagattcactccgcaggggatagcaggagagctggcagcgtacggttcttgcattggccttcggcaggcgccccccgggggcggaaagctgccccacaacatggttttaaaaaaataaataaataaataaagttccatttctcttataaagcaaag

SEQ ID NO: 47171 - DNA, 775 bp, Bovine  19866881390947
  misc_feature (1)..(1): n is a, c, g, or t
ngagggaactgatgagtatagcagatggtaattgcttcctacatttgaatgaaatgatatgcattgctacaatttacagctctcgcctcatattttattcaggaaccctttatctcttttcctgcagaattattctgcaataaatttagacatcttatcaatagcttggtgatagtagcagaaacagaggaaacctgaactttgtgcatcttaatgtttaaaataattttctgcaataattgaattatctggcagtgaacattcacatagagaacctgaatgttttctcttttgtggggtatcagccctgtgatgaaaagaaaccccttagattgacaaattattgactgaaaaagtttgaaaccaaacaagaagattttgactttgcctttttttggagaaaggaagggatctttgtcccttttcataccctaccaagtacccaatgaatacagagtaaagatgaaactgtcttaaatattaccctgcgtttcctaggtaataaacacctagcattgcaaaaatcatgggaaaatttagggagtttgagtcttgctctatttctttccctgaaattgtgtcccatgggatccatgttatttactaaatgttgaacatgtgggaactgtttctgaaagtcagcgtgctgtctcccaggacttgagggtaatctgccacactgcagggtcagctagtaaagacaattaaagccctcatagacacgcttacattatctgagaccattggtaaagaatgtgattttgaatgacttcag

SEQ ID NO: 47172 - DNA, 1368 bp, Bovine  19866880342256
  misc_feature (1)..(1): n is a, c, g, or t
ngtcgctaagagtcggacatgactgagcgacttcactttcacttttcactttcatacattggggaaggaaatggcaacccactccagtgttcttgcctggagaatcccagggacgggggagcctggtgggctgccgtctatggggtcgcacagagtcggtcacgactgaagtgacttagcagcagcagcagcagcccagagtgctcatctctccccatctgtgttcattgatggtgtattggtggcttgaaattgaatttggagggaatatttacttcagatcaaggctcttcatattgttaaaacatttaccagggcaccattgtgcgacacgcctaggtagccagggaccaatgcccctggggaaggaatgaattcaggaattcctcctgctgagttgtcagaactactactgtgtgcttagaggccgactaatttctgtgagccatgtggaaagagaactgctggctacctgggcattatcttccttacttcaaagccctgatttcccatttacaggagcccaaatgtctccatttttacagcctgaaattgctgaacagttttcatggtgccaagtaaccgatttagctgatattcacacctgcgttggttgtttgggcataattttcacctgggactccaaccttttgtaaacttagtatggacgtatttgtatcctgatcgagttaggaaattcacacttttcttcctcaagtatgaaagccagcagggctttgtttttgaacgattagtgttagccaaggtccttgttgtttttatttataacctatgaaatagccttcagcatgttgacatgttctctgagtttgcttctgacaatcattaaagtagaaaaggacaaccaaacctgtgttgatagtgttgaggatctcattttttgttaagaaagccgtgcccactggtctctgtgggtcataggttttctctgcaagggttcttccttctctctactcttcttgttcctcactttgttaatatgcctggactcaaaaggtctcttgttccaggatgccttctctgattaagtgcaataacttcttcatgcctttctctgtctctttaattcacctctattcatgcttctcaatagatgcatacttaagtgattcttagggatttttcatatctacatgttattattgatccagttaaatgacagatttctgggtatcagagaaattgcttttcttctacttctttttaataataggttttcttttttttggccaaaccttgcagcatgtggaatattagttccctgaacagggatcaaatctgtgcctcctgcattggaagcatggaatcttaaccactggatcacaagggaagtccctcttctatttc

SEQ ID NO: 47173 - DNA, 700 bp, Bovine  19866880396958
  misc_feature (1)..(1): n is a, c, g, or t
ntttttctttttggttgctttctatttgtatcttacttcctcccaaatacgattggtatggagatactcaaaacctgctttggggccatctgctttgagactttctgatgtggtaattttgaaacatgatactaagccctgaaaataatgaagctgaaagactgtagagctcatcttgggtctttgttaagatgtttttgttttcttaacagaaataagccacctttaccctataaaaagaatctttgtaatttgtacaaaattctataatgaacttaggatccacattattttacttgacagaaatgtgctgaaatgtgtaatatcaccttaggaccttgatagaatgcacagagactgaaaaatttatttttagtttaagtattaaaattaaagtcttgagttttctttactgcctttctggagacagtgtggcatgaataagtgcattggttctggagtaggactgccttgatttgcatctggtctctaccacttatcattgttgatcttaggtgaattacttcacctctctgtgccttggtttctttacctgtaggataatgataataataggacctttctcataaagttgttgtgagtacaaattgagttaatacatgtaaagtgcttagaacagcctctatatctcatcccagatgttttttcctcatctaaaatataatgaagaaattcaggg

SEQ ID NO: 47174 - DNA, 864 bp, Bovine  19866880565414
  misc_feature (1)..(1): n is a, c, g, or t
ntgatatttttatgggccagtgaagcttatataccgttgagtgacatttaggaactatggttatttccatgtgaagagaattaatctcttcaaggagaggagtcagccctctccacttctggttctgtccaaatatctccagttatacttgctgcctgaaagagcacagtcttcagtactgttttaaatcttaaatatagaaaaattttcagaaagcttcaatataataatgtatcttttgagctacctttgttcctgctttgtgactgataattaacaaatgtatttttctatgttttgactgtcacttatattagaaattaatcttacttgcttcctaggattatgaaaggcttgaatgtgatagtgagtgagaaagtgatttaaaatttttacagctgtaagcaaacaaaaaaatatgtatatatattataacatgttcatggaaatggaattgtagattttatagcgaatgaagtgtttttagaagaattaagtatctcaggtcgattctttttaaatattgatttaatttttatggtttaattttattttcaatcttgtttcaggggatcttttctgttttttctttaatttttctttctttttaataaagaactgtctgactttcttcaggcagtgctcatgtgtttgttaaatgtgcaatttttctttctttatctgccattctcccttctttcctcctccctgtcttgaagtcttattccttggttcctctgtaacaacacagagtaaccctcttttacttatggctaacctgaatataaagcccactggggatgttttcagttttgtgtttagtcttgtttagtcggccttggcaaaggtccagacagacagcaa

SEQ ID NO: 47175 - DNA, 1733 bp, Bovine  19866880618534
  misc_feature (1)..(1): n is a, c, g, or t
ncaatataaatggtgttcatttgcaaatgatgaaactgatgtttagtgtagcaagtatagaagcaagacataatctcagttctcagactgaatagtttacagatacataccccctctcctcaacatccactttgcacagtctcatacctgttcttgaaataaagcagatagcagactacacaacaaagccttctaaacacctaggaagctccgagacacttcataaagatttctagcaggcaatttgacataggtctgtagttcaggaacactacaggagctccaaaagtggacttgggagtcatgagcatgatggtgggggctgaagttaggcatagatgagatcaccagggatagctatagagtaagaagagagggcaggagagcagaagagagcagagtgagaagtaggatgtgcacatgacatttaagttgctgctgcgaagtcgtttcagtcgtgtccaactctgtgcgaccccatagatggcagcccaccaggctccgccatccctgggattctccaggcaagaacactggagtgggttgtcatttccttctccaatgcatgaaagtgaaaagtgaaagtgaagtcgctcagtcgtgtccgactcctagcgaccccatggactgcagcccaccaggctcctccatccatgggattttccaggcaagagtactggagtggggtactattgccttctccggacatttaagtagagggaactcaaaatcttacctgggagctgctgggaaaagatgttctctttcattgagctattaccaggtggagtctggcatgaccccaatcccctgtaaagcacacccaaaatgtgaagagatcagtgctgcagtcaggcctacccctggattttgcaagtatatgagataacttgttttgtttgtttgttctaagtcaaaggatattggggtttcaggtttctaatacaacccaaagatgctgaccttttcttaccaagatgttgaaagtatcagaagacaaaacttatgaaatagaagctatacaaatttttgtcatatagattttccatcatcattaaataactcttcttcactgaccattcagttgtgatttctagactttccacccactggaacactatcttaaaccatctatgcaagtgctgcttggggatgatttgccttccttgtacagatcatgtcccatctagttggaagatgcttaagattaccctgttatcagcccttgaacagtctgaagaaagagcccaccgtttaagcattttattcacattattattgagtctgttactacagtatccagtacatcattgaagcaccatatatgtttgtagagtgaatataacattagaagttgttccttatgtgcttcacacattatccgtttaagatgagatttctaggctgcaaagaaaagtcctctgcttttgcagacagacttcctatgcttcacgtggatgtgactgatgccatttcatacattatacttaggttgtttgacataactgcataaataagtcattacagaagctataactgaggatttgaaataccccaaggatctcagtggctaagataaaacagtgatgtatcttgccagacctggcgatttccttttgctcttttatattgctgccagtatgtgtgctaaagtcttttacaatatacagcttgccaggtgtagctgaattaattttgttcaaatctcacaactcacaattgtgcttttctct

SEQ ID NO: 47176 - DNA, 1185 bp, Bovine  19866880651134
  misc_feature (1)..(1): n is a, c, g, or t
ncagagttttacattgagtggaagtgtttccctattgatgggaagaagttagattccatctaatcttttgtattacaaatgttactgtgccaaatatccttgtataaacttcttggggcttgaaagtgaaagtttactcactcagtcgtgtctgactctttgtgactccatggacagaagagcctcctctgtccatggaattctccaggcaagcatattggagtgtgtagccattcccttctcaaggggatcttcccaacacagggatcaaaccaaggtcacctgcattgcaggcaaattcttaaccagtaaatatttttaaaggagatatttctgggttacaggatatgtgtatttgaagcatgggttaaacatttttgttaaattagttaatttcttatatggattataggtgttcattggagaaaagtccaaaggtacaaaaaaatatagtaaaaattaaatcttttccaacccttccttgtcttcctctgatacccttctcaatctcaaccaagacttttatcacatataggggtttgttagtgtgtttgtgtgtattgacacttctgtcacatatggatatgtgcgtctgtgtgtgtttcttctcatgtaaattcctagaagtaagatagctgagtcaaagatatgggaagcatttctttttaaaagtgagtaaatatttttttctgtgaaaaatattcgtatttaatatttttaaatggatccatttgagccctcctgtatgtgccatgagtcaggccctgagagttacatcttatgctccttcactcacttctgcttttcccaaatccacattccatatagatgccaagggtttttccagggatggatgtttatcttcacctgtatcagaacagagtagattcttgcagtttcatatactctccattccttccttctaacattagaatccatggcagatgacaaataaagaaatagcgtttggttcatttggtctctcgtcagcactgttgaaggtaaatggtgcaattagatgtttgcctaacaacataaagaggccaatatttgatgctgggcaactttctgtgcagaacagtgtaattgctgaaatgctgtttgtcttcctaccttttcattactatcattttcgttcatttctagtgccttttacaagctttcatttctccatctgtggacagt

SEQ ID NO: 47177 - DNA, 800 bp, Bovine  19866880654315
  misc_feature (1)..(1): n is a, c, g, or t
nttcattttaaaaaataacttgacaaattgcagacaaaagacttgcaccccaccataatgtaagattccattaaatgttccttacagttttgatatcactgtagtaatatggacattttctgggttattcccattaaccatactaatatcttgcctttaccttataatagcccactaagagccttcctataaagaaagtcaactcctccattaccttgagtttgcctggttccttcttgaaaaattcatatactagctgatatttctgtgaattatgttttcctgcctctctttttcccccatctgaatcattggtcttaaaatgccatggctctttgtcattctcatgagagctttcctagctaaatttgtatctcactcttttacttctttcctagatctttccctcatgctgccttgtcctgtagaagctccattattcatcagctttccttcttttaaaattgtcttgaaagtgccttgaaacaaagaagtctcatgttgaatttttcaacttaagaaattagaaataggagttttaagaacaaatgttgaaatttacaagtctgtgtttttgttttcattcattacaccttaaaatcttgtgaatgtgcaaataaaagatttgctttagatagtggtatttagaatcaaagattataaattaccttctggtgataaatatcaaatccttaaccagtaataaagctatattccttaattactttgcttttaccatctgccaaagaatacattaaagaatatagtaaacaaaagagtgagctgtaaaccctgaaatt

SEQ ID NO: 47178 - DNA, 1770 bp, Bovine  19866880787685
  misc_feature (1)..(1): n is a, c, g, or t
nagaggttttggaacttggatgtgctaaaggagggtgtatgtgtggaagaggagctcaacatagagtgtgtgaattggagcagtatatggaggatgtccagtgtgcaagctggtgatagttgctcagagtagtttgacagaacttgagtggagtaacagagcttgagtggggtatagggtgtctatgcaatgaatggtccacatcagtgacagaagattgattatgtatgaggtagggcagttgactgaattagtaaagataatggaagcctagcgtcttactgttggagaaaggagttaaaagatggaggaagacaatgaatcatgtactgttgaattagaattggagataccagtgtgaacttaagagtttccagtgtcggtagatagatatagcaaatctgggacccacttcttggcctctgaataccattctcagtagactagggcctgttggagaaatggctaatttagggaacgtgtgagatgaacctgcatcatcttatcgtgcaagaaagttgttcaaagaatgatgagattgtgtcaaaatgattcagaagcagcttgaataggctctcgtggccaaatttggaataatttgaacatcaaaataaatattgatggcaaaatactgcaaataaaattgaagctcataagtctatagtgaaagaattaatgaataaatggaaactatgatgaagggtggtatatttttataatctcaaagcatctccttttagaatactaattataaagattaaaaaggaactttacagtggaaaagttgggcaatggtcccagcagacataccagtgtgccaggactgagaatatggcatcacttcttagatactgttgacaaagatacacaccctgaatttaatcatgggaaatcattggttgttgttattctgtcactaaattgtgtcccattctctgtgacaccataataatcagactaactctaattgagagacattctacaatataatttacaatataagcaatctttaaatgtaggtcctgaaaattaagaaagcacagaacaactgtgccaaatgaaagagacagatattaataaatacagttcatgagtcattacgctatacaggatattatttggaacctggcaaaacttgaaatgggggtctgaagattagatatatcagtgttaatttcctgattttgatgattgtgaactgcttatgtagatgaattctcttgtttgtaggatatatacactaaagtattttctaggactgtgtggacatcatattagcagcttactcacattagggggaagaagacaccattgtactatactaagaaactggaggctataacagaaaaaagtaaaaacaactacctctgctaagattgacttcttcttctgttggtggttttcaggtggcctggtagttaaagggagagacattttgtattgctgtacaaatactgttaagaggagcctctgttatcagtcctgttttgtgaattattttatggaaatacaggtactcagaaagtttacatacagaaatgtgtcctttggttttgtaggcatatgtacatatatgtgttggggagatattttgatcttaacaggtaacttactagctttttgtaccttttaatgttacatttgaattactttttaaaaaaagttgccatgtgtgtttattttaaaactggttctcattttctagataaaggatagagtttaatatttaatctcttataatggcaaataggtttattgtcatttaaaata

SEQ ID NO: 47179 - DNA, 1600 bp, Bovine  19866880818333
  misc_feature (1)..(1): n is a, c, g, or t
natcataaatgggtattgaattttgtcaaaagctttttctgcacctattgagatgatcatatgtttttatgcttcaatttgctacaatggggcatcacatgaactcaatttgtatatattaaagaatccttgcatccctgggataatcccacttcatcatgcaaggtttcagttcagttcagtcgctcagtcatgtccgactttttgcaaccccaataaccgcaagcacgccaggcctctctgtccatcaactcccagagtccacccaaacccacgtccattgagtcggtgatggcatccaaccatctcatcctctctcgtccccttttcctcctgccctcaatctttcccaacatcagggtcttttcaaatgagtcagctctttgcaacaggtggccaaagtattggagtttcagcttcaacatcagtccgtccaatgaacgtccagcaaggcttataatccttttaatgtgttgttggattcggtgtgctagtatattgctgaggatttttctaggacatggaagtaacctaaatgtccaccaacagaggaatggataaagaagatgtcgtgcatatatatagtggaatattaaccagccataaaaaggaatgaaaatacatcatttgtagagacatgtatggacctagagagtttcatacagaatgaagtaagtcagaaagagaaaaacaaacattgtttattaacacatatatgtggaatctagaaagatggtatagatgatcttatttacaaagcagaaatagagacacagaagtagagaacaaatatggataccaaggagggaagagggattgagacgaagtgggaggctgagattgactcatacacactattgatactgcagagagggatggtacagggagggaggagggaggagggttcaggatggggaacacatgtatacctgtggcggattcattttgatatttggcaaaacttaatacaattatgtaaagtttaaaaataaaatcaaattaaaaaaaaaaaaaaacaatagcttgagatgacacaaaacagaagagagcaaagtcctgagctggaaattccaaagtgcaataagaagaaattggaggattttacacctagcctaaatgtgaaaagcatcacagagcagggtgcttatgtggagaagtgtttgtaggtagcaggatagaagcaggaagaacaaaaagaaagtgattacaagcatgaaggccagttcaaagaagacattggtttccacaaaagtgttggagatggaggcagagaagagcaaatctgggagagatgtttaagaggtagacacagcagagtttgctgacatgaggagtgataaagaatttgaggtaagcccttgacattgcacagagttcagacagaatgagagatgagaaaacattcttagggggagaaactcatatctgaagcattcccaaattatacagaaaaagaaataatcatgggaaagacatatgtggctgtatttcaaagacaacataataacagtcttcaaaaagccattatatgactgccacatttgtagttcaaatgacgtactggagccgatcagggaattcagagaaaatgggcaggcaa

SEQ ID NO: 47180 - DNA, 1057 bp, Bovine  19866880833124
  misc_feature (1)..(1): n is a, c, g, or t
nttatatggctatttctttcaaaggaatgtaattttgctttacttaaaagtcagtaatgtggatataagtaaatttgtaaaacagtctctcctttcattctgtaatctttgaattcagtgattttctcacaagcttttccttgtaaacataaagaattttgcacattatggagaatactgccagttttgatgaaagctggaataatttttattttcaaggagtgtataaaaagcacccaatgatctgatgaataaaaagataaatactacaaaggtatgtaggcaaatagtataggcaaatctactctcctatttttcatgttatttgatagcttagcaaatattaagctaaatacgtagaagatagaattttagcttagcaactttaatacatttgagaagaccattgtgtctttgcttcactttgcccttctgttcttcttgtgcttggtaaaggcatgataccttggatctctgacttttcaaacagtttcttttcataaatacctgggcactaggctcagtggagagcttccctggtggctcggatggacaagaatccacctgcagtgcaggagacctgggtttgatccctgggtcaggaagatcccctggagaagggaacggctacccattccagtattcttgcctggagaattccatgaatggaggagcatggggtagcaaagagtcagacacgactgattaactaacactttcttatttacaggcttagtagaacacaaagcaactatgtgcagcattcaaacaaaaaaagaaaaatgaattctaacttaaaaaaaaacttatgactcaatatactagagagttggagaagggctggggcttctgataaaatctgaggttttgctcttatctttttttcaacaaagcaaataatatctatcagagctgatattaaaatgaaatataagtgtgtgtgtgtatgtgcttcccaaactttaacccaagagatacgttgtgattatcaataaaaaatggatttaaaatataagtgtggaaagaattctcagcagttgagagtgagggttatcag

SEQ ID NO: 47181 - DNA, 3112 bp, Bovine  19866880844976
  misc_feature (1)..(1): n is a, c, g, or t
ntttagaataagaattaacaagcctctgttacagataaatggagtaaaggaagagaagaataaaaaattttgaaccctcgacaatgacaaacttgaagtatagcttcacaggtggaattggtaaagaatgcacctgccaatgcaggagcctcaagagatgcacattcagttcctgggttgggaagatctcctggaggtgggcatggcaaccactcccagtattctcacctataaaatcccatcaacagaggagtctggtgggtatagtccatggactcgcaaagagttagacatgactgagcaactgagcacactatatatacatagtttctttgttaaataatagagtatcaacaaagtaagtaatacccaccaatgctatttctgttaatataacttgaaaatttcaagctatgcctgattatcaaaatgtgtttttagttaaaagatttgatatttggtgacaatgagaagattatgatggtggtagaatttgctagtgctaagttcatacttaaactgaactcagaatttgtaatctgtgtgtggctgggttcacatcccataaaaattagtctcagagcattagtgaaggctgacatttaacgggtttcgatgcctaacatccccattagtgttggtattcatcggaaggaacactagcctttcatccttaatttattccctggtgcctatttgataaagtggtttctttagatgcctttgaaaaactgtcttatttaaacacactaataaactgaggacagaaagtttccattattgaagtctgattgtccaaagaattattttaaatgtttttatactgtaaaacatgagcaattttttatccacctgatttgttttaattatatttagaatagttttagatatagtactgttatacaaatcaaaccatagtataacagaatattgaagttcatatgtgtaattcctggatcataattttaagaagtgtttcatgttgtaaaaattaataagtaaagaagttggaaatggttgaagttcactgcagtacaatttattgtataattcaagtcctgagactacattcataaagttcagaaaaagaaggatataaaattaacattttgtcattttatttagattattcgatgttaagctttagcgggaaacaaacttaacaacgaacataccttagaatagtttagggttagatgatttactttatctaattttatttttagtataatagtttaatttatgtttaaaatatagatagcaataatgaccaagtaattatttgtgacttaaaacttttttgactgtcaccacttatatttaactgccttttgctgtccaaatgtgccagctgtgtcatgttacagctgcatgtataaaaaattaatttcttcttgctcattcatttcctcttagaatccaatattattaatcattcactgacatggacacttaaagtcagtttttaatttagatgacctatggtttataaatgtagtgagagctatttaatgagtgaaatcttttattccaaatatattttaattccatatactacagtgtagttacacattggagtcgtatacatttaagtaaagtgtataaatcaatctcgaatagataaaccagattatttttatattgtgcatgaccatgaatctttttcatattaactctattttaatttttacttagatttaaaaagcttatagaaacttgttaggaaattaaaaggaaagttgccaaagaagaaaactttgcaatgcagaggcagaagtttactgtctttgcagtataaagaagtcttctgacttagtaaaaaaatacaagtatccttgtaaaaatgggcaaaggacaggatcatagaaattcataaaagtatatataaaaattaagtttaaagaagcatttaatgcatttaagtttggcaaatttttattattttaatgatcatacctgatgttagtaaagttgcagagaaaatgatcagtctcatttacctctggcagagatacatactgatacaattttctagggcataatttaataatacatgtcaaaaatttgtaaagatggatgtacacaaatgtttttatcataggatctttttaaattttatttatttattccacctggcatgtggaatcttagttcccccaccagggatgcttatcctctagtggaagtatcttttgggtctttttatttttggctatgcagtgcttctcacaggggattttagttccttgaccagggattgaacccctgtcccttgctttggaagtgcatagtcttaaccactgggctgctggggaagaccctctaacattttttataacaaaacattagaagcaattaaatgttcattatgtaattaaattatgaacacccacataatgtaatactgtgtagccagttttataaaatgatgttttcaaacttagattgttcaactgtgttcagaatgcccttgatttctttggaggaagtttgaggaccctcgaagcggaggaggcagaacacgacttccttctgcttcaaccatatcagctttgtcttacttgtttttggttttgtttttattaaagtataatttacttatgatactatatttatttcagatatacaacataatgattcagtattatatactacaaaataatcaccacaatacatctagtcaccacctgtccttaaagtcattacagtattgttgactgtattccctttgctatacttttttccctctggcttatttatgttataactggaagtttatacctcttaatctctcatctgttttgctcatccttctctcctctgtggcaaccatcactttgttctctgtatctgtgagactgttcctgttgtgttatctttgtttgttttgttttttcaattccacatataagggagatggtaccaagttcatctttcagtgtctgacttacttcactttgcataataccatctaggtccatgtgtattgtctcaaatggcaagatactatactttattagggccgagtagtatttcattatgtgtgtatgtatgtgtgtgtgtgtgttgtgtgtgtgtgtgtgtacacaccacattttctttatccatttat

SEQ ID NO: 47182 - DNA, 792 bp, Bovine  19866880873543
  misc_feature (1)..(1): n is a, c, g, or t
ngtcacacagggcaagatgaagataagaaaggaccaggagaagaggccgtgtgtcctcatcctcaccactgtgcagtttttcctgaactactacagtatctgcaggaggcaaatgaactattctgtgacatgccaaatccattcttttttgcccatatacacaatcgataccaattgccagagccaaattgatctggctgcaactcacatcaattcttagaagactgaaaggaatggattggctgtgccataggccagccatttcacatgctctgtgtgaaatttcacattcctgagacatgctgtatgctgtctcaagagttattaagccagtggaagaggaattcaaggtccccgccctgttcatttttttcaggctctaatatcacattaatttttttttaagatacatagctgcctaagtacttgtgaaaattaggaaaatttgtttcaattttctaaccaaactgataatatttgagcatcttctatatgcaaggctcagtcttggctaaagtatttattggagaatactccaagaggaagagaagtgtatcaacacaaatcctttgcaactccattcaacacccagtgagtcctattagagagaagaaagcaatgtaatgagtatgtcctctatgctacatacagctcaagcgcatttatgtcacttgcatctcagattagcccagcataagcattctaactccattttaaaggagcttaataatgtatccaaagtgatagatacccagtaagtgacagcgatggcaattaaagcttttggtgtta

SEQ ID NO: 47183 - DNA, 868 bp, Bovine  19866881023164
  misc_feature (1)..(1): n is a, c, g, or t
nttacctgcaggatagcaaacattcaattatttgcaaacttctcaatgattagttgaattgtatacagcttatctgcagtgttcagtggctctagaatagagagatagctgtaattaaaaacagccaacttttcttggcagtcacctcaatgagataaacaggaaagtctcttaatcagtgctttcttctcatctatctctcccagtaactcttcaacaagcaactataatcagtgttagtcaattcccccaatatgactgatctacaaggcatgacaacaaacagtagactgtactttgaacaattctacttgccactctaccctctttgtgccatctgggaagtagatacacaaaagcaaacttgtttggtggctgtcccaagtcaaacatatttacttagggctgaaagggaacttggaaacttaccgcagtacagccaccttttgaagatgactgaataaatgtattttctgaaactaaaaatatacccagaatgtaaaaggtttatcaaacaatctaagtatcagataaaataatctattaaaaacaaaattcagagaacgagaaaaggaaagcagactaaaggctctgttttccttctcgagaagactgctttacatgaacctctcacctactgcggagaacaaacagcaacacagtggggaacagaatcagccaccaaggacagctggttccttagccaagtatattctctcaccttgatgactagaggaataaatggttatgactttcctggaacattttaggaagtatattctgcaacataaaaaagttatttttgttaaagttcttcaaatgctctgtagaaaaaaaaaaaaatgctctatagaattttctgtttatt

SEQ ID NO: 47184 - DNA, 1615 bp, Bovine  19866881039335
  misc_feature (1)..(1): n is a, c, g, or t
nagtctgagcaaatttttgcatgtatgtgcagatcacatactttctggccagaatgtccatactttgcaacgaattctgaaaggagactttgactctctgatgttagaaaccctcctttggtaatcaactgtttggagcttttaatgcataaatcagaaatggattctgcctcaagaagcttacagcctagcaaggttgataagatgtgcatataaatagctgtaaaggtttgacaaagtgtttctggacattctgagaaaaagagatgactctgggcatcaaaacagcttaatgttttttcacagtgaatcagggttgtacagaagagtaaacaaaccagtgactttaagggagggagttaagagacccacgtcagtgtgagatgtttgcaacttaggtgtttgtaagcctttttcttactgatatgaagatagccaaattatatttatgactacaaataccatttcttcatcaaatttgaaaaactgtatgaaaaaacagaacaaaatttcactgctctctccattagaccgtatctgcctcatttgaaaagaatacattaaaaagcagactttgtacttcatttcttagcactgtgactggaaatcctctcataaagtcatatttagattgagaagtgctgagtttttgtcacatcgtgcctggaacttggaacgaaaagcagaatgttcccccttcctgcacacccccatctcctttattcctgtaaacctagcctgaagtgacattctctgaccactagatggcactcctgcacaggagagtcacatcccgatttaccaagggcggggcggggctcagctaatctcccccgctacatcttctggaagtgacggccgcgcttggtaaacgcgctgttgcaggaggcaggaagtcaaatgctgctgctgctgataagtcgctttagtcgtgcccgactctgtgcgaccccatagacggcagcccaccaggctcctctctccctgggattctccaggcaagaatactggagtgggttgctatttccttctctgagaaagtcaaatagagttgtaaaagattttcaggaaatcaaatcgatgatgtttgaggtgacaaaaagcaggaactgcctgtctgcttttcacatttacatttttaaaaatgtgagttgcccgaggcatgactgtctttgagccacaggcaagggaggcaaattaatatgcacagaactgaattcttaactatccccaacactggctcttctacgtttctgtttctcttattgggccttcctgtttccaggctcccaagagaagcggtttctgaaatccatttttgattcttcagctctcctttccccaattccgtcctcaagtcctgctgtgtttccttgaactatcctctatgtcttctatgtgcccctttaattttcacagccatcacctccatataatttgaagggtaaaattcaatagcctcttctccaaatctattcagtgaagccttatgttactgttaaacttgtaaaatgtagttgaatcagtcatcatttattcattgattaattttatttacttcaacaagtatttcttgaacttttccttggttgctgttctagactaacagggcttc

SEQ ID NO: 47185 - DNA, 3423 bp, Bovine  19866881073042
  misc_feature (1)..(1): n is a, c, g, or t
naaaaaggaaatcatagctcctcttaaccttatagaaacattgtcaggatcaagtgagattttatcacacagtttttaatatagagatggacatgtaagcatacttaatatattttccctatttttattagactggtagtatttggagactggatgtggagtataaaaatacaaaggaataaaaaagagccttgagtttcttatttgatcctcttggttgctgtttcattacatctttataccagaaaaaatacttaaatcagacaaaagaaaaaaataagttaaaagaagtggtcttggttttcaatgcatttatcttgggattcaccacttgttggtgtatgcgtctatagttcattcatttttactgttgcaattccattttatggataaatcagtatgtagagtggatgggcatttgggtacttcctcagtggctcagcaggtaaagaattggcctgcaatgtggcagacacaggagactcaggtttgatccctgagtcaggaagatcccctggagaagaatgggcaacccacttgttttctttcctgaaaagccccatgaacaggggagcctgcagggctacagttcatgcagtagcaaagagttggacatgcctgtgcaccagatacacatatacatttccatttatatatggacatatgggtcatctttattctgatattaggtacagtgctgctataaacattcatgtttctggtgcacatatgcatggaatctggttgggtgtaggcctagaagtgtttgtaagaactacccaggcaggtcttgtacataccatctcatctcactcttctggtcctctggctttgctttctcatccacatttcaactctaattcaagtgccttttattctcaaatgctaaactagatgcatgggaaaaggagattctagaaaatgtagttgttggtctctcatttgtgatgcagagaaattaaatgtgggtagggatgatgcttaattgataacagacaatacagtatgagcatattttcatttctagtggtcatatggatattgtattttgtgttgtgtttgttgaattatcttgccaattatttgtctgctaatcttttttatttgtagataaaatgttttgatattcgagatacaaacctttcatgaatgataggttttacaaatagcttttcctattctgttgtttgccttttctctcttaatggtgtcttttaatgaatagaagttcttaattttaatgtactgcattttagcaattctttccattattgctagtggccattatgagccatttaacaaatctttctctatcatttgtccaaactttttaaaaattgaaaataaaagattctatttttaggtatgtgtcttgtaaacagtcttttgttattttatttccctctccttccctgagtagcttggtatttttatgctgcattttgactcttattgtcattgccctactatacaatacccccttgactagtcaaagtctaatataaagagtgcttttaccttaaaagtgcaaaagttctaaaattctttaacatcatttactgcctgttcaactcatgtgttgcgtcaagtgtcgtaattatctatacctggtaaaataccacaacacatgatcattattgtttcatttcataaataacattgagatttaaccacatattccttttgccttttccttcattcttcattccatttgcatagctgtatttgctgggttgggaaaacccttcacagaaggaaatggcaatgtactccagtattttgcctggggaatctcatgaacagagaagcctgaagggctacagtccagagctatcagagttagacacaacttagcaactaaaaacagtttcaatcaatactatgtttctttttttctgaagtattatctttggggtagactactgattaaaaaaaattataggaatttctttgcttgaaatatcttttttttttccttttcatttttgaaagccttattttggtataaaatgaaagttgtatttacttcctcgggagttggtgatggacagggaggcctggtgtgctgcgattcatggggttgcagagagtcggacaggacagcgactgaacttaactgaactgagggcggggaagttaccatttttacatattcatcatgctctcgcttctactttatctgcttggaagtcagctataagtctgattgactgactctcctttggagttaatgagtctttcttctctggctttaaagacatcttttggtttttgctttttggttattttgccatggtgtacctaggaatgagtcattttatttttgtttcttggtgttcatggtacattttgaaatctgcagcttgaatttcgacattttgtttatctagccctctgagtctgtggaaatttgctcagagtcagtcacaggttccactgagcttctgagcctctcacctgcctcttctggatacctgctcaggtgttctgatcaggcccctttaggacataagcagtgcccacctttccttcactgatctgcctttttcttctatatttctccctgtagttcttcactgccttgttatctctctgaaaggaataagaaatataatcaatatagttcattaaaatgcagtatggtaatttgaaatgaattttatttgctcttctagagaggcgagcatataaatcataagctatttatttcctttacaattttcataaatgcatgaatatataaaacataaattctgtgtttcaaactgtagctttaaatgtgtaaatagaatacgaatgagaaagattatccttgaacactaataattttctttttctgattttgtttgtgcattgtttctaagtaaccttaaatgtattatagagtttttagtgggttagggacaatctttcagtataagttaatgttttccctaagtaggttagagaaatgacacccactctaactttggaatttaactcagatcttaatttaagtcaccttagcatgctgaagtaagtaatggagagaattcttgagaaagcatcttttgctaaatttatattttggtgtatcttcggaggcctgctcttcacacagagtttatattcagtggccttgagtaatcttggtttacataactttttttgtagcaaaatgaataaagtagtagttctaaataaatcagtagaagactttatagtgattatgtctcagttggggtacagagatgtatctgccatgtattacttctcttgtttgatattcatgtttgagactaatttcagttctgttgtgttttaccaacaaattagaataaggtcattcatgctaaaatataatctaactaataataacaaacatccctgtattcaagtagcctaaaatactgtattgactgagcttgacattgtgaggaaaga

SEQ ID NO: 47186 - DNA, 888 bp, Bovine  19866881111655
  misc_feature (1)..(1): n is a, c, g, or t
nataaggtttcagttatttaaaaatcccccccatactaacaaaaaataaagccccaattcccctttcttggccaggataattgatctttctataaggtaattcctaaagggcatcttccttcagtatttctcttgatttataacttcttttctattaaatatttttcaagcagggccaatctgactgttgaatgattgacagggtttaaacctttgctaagacatcaggctcaaagttctaagattgtgatagatcacagaaaaaagttgttatgaaggaatttaaaaatataaaccaataagctagacctaagtaagatgtaggtctgcccagttataattttcttggttcagagtaatgttccatcattctaactttggaagcttggattttactcttcttataggaagttttattcctaatttgtattaaaatagacattgaatatctaatgatatttttttcatggagtcatgtagatttgtttcatggagcagtatagattttagttttactatttatttttcattgaataaatttgaagtgtaatactgtataaatttaatgtataccgaatgttgcttatatacatttatatattgtaatacaatggctgataaagcaacatttataaattacaaattatagcacaatgttgtctatattcattttactgtgcattaggtctctatggcttattttctgctcttacagatgtgtactgttaaacaccatcactcttaatttccctgccctgtaccctggagatgaccattttacttctgggtttttcatgtttaactcctaaaaattctgcatgttagtgatattatacagtacttgtctttttctttctggtttatattgcttagcataatgcactcaag

SEQ ID NO: 47187 - DNA, 1451 bp, Bovine  19866881119510
  misc_feature (1)..(1): n is a, c, g, or t
natctcaaaatgatggtttgtgttttttttttttttttgcctgtctgagaataaagcagctcagttccaatcattatcatgttgctggtttttaaaagtgctttctgctgttttatggaacacaccaagctgagtgcagcagcctgcataatgctgtgccatggggtgcgaagttgaagccatcgaacactctgaatttccccagtgtatctcagtggaagaaccccttgtggtaaatgcatgtgaaccgttccactgagaaaatgcaatgttcaatagctctctgagtttctcattttatacctatggagaaaagactcagtggctgcctgtagtgtttcattgtgacgtacacacagatggtctagttcaaggttctttaaaaggcacacaggggaagaagttatgtttctgcttatttttcctatatatatgtatttcttcctctttatatatatttgcgtaattagtcaaatatgatattctaattttaatgtaggtagaatacatgaaaactgtcaattattctgaagaaacagatatgaggactgacctatgccagttactcaagcaatgtatatacagtaacttgtatttttgtagtctcttttaggtaaatgctgagattggttcatatctaagcctataataagaacattagacagaaagttgcaacttgcagtataagcattttctaaatgctttttctggggactgactaaattcaccctcttttaaaaaaattaaattgaagtatagttgatttacaaggttgtgccaatctctgctgtatagcacagtaacttggttttacatatacatgcattctttttaaaatattattttccattatggtttatcccaggagattggatataattccttgtgctacccagaagggccttggtgtttatacatcctatatataatagtctaccaagccacatgcccagtccatccctctccctcctcatcctccttggcaaccacaagtctgatctcttatgtctgtgagtctgtttctgttttctagatagattcatttatgccatattttagattccatatttttaggctggtgaaaaagtaactgctgtttcagactgtgaattttaattctttataaatagactcaaacacatctttaataatcaaaataggaaccattgcaatcaacacattttgtcaacaagaaataagtttgtttcttcctgtagtgtagaaatccatgcctccagatttgatgaactcttggaaagcatttctgcctcctgctggttgtggaagtattttccctgcaaaaaaaggtcaagatgcttaaagaagtgttagtagttgatgagaggtaaggtgaatatggatgaggcaaaatttcatagtacaattcattcagcttttgaagcattggctgggcaatgtagtgatcagatgttgtcgtggaaaagaatcag

SEQ ID NO: 47188 - DNA, 1175 bp, Bovine  19866881138923
  misc_feature (1)..(1): n is a, c, g, or t
ncgtgttgtggccagaaaaccaagaacataaaacagaagcagtattgtaacagattcaataaaaactttaaaagtggtccacattaaaaaaaaaatctctaaaaaaatcccaaatatttcttaacttgtcctattttgttcacttagaatcgagatttttcaaggacagagacttaatattttaagtttatatatacaagatgggattattaggtttttattcctcatgctaactgctaagtcatttcagtcgtgtccaactctgtgcgaccccatagacagcagcccaccaggctcccctgtccctgggattctccaggcaagaacactggagtgggttgctatttccttctccagtgcgtgaaagtgaaaagtgtaagtgaagtcgctcagtcgtgtctcctcataatcaatagtaaaaatcaacttcttccaccaccaatatcattaggttaaacaaatttcataattaattcttaaatttcagtcaagaggagaaaacattgaaaaatatcttataacaagaaaatatttattttagaaataaaataaaaaaataatcctttggaaaaatgttctttttttttcttttccatatgttttgagcatacggatgcctggaataaatttaacctggaggacatactaaaagtcccagaaaaaagcaaagaattcttatatatgattgacaaatctcaagagtgctaatttagaagaatgctgataaataaggatgcttctgtgtgtttggattgcttatctaaatccttatttcgttgccagctgaaactgtggacactttgggcaagttttattggtgtgttatttgtctcttcctttgtccagaagtatcattgctaagaacatttggggtgattaagtatttgatgtatttggatcatgtaaagatagtcaattaggagaaatcagggcacctcataacctaatcatttgtagatctcagataattctatcaacattaactttcttaaaagagaatttgtgtgcaatagctgctgggagtccaaaactacatctcagaaaaaggacttccaagttttgggctgtaataatattatgggaataagggctgacatttttatatcactgctttgatagatactgagtcattcaatccttatgatactcagattacatatgaaatttatttctaa

SEQ ID NO: 47189 - DNA, 881 bp, Bovine  19866881157600
  misc_feature (1)..(1): n is a, c, g, or t
naataaaagcatttgccttgtggtgaccttaatattaatctcttttctttatgcatagatactgccagcttaaattgaaatctccttacaaaaagagtatatttaaaatcttccaaggaatgcggtgatttggagaattggggtctatgaggttcttattcccttaattctttgctcagagagctctggggttcattcattttcagtgttagagaacatttctcagtctgtgtgttccagcctaggaatttgcacactctctttgtaaaaaaaaaataccccagttaaccagtgaattctaaccttgacttggtcttgcctgaaggactctggtttcacttagttcttctaacttttttgataagtggaaacaaatgagaaaagcttgcaatacaacttgctttgaatggccatatattttgaaacttgctaaggctggtataaagaagacagaaagctaaatcagcccagctcagtgtgacacttatgaagaaagactacttgtaccagaaataaagctaaatttacttatgccagaaaagcctaccttgggagcagagtcataagggcaaaactatttctgaacaggaatggactatttctagtatcaaaagaactctctgatattttctttaggacttatttcctctcataatcttattcaaaataagctttcagtttatgacaaatgtttgaaatgtatgatatttttagctaaactcttctgttaatttagctgttatgtgtgtgctttaataaagtgagaatattttcttaaaccatggactaggttggattttgttttcatttataatgattagcttcatatataatggatttatctgaccaacaatgttcatttaatttcaatttttgttaat

SEQ ID NO: 47190 - DNA, 1461 bp, Bovine  19866881266068
  misc_feature (1)..(1): n is a, c, g, or t
nctatggaaatattcagtggtagagtatagtttgaaatgtttgtgatgcatgttagcaagtcattgctttttctgggcaatgaagcacaagcttagattgtgtccaggatgaatacattccttgaattttaaaatcaaaggttcttgctattgcttgctatcccatcttcttggcagcttcacctctgcattgtgatgtttgcctatgctgttctgaagtctaatacccagttagaggcaaccatgttactatgactttagtgttctaagtagctgttagtggcagtttggttacaatgagaaccagaatgaggatgatcaaagattctgttatcaggagttgagagtgcctgacacattttgaacaaagtcttggttttcactttcattcctggcaagtaatttgtcattggagtctatgtggatgatcttttgaacacatccacctgcaggtcatggggaaaaatgatgagtggaggagattttacctcttcatgaagtcagggaatagggattagtaatagttccacctagtttaatttactattttgtaagtcttggaattgttgcaagctttattctctgttactaccaacattgagagtttgatgtgacagactggaaaactcaggaagaatcatttaagcaatgtggatgtgaatttagtaagatatttttcatcccacagatacctgtcattaaactttgtagataatactatctgttgcatgcagaaaagagtgttgaataagaaaaaaagtagcttttgcttcagaaaactcattgtcagcaataatcaattaccttcacaacaaacatggaattaatgcaggatgatatactccagtcactacatggtactctgatagaattttaaacatgcttctgatttaaattatgtattaattggttcaggcaccaagttgaaaggcctggctctaatgataaagccaagtaagcagcctgattaatgaaaggagctgggaagaatttgctacagaagctgaagctcttcgtctggtagctgtaatcattgtaatttattatgggaagcttcttccatggccctgagtcatagctgttattccttctgtaagaatatgttgactcacatgtttaaaagattatccagggaaaaatgtttattttaaaatggaaaaaaggaaaatattatactcagtttattatgaaaatgagtgggaaacaaaagatgggttgcacaatggtatctatatctgtatttgaaagtttgattccaaatagaacaatagacaatgcattggattaccactgtgtatgatattaaaatgttgaaaacattccattattcttataactatactaagcccttattattcttatattgtgactgagaccataaaaagaataaaaaacacaagaatacttaaaaggagctcacaaaatacaaaactggaaggaaagtatggacatcacagttgt

SEQ ID NO: 47191 - DNA, 669 bp, Bovine  19866881287952
  misc_feature (1)..(1): n is a, c, g, or t
ntcgttggatgtcagtatgctagctagatttgatagcttttcaatacctggctctatctgaaaattttaatccaggaaagtaaatatttatatatgtagtgtcctctgatccaaaatttatctcaaaagggagaattctaaaaaacaatccaaatttatatttattccttggttctagtaaaaaattagaatcaagaatttaaggtttctcttaaatagttcctagactttctattatgttggtgtccttagtcttaatgatcattcttgaagtgatttatgtcttcagaattgcaaaccaagtttgctagaattcatcttttcttgctggataaaatatattaggctcccataacacattgatatgttcatcaaaaggcctaaatttattagccacctccctagtagtaacttccagtgacagagtagttctgttggaagtctcttctgggaggtttaccaaagagagcacacaaatcttacttgatttaattggactcctataaacagctgtcattatatttccaagagacttgctttatcagggagtctaagaagtcataattttcattaggagaaagaacttggtcagtgctttattttctcccagttgatgagctactttcctggtttaccccttcagcctctttcctgccagtatccttaaca

SEQ ID NO: 47192 - DNA, 1041 bp, Bovine  19866881375375
  misc_feature (1)..(1): n is a, c, g, or t
nctgatcttgctgggacatgaccatcaagtgtgctgaccccttgggagccagttggggttctgcctgggattcacagcaaccccagatatatacaaacattttattttccatagtattgatgattttgcttctcttttgtttttccttttacatcgcttcttctctgtgtttagagtgatatttgggaacaggagagcaggtatgaaggttattgactatgacaactgtgtggcccttgagtctgagttggcaaataagattctggagacagagacaggctttaatctaacactgctcttactgagctttctggaagggaagacgacaagagacccaacaaggaaatacagcatcatcaactcatggggaggcctggcaggtaccctagtagcagcctttttttttgcccccctcacccatacaaggccaaagtgtgagagccaaggtgtgtggggtcaccttgttacaaagagtccacagtctccttcccccatcagtcctgtatatggttttcatcaagcctgagatctgcatgccagctcgcagatccccaacccaggtttttgtttcacacagtacagagggagagacaactgttctctatttatcttaactctactgtttccaaggaaacagggccttgggagaccgaggtcattctcaggcaggcctgcctcagccaggcctggtgttaaccctttgctcgcactatacatgctgctatagaaatgatagcatcactagaagcaatgctaatgccaagcttcagtgtgccattagagtgtcttttgtatgaacatttaccattgtatagtttccagggcactaaattagatacgccacactcactgagtgtacactgcatgtctcacctgattttaggtactggggatgcaaaaatggacaggacagagacctggcctctaaacacttcagaatctggaggggcagttctctctgcattttgagttactgcaaacctccaagttccacgtggaactgagtgctctttatggggagtgtgaagaaagcaatgtact

SEQ ID NO: 47193 - DNA, 1479 bp, Bovine  19866881402935
  misc_feature (1)..(1): n is a, c, g, or t
ngctaccccaaatgtgcaagatgctgaaggctcatctctcatttttgtgttccaaaggaggaggagaaagaaagggaaaatgagggcatcctcctagatgactcagcttccttcaaatgagtgctctcacaagtcttcccagttactcctgtttatgtctcattattcacccctacccgtaggagagatgagaaaatgtaatacttagctagctacccttctaaccccaataaagccactgttcccttaataagaaaaagggaaatgggtacctgataggtgcttaaagttgctgctacaggaaataaaactctttatttggataatatgagtggctgggtttttctccatgcctaatatatttctatttctaggcatccattaccttaaataattatgtatttgaaatgaataataggatatatttagttccattaactcattttaaatccatatatgtattaactatattttataataatatgtgttagctcaactttaaaatctaaaggtattaattcagccaaagagggaaagttaaaaaaaacttagagatttgaacaactgatttagccagagaaatcaaatcattgtaaatttttctgttatgcatgcctttgaatactctttgatattaaataactatattttaaatctaattgctccaataatagttttgatatatatctttctacttgaatcattcaatattttaccactgactaaaaatttctggttaacagtacaactgtcattcagctgctggtttcagagttagaaatttatttacttgattaaaactgaacttttactactctgaagagcttaaggcagtgaatggctaattcataccttaaaatatttagcattacaaaggaaaaaaagaagtgaggcaataaatagaatgtagaaatgggacttgagggcggatagtgacaacctcaagtcctggttacactctaggcagtgttctttctctgagtaatgcgttaggggaagacagagctttcctcatttttccccttaatggctgcattagtaatttaccaggggtaaaattacctcttcctagagtttatttttcaggctcccaaattatttcatatatctttcaagatttctctcattctaactcacaaaaatacctatctgtgcatttatacaaaaggagcatataattttagatggcactcacatttcctgaagcttattccaaagtcccaaagttgagaaccagtgacttaaagctgagtttgtcaaccagatagaagcgggcgggagaatattattcaggcagataagtagtagtttcaagtcgccatagcttcaagttgcagtatttggacactgctgataactctatatttatttcaaaataacaggccttgtaggaaagttgtgaggataaaggaatggataaaagactgctgacagatgatgaaaccatgctggattttgaactttatatacttattttag

SEQ ID NO: 47194 - DNA, 1143 bp, Bovine  19866881425252
  misc_feature (1)..(1): n is a, c, g, or t
nttcgatgcctgggtcctgaagatcccgtggaggagggcatggcaacacactccagtattcttgcctggagaaccccaaagacagaggagcctggtggactatagtccactgggtcacaaagaatctgacatgactgaagtaactaaataggcatgcacgcaaccctctaactagttatttatcacaatctaggccaagcagtatgtttgttttgtgttgacatagacagtcaaaatctaaatgcctttttcacctttcttattttatttttccattttaataattacataaggaatagaagcttatttttctaaaaggaatggacttagtgaaattacttgctataccacaattagggctccccatttaagactgtacccacttttacaatgtttgtacattcatttatcctcttctatcctcagtcttagttgttatgattttatgttttaaagcaaatgaaagtaatgcaagtaatattcatagtttacattcagaagattccacttacatatcctataatgtatatccattcacacttttcttgtgagaaaactagttatctacatacaattcctctgcttccagctgagaacatttttccacctaattaaaatagaaattcatcttactgcatttcattttgaaattcatttcaaaaatccactgaaagcaatgtataaggctggacacagatataattatgggaaaacaaatcatttgccaaaaaaaaaaaacagcttacaaacaatcagggatatttttccactcaagagttgttcatttaacagatacgctatgaaatgtaagttatctgattattccaaagacttttcctaacgttttgaaggattttaaaatattgtacatattatttaaatatagttatctttccgctgtgctgtgctgtgcttagtcactcagttgtgtctgactctttgcaaccccagggactgtagcctgccatgttcttctgtccatggggattctacaggcaagaatactggagtgggttgccatgccctccttcagggggattttcccaatccagggatcaaacccaggtctcccacattgcaggcagattcttttacagtctaagccaccagagaagctcctaattcctctatttttagatttca

SEQ ID NO: 47195 - DNA, 1283 bp, Bovine  19866881886315
  misc_feature (1)..(1): n is a, c, g, or t
ntctatagatacatagtaatttattttaccttttcccaaatattgggcacttaggatatttccagttttgtagtataaatactatgatgattaccatttggaaaataaatattcatatatatttgattttttcctcaggataattttagaagtttagtttaatcaaaagatacaaatatttcagcagttttgtttaattgtcaagctccttccagaagaaattgtactgataaagtctcccagcagctgtggttaggattgcctttttcccatttctgcacacatttaatgacaagttatcattttaaatgccttattttgtaaaaagaatattgtattgtttaaatctgtattgttttgattattagagttctctggaatttggccagcaaaattaaaaagcataataaacaatgctactgatttcaacctgttacttaatgctgtgtctcataatattatatcataccatttcacctgtatagctgttaaaaccacatcgtagttagtaagtgcatctatggtcatactctggctatgcaactataataatgaaataatattttcaaaagcatcttaatttaagatgcttaaatttaactgaaattacatatttctggtacatagaaatacaaaaaagtttatatttctggaaatataattttcctaagcatggaagatttattttgaaaggacatactgtacctaaaactataaatgtatgtactagaaatagtaaaatgtacattaaaacatattaataccatatatatataactatagaataggtcctgatataacatagttcgtaaaacaccttatgtctgcctgcttacattaatcattacaaaagaaaagtgtgaaagtgttagtcactcagttgtgtctgactctttgtgaccccatggactgtagcccaccaggctcctctgtccatggaattctccaggtaagaatactgggagtggtttgccttttccttctccaggggatcttaccaccccaggactgaacctgagagttcagtctccattcatgcagatacttaaccaactgaaccaccaggagagcccaattacaaaataatttcactgcttttgtcagtgacttgatatattactaataatacactctgatacaacccaaaccagagatattagacatagtttcatagaaagcatctaaataggctgtacaatgacactggaaagaaaaacaaaagcatgattctgcccaaccactgtactgcactgcacagagcaatttctgtctggattgcatac

SEQ ID NO: 47196 - DNA, 1502 bp, Bovine  19866880122593
  misc_feature (1)..(1): n is a, c, g, or t
nttcttttctttttttaattaattttattttatttttaaactttacataattgtattagttttgccaaatatcaaaatgaatccgccacaggtatacatgtgttccccatcctgaaccctcctccctcctccctccccataccatccctctgggtcgtcccagtgcaccagccccaagcatccagtatcgtgcatcgaacctggactggcgtctcgtttcatacatgatattttacatgtttcaatgccattctcccaaatcttcccaccctctccctctcccacagagtccataagactgttctatacatcagtgtctcttttgctgtctcgtacacagggttattgttaccatctttctaaattccatatatatgcgttagtatactgtattggtgtttttccttctggcttactttttcatcaaagaaaacagcctgaatctctcacataaaataacaagccagcacaaagcagtgagagatcagtgaagtggagaaggaactgatgcaggtttgggtcctgactcctctcttagctcatttcgttcagatctttactcaaaagctgcttctgagtgaggctttcttggtcactcactcaaatatttgatacctcctagccctgaaaatttattctctagtttttttaaaaaattccttatcatttagtactttctggaatatttttcttatcttctttccctctgtctccttcacaagaattaaagacccatacaaagcacagttttgaccgtcctgttctttacagtattcccagagcctagacagagcttgacgcacagcagatctgatgaataagtgaattaagttataaagtaagagagatggattggatgatccacatgatactctctagctctaacacaatgatactcacatgtatacatatcaccataaagctatggattacctgagaatacctcaagcgaatcatgccctcatgaccattgtagatgtacacagctccagagttctgattttccaaaggcgaaccaacaatcacgtcattaaagccatccatgttgatgtctgaaagagctgcaattgctgaaccaaatcgagcattttcaagacccttggggccttccagaaattggtgccaattcaaaatgcccttgcaaagagggaaaaaggggacaattaaagccaaccttacattaacaaatatatactactatatatttatagtggtataaatatagatataaatagataaccaaggacctactgtatggcacaaggaattatattcaatagtttttagttatctaaaaaggaaaagaatctgaaaaaaaaatctatgtatccatctatctacctacctatgtacaaatgaatcactgtgccatactgaaactaaggtcataggctatctgctcataaaccaacgtgaaaagaagcaattcttttctgtaggctgcctgtacaacctacataagagtgtccatttctttgtcttttttgcccttaatattagga

SEQ ID NO: 47197 - DNA, 1744 bp, Bovine  19866880234735
  misc_feature (1)..(1): n is a, c, g, or t
ncccagggctgatctccttcagaatggactggttggatctccttgcagtccaagggactctcaagagtcttctccaacaccacagttcaaaagcatcaattctttggcgctcagctttcttcacagtccagctttcttcacagtccaactctcacatccatacatgactaatggagttcaaattaagagggtgttcccttttacttatgtattaaagtttataatattttgctgttctttatgagttcataatctgaatgtattcactggttgaaaacaattttattgaatatttggaatgttttactgaaaaaaaaccttcagatgaggtaatatgatatggatgcaagatcctggatcatggcctcactccatcaacatttagcttaattctctcatattttagaggcatgaacacagctgtgaggtgtaatgggcagaggctctggaacactcgagtcaccaccacgttctctttctgacatctctgccccacctatatgcctcagtttactcaaaagacaaaaaatgggagaaacaagccagcactgaagtttcattataaatattcttttatcttcatgtcacctccatgaatgaccttaaaaattaccctaggtaatgccagccattctccttgccatttgacaagtgaagacacttgtcatagaacaggtctgcggtgcacaccgtcttccatggaaattttcccttgagtttttcctttccttctcttttttcgtctttgcccaaatcctgatgggacgagtcctcattgctaggctctgcagaggccaaactgtactctttcttctagcacaacacatgcaacaactatattgtagctttgagccagaatctgaaccttcttgatttattaaaaaaaaagaagaaaattgttgacttaaagatgaactagaactttattttcagaccaaagaataaaacgaaattaatccccttggtttttcttttctttacttctttttttggggggtgatttcattattaaataaaaccactttataaatgaaacaaaatccatgtacaaatgactgaaatgaatggaccaagatttatcttctttcttattttacccaagggaattgtttctaagagatcttaagacttaaacatgattccctaaaataaccagctagcagttctgcaaaaaggaaagcaaaataaatacatcttcttagaagtcagttataatttcccttctgacttttttttctcttttgcttacatgctccttaacccctatcctcctctgtccccatttcacttcctttggagccaaagatctgggaaaaaagttgcctggtaaagcatctggtcccctttccttggcagctgacatgccacttgaaatatttctcatgcagataacttaaggaaactgctgaattaatgccttaaaatgacattgatccatagtgagtgagtgagtgaagtgagtgaaagtcactcagtcatgtccaactctttgtgaccctatggactatacagtccatggaattgtccaggccagagaactggagtgggtagcttttcctttctccaggggatcttcccaatccagggatggaacccaggtctcccacattataggtggattctttaccagctgagccataagggaagccccaaataactgctgctaataggtctggttttgtggtggatttaatacattataaataaattgtacctaaatttgaagagaatgattcaagcttga

SEQ ID NO: 47198 - DNA, 1605 bp, Bovine  19866880473603
  misc_feature (1)..(1): n is a, c, g, or t
nagaaggaaatggcaacccactccagtgttcttgcctggagaatcccagggacgggagagcctggttggctgccgtctatggggtcgcacagagtcggacacgactgaattgacttagcagtatctataacaagtttccagagaaggcaatggcaccccactctagtactcttgcctggaaaatcccatgggcagaggagcctggtaggctgcagtccatggggtcgctaagagtcggacacgactgagcgacttcactttcactttgacttttcacataattggaatcatacagtttttgttcttctgtgagtggctaattctactttacataatgttttccaggttcatccatgaggttgcatattgcaggatttccttcttttataaggccgaataacatttcactatagtgttggagaagactcttgagagtcccttggactgcaaggagatccaaccagtccattctgaaggagatctgccctgggatttctttgcaaggaatgatgctaaagctgaaactccagtactttggccacctcatgcaaagagttgactcattggaaaagactctgatgctgggaaagattgagggcaggaagagaaggggatgacagaggatgagatggctggatggcatcactgactcgatggacatgagtctgggtgaactccaggagttggtgatggatagggaggcctggtgagttgcgactcatagggtctcgaagagtcggacacgactgagcgactgaactgaactgaactgaactgaaactaggaggcatctgtaggttcagcaattataatcggattggcagtacttttctttcttaatagtacctaaaatactggtgcatcagtcacttaatggtgatttccattcaactagatataaatatggatagatagaaatagatagactattcctgatataactaaaagagacaacttgactcctttattattttatgagtttgtttgtagtctgttcttttgtgactcattcaatagcaaattttcaagtacctattattcatagatggtagggataataaacaaagaccctattctcaacagaacatacactaatctgggaaaacagacaacttgatgtttaattttaacatgctgtgtattatagaagcaaaggtgctagagtcattcagatatctgggggaggggggttcagtctactccagtggcttcatggaagtgacattcacatggggacttgaggatatgtagcactgtaacggagaaggcaatggcacccaactccagtgctcttgcctggagaatcccagggacggcagagcctggtgggttgccttctgtggggtcgcacagagttggactcgactgaagtgacttagcagcagcagcactgtaacagcttatgcaaagacctggagatttcagaggaactggcacaatggaggagctgaaagaagctcaataatcataaagacaggaatatattcagctcatttacatctgttgatacattactgtacttgctttgagagcgaatacagttctccagtcaggggccactcggaattggcagtgtattctgactttagcattgtgacaacgatt

SEQ ID NO: 47199 - DNA, 1253 bp, Bovine  19866880506950
  misc_feature (1)..(1): n is a, c, g, or t
ntgaagatatttttctacttctaaatatatctgtttgtttggaaaaaatatagaaaaagaaaaagatggaaccaaaatttaccttaggtcttatcaccttgagactaattgttcatttaacaaaatatttattcaatgctcactgtatggcagagacaactttctaccctctctcacacacacacacacaatatttcacataaataaggacacatcatatatgctattctattatttgcttctttataataaaaaaatacattgtagatgacaaatgtctatatcaccattgttgatagttgtctagcacttctctatgcagggctagattgttacttgatcactgttggtatggcctttctcagtttcttatacctgcaccaatctcttgagactgaaactttctcaagtttacttcaaaaatgaatgtttctgtcatttagtgactttttcaactgaagaatgcaaaaggcagtcctcgtacacatttatgaatatataatatccatatatgtatgtctgtttgaaatatgcttgtatgctctatctatatatgggttttttttttgccttatttatttttaagtctgtgcatttaaaattatttcctccacaggttatgataagaaaacagacatatctttaccagttccattaaataatagattatttgcaaattgagcctacataagttccctgctgataacagagtcatttcctttgaaagatgtcttttagaattgtaaccactgtcctgagaatgaatacacctaactggatcttaattttcggtatatttgcacaacttcagcaagtctttcttggttattcttgtccttttctttgtgctgcatcttctcttggagttagtcacccaaactgaatttcctctggggaaactgtaagcacatgttctgcataatctcttgaggttaaaagctttgaggatctttgtacataatggaagaggagagtcctttgactacaattgtcttaatccttaagatgttttgtgtgtcctgaatggggaagccatcatttcttctaaggcttcctgagacaggatctgcaagattttgcttcttggtgattttactgaataactcgttgaatagacaaagttaattattactaaataagcgtgtgttaaataaattctctgtaaccatattttaagattatttggtgccctcaggttatatctaatgatatgtgataacatgtcataatgaaaaagatatttgtcttattga

SEQ ID NO: 47200 - DNA, 727 bp, Bovine  19866880531772
  misc_feature (1)..(1): n is a, c, g, or t
naattgcctaataccttaaaatataatcactcacatttcaaattcgggatccagcaacatagctaaaatgttactgctcatgagtggtggttatactgagtcagagagtgccacaaattaaatattcttgccagggcaccaccctggtcctcactccctccactgtagtcttactgtctctctcatgttgaagtctgccaagttttagagaagtttactcagtgttaagaactgtccctcactaggattctaaagtcagatcttttttcataagtacccatcgcccaaatgtctttggaccaggtttctggcacagacttatccaggaaatagagcgggaggagcacctttttttattttaagtgaaaaaacattcacacaagaacattacacaataacaagaccaaaaaaggttggctggtcacatcattgtcatcataaacatgactttgttttggtcatggaagaagtatcatgggttcttaagtcaaggtagcaacaatgaatatgataatttcacaaaactgcttaatttaacaagcttaaaatgcaacataccaatgttagaattgaggacaaaactgcttattttctgttcctagttacaaagtgaaagaagttaatggacagcagattttcagtagaaaaacaactgttctacccatttttgcctcagcagaacataacccctgggagtctgatacatagcaggaactcaaaatttatt

SEQ ID NO: 47201 - DNA, 921 bp, Bovine  19866880532164
  misc_feature (1)..(1): n is a, c, g, or t
ntttaaagtggaagtctgaggatatgggaaaaaaaaaaatgaaagagacaaagaatctgaagaattgaaaactgttaggatgaagccaagatgtgacttcagcaggctagtgtgggaaattgctgctaaaggaaatgtctggatgggggaggatagccccttggcttcatcacatagcgtggaagctctgaaaaaatctagcaaagaaggcatccgaaagggacagagtttattttaattaggaagataattgtagcagaggagaagttgctgttcattgagcacacactttatagcgggcactttacattagttatttggtttagttttcacaagcagatgttactgtcactattttacaagggaaaccaagacttaagagttaagcgactcactgaaggtcataacacagaatagaagaactgagatgtaagccaggatctttagagttcaggcctttttcatgacattgcattgcctcccatctaactgcccacagaatcttccatagtccaaaatggaaaagcaagaagcagtggccactgctacagcataccactccacctgatgccactgttgaatttgaagcaaataagtgctccagataaaggcactaaataggttaaagaaaatgcaattaggaaactatagccttttatctctcttttaaggaaatgcagtgacaagagagatcctttggctaagggcaggtaggctaagaggataccctaaagcagtggttcctcagtattgtccaccttggcttcacactggaataactgaggagctttaaaaaaacttcatgcttttatcccaccctagagattctgaatttactggtctggagtcttgggaatttttcctattggatttttaatggaacttcccaaggattttaatatgggacaagttcaagaacca

SEQ ID NO: 47202 - DNA, 1672 bp, Bovine  19866880553673
  misc_feature (1)..(1): n is a, c, g, or t
ntttgacctctgcatgtcctctttggaaaaatgtctattcgagtcttcagcccatttttaaatcgggggcttgtttttttgatattgagtcatatgagctatttatatgttttagatgttaaccccaaacatcatttgcaagtcatattgtttgcaaatattttctctcattcagtgggttgtcttttcattttgtaatggtttcctttactgtgcataattttttaagtttaattaagtcctagttaaacctagtttaattaggtttaatttgtttatttttgcttttatttctcttcctttagggaacagatccaaaaatatttttctatgattatatcaaaaagtgttctgcctatgttttcctctaggagttttgtggtttgtggccttacaggtttaacagtttttttattcacttgcttatgcaaatgggaacttccttctctgtaagaattttgtgctaatcgattgaaaacatacacacacacacactcacacaacacgcatatatgttcctttgtcactaagagaacagtttaccaacctgtctctttgatggtcctcttgtctagcctaaggaaacaggagagggggacactgaggatgctgtgtgtgggcataataaaaaattcctacgggggcacaagaacttcactatagacgtcattaaagctgttatccttagaggaactggcaagcggcagatgagttgtcacaacttgattctttgatttctgtaacaggaatgatcttggcacagtttacaggcagcaaactgtgcttagaaaatggtggtgttttctcctatgtatcagaatagataaccatatgaaagatggtgtgatgaagagaaatgttatacctgttaccaagtgtatgttactttaaactctttccttaatcatattcccccaaactaaccaatagtacttttattaccttacatagatgagtattatttggcaaattatgaaacagtttgctacactttttaaaaagttaataacacagcatctgattctttttaataaaaattttcttcccttgaatgctttcattatttttgtctttagattataaccagttgttctttccactgaataacccagcttttctagtttctggttccatgtaactggagcccagtaggcttaattacatttgaagatgacttaagtagatgaactttgccttagcttgaagatgtaagcttaactgtgccttgctatgcattagctgcctaatcaatcaatcagtgggctacatgtgctgcagaagaattcggctgtgtgttcacgtgaaaaataatggaactgggtccaaaagaatacccagtggattctcaaatcattagttttggattaggtctttactttggcaacaagtgtacaaataaacaagcatgactgaaattaatttattgcattcaaaagacatctgtaattctgcagttactctgtgagaaagaattaaacaatttcatctttgaccacttcccttcatatttcagctaaacaaacctctccttcagatcctcttttcagctgataggaaaacaaagggcctcataaataagcctttgtgtttataaatattaatacatatcaaaacacaaggatgacattaaagtgtcagaaaagccagtttagagacaaattatagactaatg

SEQ ID NO: 47203 - DNA, 1542 bp, Bovine  19866880572634
  misc_feature (1)..(1): n is a, c, g, or t
ntttcctgcccctggctacaatattttcaaaatatgaaatattcatcaggaataatgaaataggtcagaagtgggggcaaataggctatttcatgtaaaattccaagatcatgttcaagtctctaagtttcaatctccattactaaaatcagtgttttctcagtacatctgttctgcttttctttttctttagtgtcacatacattttaagagactcttgctctacgtacacagcgatccaataaaatgcatttcaaatggttcaaactggcttagcagccatctctagaggttaaaattttgctttccaaggctccctcacccactaaaatagaaacaggtagcataaagcttacagatgatggaaaatgccagatattttcccttcagcctaaagtcaaagagtgaaacacgtagttccatggacaaaaacagaccccagaaagcataaggcccaacagttccccctcagggcatgtaaccactgagccgcaattgacagacaaggcctgcaaaagttcagtgatgctttcaagttgaaagaatgaatgaatgaaattaataaatgaatgaaatacaagatctctatcagctggtgcaccgtgccttttactgttccataatatatggatgtctgataacatacagaaggaatatgaaagatagctttatgatacatatttggaaattagaaaatcagatctgtgattttctaagaaaagtgaacaaagtttagttcatgatttgtactttgaagtaaacgtaagattgactgacttgaaataaggcatctctattttattttgatctggaataagtcagctattatatatgatttacttgccaacatgtagaaggaatgcttagtgcattctgactctcgaactgtgatgtttctttgaatcttcctctcttgagttccagagaaaaaactccgtgatatctgccttagagaatctaatgtgacacggtactgcatatctataaaaataaaaaaagaataattggcagacatgcttatttggggttattatcatatgatccagctcattaatattatagaaaaatctctagaacaaccagttaacacgttattcagcatcttcacactactgtagtacaatggtatgtgaagtcatgaagataatcttgaggaactctaaagaactctccaagtttgcaaggcttttaatgtttaattatacttattttaaaatgtagatgtatgtttacacacacctacctacatactacctaatttcttgaccatgtgggtatgtttactgggttttcacttagttttttttttttaatttagaaatgttagaccctgtttagaatattgactgtgttgtatttcaacagaggcaaaaatatacattaatgatattttaaacttacattataaaagatgtcatttttgactatttaaaggatataataaaataagctaaataaatgaaagttaaaaaaaaataagcataccacgataaggaaaacaagttaggccttatactttatatgaaggcagcaatcttattt

SEQ ID NO: 47204 - DNA, 1487 bp, Bovine  19866880599831
  misc_feature (1)..(1): n is a, c, g, or t
ngaagcaaaaaacaggtttctgaaaaatcaacaacaatctcagtgttgtaggcactttccttcttgtttttcagttgtactgaaaatgttaaccttttgttttggttgctgacaatgaagggctgttgtctgttaacagtaaaaaggagaaaaaaaagtcattacagttttgttttctttaagtcagcattcaaatacttcactcatttaaaaaacaaattttggatttactatttagagactgagaaaactgcttataacaaattatcttcatagtaaaataatattggcaatgaatgaataaatcctattgggttttcttctttgttgcttttaattacattgcagaaaaagacaccattcaaatataaatggttttatatttcttagtgcttacttctatatggatgagagaaattgaaatttatactctctatattgaagtataattgatttataatattagtttcatgtgtacaatacagtgattgaatctttttatagactatactccattgaaagttattacaaaataatgactatattttgctgtgttgtacaatatagctttgttacttatctattttacatttacataatattgatagtttgcatcacctaattacatacctctatcttgcccctccttccttccctctgcccactactagtttattatttttctattttgtaatatacatttgttttggtttttagattctctatatgagtgaaacagaatatttgactttctctggcttatttcatgaagcacaataccctctaggtccatctacattattgcaaatggcagaattttatcctttttatggctgagtaacattctattatatatataaatgtgtatacataaatatatatatatacatgtgtgtgttaatcctttttatggctgagtaacattctattatatatacaaatgtgtatacataaatatatatacacatgtgtgtgttgcatcttcctttatccattcatctattgatggacacttaggttgcttctgtgccttgactattgacaataatgctgctataaacgtctatcttttcgaatttgtgtttttgttttctttggatgcatgtccaggactagaactgctagatcatatgatagttctatttttagttttttgagaaacctccatactgtttcccatagttggctgcaccagtttacattccgaccaacagtgtcaaagggttccattttctccacatccttactaacatttgttatttatgttctttttgacgacagccatcctgccaggtatgaaatggcatgatacctcatcacggttttgatttgcatttctctgatgattagcactgaagagcatttttttatgtgcctgttggccacttgtatgtcttctttggaaaaatgtctattcgggtcttctgcctattttttaaatcaggtttttggttttttgacattgagttgtacaaggtgtttgtata

SEQ ID NO: 47205 - DNA, 1614 bp, Bovine  19866880622107
  misc_feature (1)..(1): n is a, c, g, or t
nactgactgagtctggtaaaatactaaaagatcatttcacctttagcaattaataatattcagaatatctgactagcaagaaacatttaagaagctggggagttgttaaattttcaaactagtagatatgctcttcccttattaaatacttaattacactttataagctttaaaattgttttaattgcttctgtttaagggctgttatattaatttaaataaggtaggacaaaatatcacaacagttaaatataacatttactacattaatatcagcttctctttttccatcctttccttatctagccatctaattttctatgtcaatctgtgcctttaattttggttttcttttcaggtttcactaagttcactataattatgtgcatggatttagtccagtctataagttggtaaaactaggcttttccatgttagagtatgctcagttctatgtgtaagaactggaatttccaagacttggatatatacctaaatgttacaccaagcagtggaattttttgacaatctaatgtagaaagcacacaggaatatatggctatttctaaagtgccctgtacaatttgtccttaccattgtcaaatgtcaataaagtagctttgccctgttattgttatatctttatagcaaagaagaataattgaatgagatatttgggaaacacacagatgtatatgcatgtgtgtgtatgtatttcaaaaaacaacatgcatttataataactttatttgtaaataaaatatatattcaaagacctcttgtggaagatggcaggacactataccttaagttccaggttatgcttttcaatgtgatttttaaaactataacaatggtgacatcctcaaaatgaaatataaaccatacttttatttaataataaggtctttaatctgcaaaaatgcagattcactttcatttatcaatactaaagcaaatgaagtgaaatcagtttaataattttttttacctttgtaatagtaaacaggtagactcttccttcctctttctttaggtcattcatgtacattggtgcacctaccaagagcacatctgtaatggtgtccttattcacatcgactgcacacagcacactaccaaaataggagccaatctgcaggaataaagcatatcaacattagggttcttctactcttagtattacactaaatttttatttacttagtcaacaaacaaaaattgagcatctgttgcctgtaaggtgctaggaacataaagacataacatcaccccttctctccgtttgtgtcacaatctaacacttgcttcttagagctcagggtacacaaaagtcaccaaaaaagcacctgtaaaatacagattcccaagagccatttccagagactctgatgcaatgtctataggcaatcaagaaaacagtattttaagcaagcactccaggtatttctgatgctggtgggtaaaagaccacacttaaggaacacttagaagctttatgaggtgttgtagacaaaggcaggcagggaagagggaggttgaacaaataacagggcttctgtgataaaacataaaagaaagtgaacgtgtagtcactcagtcatgtccaacccc

SEQ ID NO: 47206 - DNA, 1747 bp, Bovine  19866880630103
  misc_feature (1)..(1): n is a, c, g, or t
ngatgtgacccataaagtgggcagattagtgttcattcttttgtcctcttaacatgcaagactgttcctttcctgaaaaataaagtctgagtccatagtttgtagtccttgccaaggttctctcagcacaaacagctcccaaactaaattacacaaaattctgaacatccctgtttacctccaataaatattctcccaagagtgcattgttaacatgcataaagcaatgttctgcttccttttctctcttccaaatagtttcatatacatgagtcttcgtatgttgctgctgtgatgttaaccctggaaactgtgaatagatgttgatgaccttgtaaaataaacaaacttcctatggactgcatcaaaactcagtgggctactgctcattcctaagggtaacctcccaatatatttaaattggacagactattggtctctagggttctgtcaaagcattctacttggactccagcaaaaaaaaagtggagatagcaaagactcttctgcactgatttcctggccccactggcgtcaaactgaagaggtctaaatgaacaggcctgaatcctcaaaggatctacatcactgccatgtttccaatctctttttgtacattttcatatcatgacttggtctcatacattaaagaatttaaccacttcaaaccacttctccttcagttcctactagctctttcaatttttttcaccagcaaacatcctcaaaaggcaactactaacttctccaagcattctgactatatcgaaagatatttccaaagattacaggcttatttatcaaatctactctgctgtaattttcatattgtcttcacaaaaacaaactgactatgtatattacaaaatcatgctgataacgcaaaaatccaaacactttgaacagtaataaccacatacatacatccttgattaatatcaggatttaggcagcagcaccaaaataattacacaagacttcattcattcattaaattccatcaaaaatacttcttagaagattatgtctcatgcattatgcaatgctcagaaacaaaaataaattactgattttgtcttctaaaaatatatagaataaaaagtgatgtgtaaataaataaatgtagtgaaatgtgacaggtgttatgattgattttcaggatacaatgagatctcaaaggagaaaataatcagtctcatctttaagagaagaggaatgatattatataagtacaattgaaaatgaaaaacacacacacagtcatatctactctgattagtaacacattaaaaacttgatgtggcccaatttaagaaaaaaacataatttcaaaattgccaattatttgtataagcaacagaggatgtcaaaagataaccctgctagtccattcatactattaacctaatatcttatgccaggcaagacacacagaatatggaatccaaacattagaaaggggggactgaatgtcctctgcatgattacataaagtcctacaggcagtaacattgacttgaggaaaatttttctctgcttcaataatgaattagactataccatctctgagaattatgatttgatcaaggaaatgtgtgtgtgtgtattctatcccaagttaccagtaggaaacaagaagaacaagaattgggggaggaggacatatctttatcacaaactagcagagagaccctgaagtaagcctggattgggacatgggattgccacatatggtgatgcaggctgt

SEQ ID NO: 47207 - DNA, 818 bp, Bovine  19866880688697
  misc_feature (1)..(1): n is a, c, g, or t
nctgttcccgagactttcatcagatgattgtccttggactgctagagctgctttgccccaaaggttccaagagtcagcagtgtctggacttttctccctcctcatcccttgccctgctccacaggcaaggcctgagtgcaggcaatgcaggatcgggcccttgacttaacctggagccccttccagacccagcttcacctgacgccacatgcttgcttgcactccatggctgctctgttttgctcccccaaatcacctcctattttcttttggaagcactccctttgtaaactgctatcacttggctcctgctctcagagtttgcgtctgggcgattggatctaaggcagttattatctacacttctgcattctttcttcagcccaggccagacatcactgactgccttgaacctggaccatggcaatcatggtctctgcactgctgatctccttccctccattcccactgtcttcaaatccttctacatagtggtggtagataaactgtgttaagagtctgcttctatcacatgccttccttattcaaaaactccaataactcttcattgcctacatcaatgactttgaaatatactttaaaagagaactgtaattctaattaaaatagaaaatagatacaacttcaagctgcttcttgaaatactaggcctataggttaaaattcagttttccaccccctgagtttcagccacccaaccatctggccttaccttctctcatcatcctcatcttcaggatttacccagaccaaatgccctttcttatccctgcaactaagctaagtcctacccattt

SEQ ID NO: 47208 - DNA, 1102 bp, Bovine  19866880718716
  misc_feature (1)..(1): n is a, c, g, or t
naatgggatataaaaggcaaaaaagagtttagctatttctatctttattaactaagtgtatcctaaacagaatccaaacgatgactccatagcaatgaattagtttttctttgcaaagttttgatgaaatatttgatcatatgataacacttaccattacatcattgaaacttgagataaatatgaaagaacagtatagtctttaccatttttaaactctggtataagatggctttgatattgagttcaacttatatgacttatatagttaaatttctctgtaccttattctgcgtggtttctgacttaaaactctgctggcaaaatcctcaaaaacatttcccccttgcccttttgatacccatcttattcagcagacctttaatcaattcaaatgtttgtatcacttggctgccagaagaagggatgcaattgcacaagatagtgctacttaaaatttgagataattttcatttttgtgcaacaagttatttcacatcgtttgtcaattcttgtgctacctcaccaaaggagctattccaaattatctttcttctcaagtactaggaccctgctgccttcctttattttagcaagtgactatatcaggcaagataacagagaccacagtaggtattttgacagaggaagttgaatgtaggagatggttacagaggaattaaaaagttggaaaagcagaaaggaaatgtggatataatactacagagctagtaactgcgagaaacagctgccatctcttggacttgggaaacgaaaggaaaaatcagggtattgaatttagaagcttataggagggactctgtagagtttagacctccaaggagggagtatgatctagatgctgccagtacccctgaagacatgcaacgaggctaagtgccaaaagaaactggagaagaaatttggaaaatacagttgtagagtctcaatgctagcaccatagaacataggatagaaggtagtatttgaagagacagtagccaaacaagtagtatagtccatccttttcttcatgtctttgcctggttcttaaaaaagcagaccttgagacaaaggcttatatgctattatctgagtagta

SEQ ID NO: 47209 - DNA, 2200 bp, Bovine  19866880730324
  misc_feature (1)..(1): n is a, c, g, or t
nctgttggcatcctgagagctgaacttattactttttgtggctacacagcacgggagagctgcatatggaaaggcatattgcagttgcaaacagagtgggattggaccctatttaagtgttcacccagatatacgacatatgaagtctttggacatgtgagaatcagagggaatgttgtgtttttgttaatgaaatcctttcagtgaattttattaacttataaataatttcttctcagtgaaacagtaagtcattgccaattttcaagttatttttgttagtatgtacagcaagtactttccagggccagaaaaataaagaggtagtacacactataaaataaatggttttcagtttacctagtagctttaactggcaattttcaattccaggctctaagagattccatattgattcttttgtatcatttaatgggacaatttttctggatggctttgttgttggcttttgaaagccatacacatgtccaagtgtgtgaagcatggttactatttcagatacttccattgtttctctggggacagtgagtttatcccactttttttatgcttatttggttggttgatgtgtttaataatgggcttctcaagtggcactagtggtaaagaactggcctgccaattcaggagacataagagacttgggtttgacccctgggttggaaagatcccctggaggagggcaagaatacctgctccagtattcttgcctggagaatcccatggacagagaagcctagcgggttatggtatgctgctgctaagtcacttcagtcgtgtccaactcttcgaccccatagatggcagcccaccaggctcccccgtccctgggactctccaggcaaaaacactggagtgggttgccatttccttctccaatgcatggacatgaaaagtgaaagtgaaaatataggatcacaaagaggtgaacatgactgaagcgatagcactcacacacgcatgcttaattactccaatgaaaattaggcacttgaaaatcattcctatactacttcatgcatatactacttctttgctttcctgactcattaaactatctgttctgtatactagcaaaaataacttaggactagcattgctttactggctcatatatttcactaagaagaaattatacgtgagttaacaaaattcattgaaaaggatccgttaagaaaagtacaacctattattcaggttccttcttctaaggcatcgaatggacagaatgcctatggtagctgggtaagactgaaactgaatcagataatataaaaagagtgaaaaggcatcctctttttttttaattgtacaatttggagtttagaactaaaattattaaaacacacctctgtgtaacaaaaaataacaggaataaatgtaaaagaataatcataaaaatttcaaatatatcttgaaatcatttatttagattattaaaatgtaaagatcaaaagtttaatgctttttaaaaatatgattgtttataatctaacagacatccttcacttagtgaaattccaacgtgaaaaaagtcaattaaattaggctgtcattatttagattggaaagtaatcactggcattatgagtcagctataatattttttcaaagaggaagaatgcctaggcttttaaaaatgttgtggttctttatgcaagttcttaagaacacaatcaacacatgaaatgaagtctaactacattttagtttgctgtggatcatgaatggctattaaatgtagcttgtcttaacctctcattaaaaaaaaaaaccttgtcatattgctcagaagcagcaggcaaagtgtgtgtatgtgtgtgtgtgtatgtgtgtgtgtgtgtgtatacatatatacttgtttataaaaaattaagaaaaaatacagtaaaaaattaagaatttaagaatatttataatattctttttggaatacaattatctaaatgctttctgggtttgacacacaagtggtcaattattaacattaataaattaagggcttcaagaagctaacccactaagtatggtatataatatatataataaaacactatgcaaacttcaacagtatattgcaaccaaaccccaaatcattaagaaaacaattatactacacttgaaaatcattcatatattacttttatgtatatactacttctatgctttcctgacccat

SEQ ID NO: 47210 - DNA, 1231 bp, Bovine  19866880788878
  misc_feature (1)..(1): n is a, c, g, or t
ntgtgttaccttctattaactcatcccagttttagtgctaagtgattagtgaagtgaagtgaagtgaagtgaagtcgctcagttatgtccgactctttgctgtcccgtggactgtagcccaccaggctcctccatccatgggattatccaggcaagaatactggagtgggttgccatttccttctccaggggatcttcccaacccagggatcgaacccaggtctcccacattgcaataaatgattaatgtaaatgatttgggagtcctgaagaaatgtaggcaaatttctctatcatcctaagcctccttctcctcttctgtccaatggtaataatagtggtatttgattgtaggcttgttagcaaattaaatgagatggagtttgtgaggtgtaacacacaataagtatactatgtagctgttaataatattaaaggaaaaattctctgttgttggtacatgagaaaccagaatttacttttgacctctgattattgtctgtgtatttttcccatcattttctccccatgttgctcctgaagccaccccagtctgtttgctgttttcttttaaactttggttaaaaataagtgtgattttgctttacttctagtacatgaagttccaagataactgaagatagtaatgtgaacattgtactaaaatttatgagaagctacttttattgtttatgcgctcctttaaatcgaaagaacaagatgtaaactatttttttttaatgtcatctcctgtgcttcaggctccttggtgtcttagaaaacatgaaagaaactgatttacaatcgttttgggcaaattgcctgtggaattctgaggacaggaaatgaaaaaaaaaagttcagcacacacccccggacattccacacaacatgtagaataaacaaacaggtccccagaaggaaaccaaaacttttgttcttatatcgagaagcactatgaatagcctttgggaagcatactgaagatggggcttcccaggtgaccctagtggtaaagaacccgcctaccagtgcaggagacatgagacacaaattcgattcctgggtcaggaagatcccctggaggacagtgtgggcaacccactctggtattcttgcctggagatcacgtggacagaggagcctacagtccatggggtcgcaaagaaccagaccccactgaagtgacctagcactcatgcacacatatactgaagatgatgaacttcag

SEQ ID NO: 47211 - DNA, 1020 bp, Bovine  19866880807753
  misc_feature (1)..(1): n is a, c, g, or t
nattgaagaaataaataacaataaagggaacaccttgtgttccaacccattaaaaaaaaaataaaatggtaccggtacctctgaaattctctgtatcactccatactctatcctatccacttttatcttgtgccccccagatagcaccaccatcctgaattttgcatttatcaatgtttttctttctgatgttgctaaacatgtatatattcctaaaatatggtttagtttcacagggttttgaactttatataaatggaataatactattatgtgttctacaatttgcttaactcaatagcaaatttctgggattgtttttctctctttttttatttgtagatccctttccataaagactgtggtgatgatggagtttgcatttctgatctagttctaaatgttcagcagctgccagccactcagtaagttttactttaaagtgcagtgaaaattgttgaaataaaagacatgttagattactttattcaaatgattgtgtatggaaatttttttctacaaaagaaacatcataactcctaaagatccttaaaatctaaagtatctagaaataaacttaaccaaggaggtgaaagacttatactctgaaaactataaaatattaataatggaatttgaaaataatcccaagaaatggaaagatatcctgtattcttggattagaagaattaatattgttaaaatgtccacaccaaactacagatttaatgcaatcccactcaaaatatccatgacattttttacagaactagagcaaataattctaaaatttatatggagccacaaaagactccacattttcaaagcaattttaataaaagagaacaaagtttgaagtatcttcaggttatgccttaaagctacagtaatcaatagagcatggtttgggcacaagagcagacgtatagcaatggaacagaatagagaaccctgaaataaacccatctacttacggtcagttaacctagaacaaaggcaagaatatacaagaagggaaga

SEQ ID NO: 47212 - DNA, 997 bp, Bovine  19866880810187
  misc_feature (1)..(1): n is a, c, g, or t
nctttgcctaaacttgggctgatgtttgaattgctcctcttttgtctgtgattatttcaggaaagaggctttcactgaagcccggggtgcccgaagaggggttaaaaaagtcatggtaattgtgacggatggagagtcccatgacaaccaccggctgaataaggtcatccaggactgtgaggatgaaagcattcagcggttttccatagctgtaagtatggggctggagatggctttcgggctccagtgtgtgcatatcatgattattttatgagctatgtaagcaaggttggaaaacagaagtgtctccgtttggaagtaaactctgtggaggcaggattaggtcttgccccttttgtgtcttcaacatagtgtcaggcgactggagactcagccaacaatcactacaagaaaggaagggagaaaatgaggaaaggctgaggagggagaagggagaaaatgcataagaagaagcaagcgagggagggagagagaaagaaagggacagaaatagggaggggaaaagtggaagagaaagggaaaagatggagggatggagggagaagaacatatgccttcagccttgggggaagggggtttcttaaattgattttttatttaatagagaatgaaagatttcagaactctaaaagttcaaccaaaattgcttttcaacaaaatcctttttatttatagttcagttcattcagttcagtgtctcagtcgtgtccaactctttgtgaccgcatggacagcagcattccaggctttcctgcccatcaccaagccccagtaacaacagctattacccacaatttgtttttcagcatttagtcagtgatatttccctttttcctttcaaaagtgtgaacagttgaaagacaccccatccaattgtaggtagggaagaaaaagagattcatccttgatgaagtcccagaacacacaattgagtcactgcttccctgaggcaaggtgcctatttcttttttataac

SEQ ID NO: 47213 - DNA, 3683 bp, Bovine  19866880825762
  misc_feature (1)..(1): n is a, c, g, or t
ntaaaaataaaagcaccttgagtagactatcctgagaatctttagtagatcaaagctctacaacctaaaagtaactaattaggtgctcctctaaagtaaatacaatttgttctaaactagcaagaaaaacccagcttattacttttaacaaggttggtttaacaagtttcttaagaaaaatagattttaactttagcctcagggaagtcttctaattactaagcaatcatttaaaatagcaaataaacttaaaaattaagaaaaattggaatgtgggggaaacggcaagaaaaaggatcatataacaaagtgtaagaatacatcgtgccaaattaaacaatttaaactgaagataatgagatattaaaaagcttttcctaaggaaaactacttcaaagcatgctgtatgggatttttatgttccatcccaaagaatatataggcattctttttaaatatacaaaatgtttctaagagctgcgaataactcataattccaaaataaaattatcccaattaataatatatggagattatttccttttattgttcagtttgaaaacatgtcctgccaaccacaaatcacctagagtgaccaaaatacatgaaaaacccctgtgagaaccacaaagtgccatttttgcagctttcttcacaggatgctgagaaaatgtaacagtgaaggagtgagaaacaggttgtctcaattgttagttgcaatcattcatcttcttcagaactggaatcattctcttggtcagagagttcagggacaggaaagcggaggatggcagctattccagtcaactggctgagctgttccccagacacgtgaagactagagaatatcctaacggtgcctgcgttctctttcacgctgtcgaccagccgcacatatcggctgcgtgtggctacatcctggtgccggaagagctcatcgctgatgagcaatgtgtcaattgccatggcctcattggccttttccacctgcttgagtccataaaatgctcggtccggttcgtgttgcaacattttatagaaatcatccaaggcctttacttccccagcggctttcgtgtctgaaaggcggctagctactgtagggtcacaaagagcctctttcagggagtacttgtgtccagaggaggcatgtacctagaatcacaattataaaagttagataaaagaatctcttagggtatccgttaaactgcccacaatgacctcaagccaaaaacactactaaggttttatacgtttaagaatttaaaccaagtttattacataaaatctctagctgcttaacaggtttcttttcaccgcattatccaattcacaatcccagccaagttaaaccttttttcctctggtactattctgagttctaaaactaggagtagtttaagcaaacccctctgcccatgtttaattatccctgggtaagactgttttacctgaaggaatttggaccggttttccaggagcactttgttgtcggtcttcactgcctgttgaaacatgtagtcgcagaactgctccctcacaaatcctgggctggccactaggacgcactttacaacatcgaagtgtatgtggcgctggatggcctggaccacctgttcatagaaccgctccaaggcccggtcgtgctgcgagcagttgcctttccgtttccgaggggatgttcacttccaccttggcccgagtgagggtcatgctgggagtgactaagcagatgtgggcgaggccttcctgcataaccacagccgccacatcggcgctccaggctgggtcacaggcttgctcgatgcgctccagaaccacacctgtcccactgttttttggccagggtgaactggcggttgggctccagctcgatggtgtggtaagcccccatcttgacatattcattctcctggatgttggtccccttgacccgcagctggcaggcttgggagtcgaagtcgatggcctccacgcagagagtgagggtcgtgcggacccggttgcttcccacgctgccggtggaggactcggtctgcaccttgcggatggtggaagcgcgcaggctgtcgcccacctgcactagattgtaggtgtgccacatgtcctcgggttcctcgggaaccagggtcacctggcccgcattgtctttctcaatgtccttcctcacgagcttcatgaccctggcgggggctcactgccaaaacaagaggaaccgagggggtccccgcggaaaaaggagtcgggaagggaaagaaatcctaggccgggaagggggcggggcccggttcctcccggcacctgcctcgcgagaaggaaacacgttatatccgactctagcggccgtggggtggggcacttactctagcccttccttttcgtagtctcgaggcgcgccgcgcaaaatcggctcgagaggcaccgctgcgaacacctttctctccgcggttcctgctgctgtacagaccaaggctgatgcaacgagggcgcatgcgcagccctcctcctgcctcccagcgcacggcttacgtccccaaggaggaggcggggccgcagcttgcgcgtgcgcaggcgcgctaagcccggaggtgtttcccgaagaataaaccacctaaggaaagcacacggagtctttggtggcgagtctttggtattagtgctgaaactggacttcctaagttttttcttccacccctgtttgtgaagaatctggggagttgtgagtgcaaatatatatatatatattttaagctgtgtgcacaccttctccctatggataattctagttacggaaaagtaataacttatggaaaagtaaaagggctctgaaaagtgcagacttggcaccaagggccaaactacgccccgccttgctcctgcctcatccccagtcagacggtgcacgctttttggagctgctcagtccagaagctgtttcttaagaacgtctggtcacggggcatctgcactgagtaacgtgcccagctgctttgtgctctcagttgaccaagtgtgcacgatctgattaacccagatgttaaaacactgatcccagagagagaagaaaccatctgtggaatttacccctggatggacctctcagttgctttgatctgatgtcctgagaaccccagaagccaaggttggcagtctcagctttccgctgctcagcagcctgtgaaatgtttacgtaggggttgggtctcaacagtttaggaccggatcttcattgtcagagctgagctgagaccccaggactggggaagtggaggaaggactgatttaccctgactgaacagctgcagaattcatttgaaaaaaaaaatccataagtcacttaacattttgggatgaaggagaggcgggggtaatttgaaaggtgggaactgcctcttaaaaggaccagtgaatcgaagaaaacccaccaaagttttgagagttaagatggcttggagggcagagggcacaaatcttccccattggccttcctatgttattgggtaaggcattggaagggaaacttaaccaccctaaaatgtaagactgggatgaaggggtgtaatatgactttggcacagatcttgatacccaaatctcaattaacttcctcaaaggttgtctggggggaacacaaaggtcccctccaaaactctaggcaaattagaacagctttttctttt

SEQ ID NO: 47214 - DNA, 1001 bp, Bovine  19866880839498
  misc_feature (1)..(1): n is a, c, g, or t
ngaaactgatagatgcctgattctgaaggttttgaagattgaagtcgaagttaatagtgaaagtcacctatacacaaaatgaaaactcatcaatctatgatgctttgtactcagggaccaacataaaaaaaaaaaaagtgtcccataaaagttaactcactcccatttgattctgaattttatgaaacttaagctttctaatttgtagaatatctatgtatttttccaccttgcctcaccttcagaacagaactgaatttacttaacaaatacatacagcaggtctccctaatgactcagtcagtaaagaatctgcctgcaaaggagacctggccttgatccctgggttgggaagatccctgggagaaggaaatggcaacctactccagtattcttgcttgagaaatcccatggacagaggatcctggcgggctggagtccatggggtcacaaaagagttggacacgacttagcgactacaccaccaccaccaccaccatacttatcacaggcactaatacttgtctgaatttgaaggctttgtgctgatgtaaaatttgcttaccaccaggggttaacaaatgatatccgtgactatgtgtaaaccactttgactggtgttggtcaatgtgttcagaaaaaactttctatgttgtatgtgtctttggaaatgaattgcacagggggaaatcccacttttattaataatttaaagcatgcagatatttttaaacttcctttaaatatgcagccaattattttatggtgcctctcaaatgatgatacttaataaagaaagatggttcactggtgaattaacaccaatgatgagaaggggtcagcaagagatttgggcatgaaatggaagctgtaccctgttgtttgctctttaaagcagggtagcccacattgcaggtaacagacttctgagatgaagcaatctggcaggtcaccttctgtcccatcaaccctgaatgagaccaaagaaacaatgatcaatt

SEQ ID NO: 47215 - DNA, 1200 bp, Bovine  19866880859637
  misc_feature (1)..(1): n is a, c, g, or t
natgctgaaggtgaaactccgtactttggcccttgatggaaagagccgactcattagaaaagaccctgatgctgggaaagactgagggcaggagaagagggtggcagaggatgaaatggttggataacatcactgactcaatgggcatgagtttgagcaaacactacgagaaaatgaaagatggggaagcctggtgtgtagcagtacatgggggcacaaagattcaactgaacagctatgaaaaggttggtgtgcttgggacactgccactaggaagcaaagtggttcaagatgggaaggacttaattggtaaaaatcaaatgcttccctttaccatagctagggctggagtcttgactgtattaaattggtgtttatcaggtgctactgcttataatcatgactataaattgaatcaaaaatatatagcccctagttctttcctgttttcttatctgtcactaactcgacttactaatccttacaaacacttgaaggcatttttttcctaccctgtggatgctactcacctgcttactaagactgcagtggcacctgagaatacgtagggggccgctcactaaccctgacacccaatcatgatgctcctcacagacttattgcaggaagtcagccaggtttcagggagatgaatatctgtctgtttccttctgactcactgaaatgtgagtaagtgtttggaacagacccttgtttgggagggagtgagttctcttcgtgtgagacaggagtctgtgctttgtctaagagtggctggagagaaaaatgtacctttctttgcttttgtgctcagaactagacaaattaacatgctggcatgaggtacaggataaatcaggagctatatttttccagagcaggcaacaatttcacatttcaagaaacaaagaaccaacttctgccccacattaagttttttaagagtgtaaaggtttcctgacactaaacagtttgagaactcccaccttaatcatcctaggaactatcctgtctaggggtaattttgctggttaccacattctgagtaggaaataagactaagggaggttttctgaaactctttgatctcaggatgccttggataaataaatacaaaaatgtgattaggtacactgtgaaacgttattcagccataaaaagcaggaaattctgccatttgcagtgacatggatgatgaac

SEQ ID NO: 47216 - DNA, 2666 bp, Bovine  19866880861721
  misc_feature (1)..(1): n is a, c, g, or t
ngtctcttgtagacagcatatataggggtcttgtttttgtatccattcagccagtctttgtcttttggttggggcattcaacccatttacgtttaaggtaattactgataagtatgatcccgttgccatttactttattgttttgggttcgaatttatacaccatttttgtgtttcctgtctagagaatatcctttagtatttgttggagagctggtttggtggtgctgaattctctcagcttttgcttgtctgtaaagcttttgatttgttttaatgaatttgtgggggagaaaagtgttctccccgtcctactcctccgccatcttagctcctcccctatatatgctttttttaagtttctcttattctttcctttgcactttccttaacaccttagaattcagttaagaaagaattggggaaggcgaaggtgggatgatttgagagaatagcattgaaacgtgtatattaccatatgtgaaatagatcaccagtctaagtttgatgcgtgaaacagggcactcaaagccagtgcactggggcagccctgaaggatgggatggggagggaggaggggaggggggttcaggatgggagacacatgtatacccatggctgattcatgtcaatgtatggcaaaaaccactacaatattgtaaagtaattagcctccaaataaaataaataattttttttaaaaaagaaacaaagagtcatagagagacaatccttgacagcattaacaaagattagagctaatgtatattataaatttactgcattatgctatctatctattttggaagacattttgacacttaataaagtcaaatccatgtgacaattggccactgtaaaacttaatccattgtattttacattatttgtttctctgttaaaagtattttgttaattatatgaaatttctattttttagatttgattatactaagttgctatttttaataaatcattattgaatattggtaatttcaatttaattctaaacacatttctacataaacctcattaccagagagtagctatgccatacctaactacatgaaaagagggcagggtttggagttcattttgcaaaggaaaaattttaatagaaactgtgttattcagaaaaattcttcattctgtaataaggatctaagtgagaatctgagtgcagagaggaagggtggatacacagccatcacttcctaccacaaatgccatctggatgttatatgcttcaatctcagaaaaattgtagtttgaaaaactgctctaaaacacggctagctctcattgtgactagctccttatattgaaaacaaattgtttgctttgcaggcacatttttccagcttaaatcttactgtaagggcagaacttcagagtgaaaatgcaacactagttctaagtgctggcaatcaaaaaagagaggtaagtgcgactccacgttttgaaaacattatacatttcactccatttgtgactatatttgctgatagtccctaaagcactgactagaagcgactcagcagcagcagcagcactgttgtcaatgagtggcagacactttctgcttcagattacacttgattagcttcaagtgtgatttcagtctccttttttgtgagaaactgggaaaaaccatgatatttactattaacatgccatgtttgactttattatttataaccatcacaggaaattgatgtttttattcttacgttgataacatatgatgcatctgtcattttcatccttaaaaactaacattacaaaatgcagttgacatctgaagagcagacttgaaaaacaatttctttccagaaaatgcctttacactgaataggaatacttgtaaatttatttttaaattttcttcatttagccattgggaaataacaaacaaaaaatgaagtaatattccctgacacaaattcatgctggagttcttcttaaaaataaaatggtttgtttttttctcttttgtcctattgtaaaataaggtcaaaacacctgttaaacatgtgggcagttgagcataatttccctatttatcatgagagtttaaatttttcatatggacatcatgagtcataaaattatatttaaaactaccaaaaattgagaagttttcattttttatttcaaattagtgtgtgttagtcactcagtcatgtttgactctttctgacatcttggaatgtagcccaccaggctcctctgtccatggaattctccaggcaagaatactggagtgggttgccatttccttcttcatcaaattagtatctatttaaaataattacaatgtcagtgacttctgataaggatttacctttaaagaatatatgcatcatttatctacatataatgtttactttataaacagcactttgcttgatatatgaaaagttgttccacatgtagaaaaactaaaattttaccagtaagcaccaaagaaaaagtatatattatattggaaaggatttggaaagagtatgtttggttactaaatacattttgtttaaattttataattagctttattttccctaaatgttacttaaattttcccacagagccatttttgctatattttattctaaagaaaaattacacttaaactgttaaaattactaaaaattatcatttcatagt

SEQ ID NO: 47217 - DNA, 1376 bp, Bovine  19866880877080
  misc_feature (1)..(1): n is a, c, g, or t
ncagacacacacacaccataaagaaagctgagtgtcgaagaattgatgcttttgaactgtggtgttggagaagactcttgagagtcccttggactgccaggagatcaaatcagtcaattctaaaggaaatcagttccgaatattcattggaaggactgatgctaaagctgaaactccaatactttggctacctgatgcaaagaactgactcactggaaaagacctgatgcaagattggcaggaggagaaggggatgagatggttggatggcatctccaactccatggacatgagtttgaggaggctccagaagttggtgatgcacagggaagcctggcatgctgcagtccatggggtcgcaaagagtcagacaggagtgactgactgaactgaactgaaccttaaatgtagcaacaaaagctgttctcacgacattcatgatctgataggaaacaaaggaccagaaatttcgtgggaaatcatccttttgtaagattaccagtcaagatctgctggatttcaagagcattttgggttcagagaactggccatcctcttaggtgctttaacagacctgggcatcaggtctcttgatgtcagtttatcacttgcctagatcacttcctgtacagattccaaacctccacccatgctgcatgactcaggacagcatcagtgttatctgagctgttctgcaatagaaagggaaagcttgccacaagtgaacttcctgagtgatatttttttggtcaagtttgtgagaaacagtcaagcaggaaagaataacagggcaaccacatacaatggaacttggaggacatgttattaagaaacaggatttcaaagataagagagaaattccatcaggcccttagcgagtagaatctataaagatcacaacccacacttccttttttgtgctacaaattttcaaccgtctagagaaaatttccagacactgctctcccagcccccttctggtaacttccagagccttctgcttcatgctccacaccagcccttctttgacattcttttcatctaatctcctcattctaagtcacttggttggtaaatctcccaagggatttgaactatccctgctttcatagaaaaggacctcagcaactttaatttattattagataaaatcaattgtctaagtttttctttggtattcttggcatatgagagcttgctgacaaggccaacttcaaaaattaaatagttaatgaaactaaaccaaatgtactaaatgttgagccagattatgctgacattgatcaaatatttcaataaccatgcatgtggcttcagtaaagcttctagcatgcaaataattttttttaaattttagatagctttcagattcagat

SEQ ID NO: 47218 - DNA, 715 bp, Bovine  19866880892582
  misc_feature (1)..(1): n is a, c, g, or t
naatatgcagttcagtttatactggttagtaaatgtaatttacatgtacaagagtaggcaggcatagactggataaaatatttgactacaaataccttgaactaataactttaacaaaattaggagtaggctttcttttctaatttatattaatggaaatgtttaaaatgccttgaaaaaaaccactgagttatacacagaataaaaggctttaatattttaagaacagaaccttttgaagatgacactaattctctgtgctatatgggactcagatttctcaaaagatatttttgaggatctttattatgctagatagaaataaagcattaaaagcttaactggagacacataaatctatagctacaaaagaatttctttgtttttttttttttagaaaatgtgactgaagcactgaacttaattctactaatagaactggaatatttttatatattacgcaccctaaaaacagctgtaagcttgttaattacaactgctttaatgcagtaaatacgttctgaagcaaacaaaagtgtatatacatcagcttcctctaacccaagcagccactttggagggtgggaggtgccgattcccgtagctctgctgtcttctctctgcaggccttggtcagcttcacctttctctcatcaattgacatcctctccatttcacagcccagaatctgctttgccttccttcacgtaatcat

SEQ ID NO: 47219 - DNA, 1952 bp, Bovine  19866880974991
  misc_feature (1)..(1): n is a, c, g, or t
nctggtgggctgccgtctatggggtcgcacagagtcggacatgactgaagcaacttagcagcagcagcagcagcatagacagttgaacatatctgctattcatagcagtatcttaaaccatgaagttagtgtttatttctattaatataaaagaatcattcctaagtcatggcgtgaagttttcgtctccagcccaccccataaacacactggaaactgccattcctttggagggatagagaaactgggggctgttgaaggcactgttttgtgaattagataggaagggctcacttgtaggctgaaataagagttgacctttccctggtggctcagatggtaaagaatccacctgcaatgcaggagttgttgttcagtcactcagtcatgtccaactctttgcgaccccatggactacaacatttccaggctttcctgtccttcaccatctcctggagcttgctcaaattcttgtccattatgcaatgcaagagaccttggttctatccctgtgtcaggaagatcccctggagaagggaatggcaactcactccagtattcttgcctgggaaatcctatggacagaggagcctggcaggctatagtctatgggattgcaaagagttggacacgactgagtgactaagcacattgcacaccatcacctgcccggccatctctctgagaccaggatcctgcttgcagaggaaggactctgaagccagtcccagagaactggcaaagctttttccagtctcctcatttctggaaagtggtgtgtttattccctcccaggccttttcacttttattctgaattacaggaaaaataataatagtaaaaatctgtctgtattatgactggctaaacagatggggattttcttcgaagtaatattttcaaggagtgtcacctagcagctggattcctttgcctggacagaacttgctccctaaaagcaaaaagaaatggaagcacttggggtggtaaacttgtgtcagtttggaatcagtttggaacagtttcagttcagttcagtttaaaacctctcaaatccagcacattctaaagctttaaatgctatccactaagaaattatatctgaggaatttttccattaaacatttagtctggttcaaacctaataagatgctaatcttttcaaaacttgttttcccttatttggctttcttactttttgtaaaaagtcagtaagagtttaatataccagaactgttgaatacacagggtggagtagaacgtactctaggcttggtttccggagaactagatccaaacctggattccataactaagtaattttacaaacttgggcatcactaagccattgtgaacctctctataaagtgaagataatgccacctggaaatgtgctgtgtgcttagttgctcagtcatgtccaactctttgtggccccatggacagaggagcctgacaggctacagtccatggggattgtacactaaattatggagcctttatgtaagtactcagctcatgtagtaggtgttcaataaatgttaacatctgtggcctcagaggggatctggtcacaagcttcattagagcttcttctttcattaaatgtgaaatgaattttactcatagaaactaaaatagcttgagaagacagacatcattctagggtaagcagcagaaatgcagaactgtagaattgtgctttaattcactgaagattaaaaacaatgcaaaatcagaatagcatttatttcatctgccagaatcttaccctatttctttccttttatttgtttaagcataggagattagaatggtacggacatttgaagatctaaagtatttgtaaatatgtgtctttgcatatgcacattataacatacatatttttaaaagttgttccaactgtatttgggcagaggtcagcaactttttttttctgtaaggagaca

SEQ ID NO: 47220 - DNA, 959 bp, Bovine  19866881022307
  misc_feature (1)..(1): n is a, c, g, or t
ncatttgtgaggttcagtggtgctgccaaggggatgagggtacatgtggtgttgtactgactcacaatctacattgctgcctttcctaccactccacataagcaaaaataagatatctgttatacaaacacagcttcaaggtaagtttttttccagtcacattgctgtttataaaccccttctataactgaacatcaaagcccatggttggggtttacatttcattagaaaataatatcactgtgactaataacacacaatttacaagctattgcatgcactatcatatttcatggtttatcatatttctgacaccctcccccaaacacacacagttagagagcccagaaggatgcactgtgcatttctctgtactgatctgatcaataattctgcccactctcctatctcccttctggtcaatttaactgtgaatgtacttaaaaagaaataaaactaactactcttctgccttcctaaatccacagagaaaataccaaaagctcagcctctctgcactggagccaaatcgaatctcggagacaaaatttggggtaaagtaggaaagaatagcttttttgctttgccaggcaaaacaggacccagtgggctcctgctcttgaaaattgtgtcctaacctgggaggatctgatgaagagttttatagcaatagttcaggggtgggattgctgacaaaatgagaatgtgagcagggcttgcactctcttaatctcaagtaatggtctcctaatattgatgagattctctggtccccctaacttgcttcaggtggtttcttggccgcttctcccttaattagcaactgtgcgaatctgccctttggaactaaaagaaggtgatggaagttaggagtcttgcctatcagaaacaggtgacaaaaaaggcttccacacccaagagccccgccaggtccttctgggtttcaagctcactctcag

SEQ ID NO: 47221 - DNA, 1437 bp, Bovine  19866881030386
  misc_feature (1)..(1): n is a, c, g, or t
ntgtccagtatcgtttgaattaaggggcagagctgacccaggagtacagtataatgacttccaaactgtggaatacactgtgcagggagattaggggtttgttgaaatggctaaaaatgtagattttggaaactctatttaaatttagagaatagttatagaaaccattctgagatagacaatacagcctttggggaaatacactgtttaatattgggtatttcagaaagaagcttgatatgtgcttaatcacaaacaagattgatggtagtatctgtcagtataagaacatacataggacttcctggtatgcagtgtggttttgttaatggagagaagagatgttttgtggcagatgcctgctagcaagaaaaaccattacttccagaagttaaggtcaggaaatgagaaagaagttcaaagaggtgaactactccagcgccatgagcaaaggtgctcatggaaacacctaaccttttcttgtgtgcggatgaggctctagagggaggtgctgcagagtgcagggtgcccacttaacaatacccagggtggtctctcactctgagggtgaagaggacatggcaccaggtttatgttgggagtttcatcctgttcttggggcttcctgaagcctagtgctgttgactgtgttgttgtagtgctgcatccacagacttctgtccaggttcctcagtgacctctactgtcagagaagaccttgtctggttgaactgaatggcggagacccctcaaacgaataaagaggcaaagctggaagaggattccaataagacctgcagatgctggatgtctccaaggaaagcgatgggggaagttagggctgtgtagtgaagtaggtgtggagggaaagggagtgctaagtagtcatcatgcttttactttgggagagaacttgataaaaactgagactgctaatgttcctccttttcccttcacttagggcaagttttaattagattcagaaaaattgcattcgttagaattcacttagacaacattctgtttagaaaagtgtgtggggtttagaacaggattccaaggatattcatggaacccttttgagcgagacaagcaaagagctttcttagttcttggaggagaagaaaggagagactagtactggtggatccacccgaatgacagaaagtcacacactttataatgcagctctcttcatgactgtgtaccaaggtaataaattcaagaagtacttgaacaggagtggatttttagtggcagccaatgaagagactctgtgtggaattattggagaacttggatgggagagcatgaagccagagagaaggatgagaaagttggacattacctgtaatattttgcactctcacagtctatataattggcaggcaagtttaaccagatttgtgatgtatgtatgtgtgtgtatatgtgtat

SEQ ID NO: 47222 - DNA, 1379 bp, Bovine  19866881038549
  misc_feature (1)..(1): n is a, c, g, or t
ncttgtgaagttcccgccacgtgaaaagaaacatcaggaatgagaagtaagcatttccctctaaaacacagctaaagccgcatttttaaatctttttttggatccttttctcctccttacctttcctccagtccagaagtaacctctacttaaattctaagatccttgtgtgtaacaagtacttagtacaagtactagagttttgattctaagtaatagaatgcttccatgtaaggaaaatattggctgacagttcttcagaatattgactataacatctgtatatactttcatttcaagataccctaatagtcaaatggaaaggatatacaagataatgatactagataggaatagagtttgaatccaaggatattagtgctcaactattatgttctaagtgctgaaagttagaacaacatagctaagaaaacaaagtttagtgctatctcagtacaaaaaagaaagcatgaaaaaattatctcttttcactgaaaagaaaatgcacattctgctgaaacttgccttctgaaatatttcaacattccaggctactgagatttttttcaactcttataaacaaaccccaatgtccattaaaatattttctgattaattttccaaattttttcaggtgaatagcaagttgtatttgtttagcttccattatttcctcttgataaactagacacattttaaattgaacagaggtaccaagaggctactgaatgaagagaatgtttggtagtgaatgatataatggaaaattgctataataagtagctaggaagggacatagttatacagaaacattttagtttaagtggtagcatattattaggggcagagctgagctgtccagaaaaattggcctgttaaatggaataggagaatcagtaacgtcttctcttagtatctggaatttaaaattgccagttaaagctactaggtaatggagaacagtgtggagattccttaaaaaattggaaatagaactgccttatgatccagcaatcccactgctgggcatacacactgaggaaaccagaatggaaagagacacgtgtaccccaatggtcattgcagaactgtttataatagccaggacatagaagcaacctatatgtccatcagcagatgaatggctaagaaagcagtggtacatatacacaatgaagtattactcagccgttaaaaagaatacatttgaatcagttctaatgaggtggatgaaactggagcctattatacagagtgaagtaagccagaaagaaaaacaccaatacagtatacctaatgtattgtattagtaaattctaattgaatttaaaaattctaaattctaatggaatttagaaagatggtaacaataaccctgt

SEQ ID NO: 47223 - DNA, 2540 bp, Bovine  19866881049390
  misc_feature (1)..(1): n is a, c, g, or t
nggtgcctctcagacgggcccaagcccccctttgaaagtgggcatgaatcacaaagcccgcggccgccgcacctgcactgcgcgcattcggtgcagcaggctggtaaaaacgggtgacctcgccgctgcttttcgctttataattaccgtcccgaggactagagaggaggggcgcgggcggtccgggcggggtggggtgggggcgctggcttttgctcacttcagacggctctgggggctccacatccttcttaatctttccagatttattcttcctctctctcttccctcttctctctttccctcctgtccgcccaccccttctcttttctctttccctccctctcccccgactctgctcctagtctccccgcttttccctcccctctttcttttcccgtcttcctttctctcttccctccaatgcagcattaatgtagagttgtttagtgccctctaatggcagacgacattaacaattaatagcaaactgtcccctttgcaggagccgacactccatggcagagttccaaagttgaatttatttcttctttattcaggcagatggatatagtgcttatatagtaatgtgctgtagggaaagtttgttttctccctttagagtcccctttcccagggaaaacttggttgaaagaaaggggaaacctaacaattatttttgctcaactatttttttttaatcagggaggggtatgggtatagatttgtcttttaatagcagcaagagatacaacttctgttttatcaaagtttatcaaatgtgtatctagggttggaaaataaattcgatattttaaatatataaatgatcttagatagttggatctcatggtagtgctaccaatagccattaaacattttaagacccaaatgtaattacatgattttatattgtctcctgtttaagtatatttattggtcctgaatcttctgtagcctctggaagctgaaatttttcacttttgggccatgcaaaccatttaaattccctcctgcttgtgaagtcatcttgcctagaggtctgtgggatcatattttaatgcattgtttattttctcaatacttttgggaagatcgttttaaagaccacaatttcctcttattttataaccatatagcagtgaaaatagtgatgtaacttgaatgttctcattataatttaacttattcattcactatacatgtgcccccagaatatattgacataaaaagagcatacccagtatgacttttgggggtagtctatgtggctaaattaaaattagaataaaagtaattttgagggtttaaagatatttggatttttggtttattcagatggtttgtgtatttagaaacaactcatatcacaagacctttctgaattaacttaatccaaggtatgaccacacaattccagtatgatgggtaaaaagaaaaaattctgtccctattttattcttttttttaaaacaattatttattcatttctggctgtgctggatcttcgttgctgtgttcgggctttctcgagtgtctagtttgctcattgcagccgcttctgttgtttcagagcataggctctaggtgagtggacttccgtagctgtgtgtggcacttaggctcagtagttgtggcacatgggcttagctgcccccatggcatgtgggatcttccccagccaggggtcaaatctgtgtcccttgcactggcaggcaggtccttaaccactgggccaccagggaagtcccctattttattctttgtctatgtagtgccaagtgctcagactggtcatttgactaaactcaccacattgactagttgctttggcatcatgtgattgtctaggccaaagcagacacagttgcttttattgtaaaaaatgccaccactcacaggggtgaccaagcgtaccagaggagtaccagaggcagacccaatacaggattacttcttgccgaaaagaaggtagctctgccggtcagggttgaggtcataggcaaacacactgtggaaaacataagtgctgtgttgctttgcctttgtgaataagcagtttggtgtttgtttagcgatacaagctcatcctgtttttcagctgcaccttggatagtattgatctgtttgggagaatgtctgccccgaatcggcacagatcagtcatcaagattcttgttggcctggcgtaattttctagccaattgtagaaaatgagacacaggtcaatatggtctcatctgggcctcctgtgagcatcagcaaaagagtcatccaatttctggggtatgaaacggtatcacacctgtttggtgacatcacagaaaaacagctatttcttttactgttttatctcctataaatgttacattttgggtttgtagatgtctaaatgtcaaggggacattttaaaataaaagtgccttctttcatttgtgttgtatgcttccaagtttgacttcttatttttttccctttctgctctgccaaaaaagtaaatgtaaattatgagaaatacaataggaccactttgtaactga

SEQ ID NO: 47224 - DNA, 941 bp, Bovine  19866881078624
  misc_feature (1)..(1): n is a, c, g, or t
ntgggaggttcagccacacagggcctgtttcacagcagccagtgggcaggagccacagtggtctgccctgcacagcaggtgtgggctcttcactcaccgtggtgtctacacctggcccaagctctctgcctggcccatggagacacagggtttattatttgtcctgaatagtgaaaatggaagggacaggaggagacatatgttcaaggtataatactgctaatgaggctggctaacaatgacatatcatttgctatttacccagtactgttctaagtgtttcatagacatagactcattttgtcttcacaacagccttaagttaggaggtctgatcatcctcattttatagatgaggcaggtgagacccgggtacctgagagacaaaaaatgaacttggccccttttttctcctggttgttctctggaaggacagcaccccttttctctggtttggtgggtcacctgatgggctcctccctacactgacagtcccagtgtccctgtcctcgagacgcctgccaccgggcacagcacgtctgccaccctctccttccccctgtgggctccagtgcactttctctcaaaggcgttgttaacttgttagtttcaagagttgatgattcctagtgtcttagaagggaaatgattcctgagcttcacaaatggcaaggtggaaggttaacattttctatgtattttgtcattgttctcattttttttaagacctgtggtcccctgtgggcacagcagtgtggaagtcagtattacacaactggcgtttgctctgatgtcagtcctgattttcagttgcggaccagctttgcgcctgcagttcagagtaagttatgaatgtgccaagggtctgagcaatgccttactttaaaagaggggaaaaattgtatcagcaagtgccattctctttactctgtcgcatttca

SEQ ID NO: 47225 - DNA, 1503 bp, Bovine  19866881082431
  misc_feature (1)..(1): n is a, c, g, or t
ncgcctgggtgcccagaccccgggagaagcgaggggtgcgaaggcggagccactgggctaacgacaccccctcaaggtccagccctcgtccgcgttcctaccaccttagggagttggcgccgggagcgggatcaccctctcaatgaaaggcagatgtccctttaaggtttgcttcgcagctcgtggactttagcctaaacaaggacccgcgaagctggctttatttgtccatgtctcagacagagcctgggaggctgccagtgggatttcagagcacgaagagggggggcgatgtggcaattctgcgaggcgagtagcgtgaaccgaacttagaggcaccggtggaaaacacaggaaatcgccccgcggctccccgggcgccggggccgaccggccagcgactgagacccccggcggcgagcaacgcggctcctgcgcgcggttccgccgagtcctcgcctccgatcccgcgcgtcccccgggcgctgcgcccactccagtcatggacccccggcgccgcgccagcccaggggtcgctgtcgcctactgctggctcctctccggtgagtgaccctgcttttctccgagcatctcctgagcgcgggactccgggagggaggcgcgcagagcttcggcccggagtggagaagggagcgcggatccactttcgggcgctccagatagtccgggcaggttggagctctgaaagcagttttctgcgttgggttttcggtgtgaattacttctgaagttgtttcaaaaccctccgcctcaatgatggggggagaggtgctgaaaactttacaaggtggaagtgacttttcaaattaaagttgtttttgacagtatgcatggtattttaggactttgctgatggcttctactttcctttttcgtgtctgtgtgtagagtttctactttcaggttgctcaagagtggacattattcattttcttgctttatgtactcaagatagtttctgctacagaggaggaaagagaagaatgcaaggcaaagttgtctcttgtgctgaaatgatgtttctgtgttagcacccaggaaaaggaacatattgaaattgaggaagtagtgaacatttactttgagaattagcagaataatttttaaaatacaaagtaaagtattgttacttgtgcataaataggtatcttttgggagagacttaagcacagtggagatgcaagcttatgctcaatttagggggtaaaaaaaggtggaatcaaagcattttctaagattttccaaatcgttaaccaatagttagatcttttctaccagttactgactgagcaggaaaagttgcaagggtgaaagaaagagaaggcagatggctgaagctttgtgtgaaaagggccaataatgcaaatagtgtcaacttgggaacagctttacagtcagtgaatagctgactgtgtaagccactgtcactatcctttacacatgtttgagctatgcgtgcatgcatgttaagtcatgtccaat

SEQ ID NO: 47226 - DNA, 1094 bp, Bovine  19866881103661
  misc_feature (1)..(1): n is a, c, g, or t
nttttttctgttagttccaaggtcagaaattctctcagaaaacttccattttcttctagtttttaagattaactctttagttcacttggaagtatacctggatatgcaaaatattcaccaattaattgtccccagactacttgttaaatacagcattctcttttactctgatttgtggtggtctttacacagtgttctagaaactaaatgagagtaaatgctaacatgaaatgagtccagatcattgctttaaataatatcagagtagtcaatgattagcagaaattattaaaaacaaaagtacttcgtagctttgaaacctgctttctgaactagctgtacctatccagaatgtttctacaggaaggggaaatgagagctagaattctgttgttatcaacaaatacaaaacacatttttcaagggcaaagaatcgctgttccttctgccctctttccccaaaacattctgtggcaatatttttgctaaatatcttaagatgcttacatatcaacacattgttcttttcatgttggctctcctctagcataatttatccaaaattcaagtttgaacatttaaacctcaagatttggtttgctaggagggatggtcggaagacactgacttcatacttgagaggaatgaggatttgaaaagtaaacactcacaagaaatcctcctgttcccacgttccttgtcagtgtcaagccaaggctcatgttggttttcatctcagtaacattggacatgctcgtggaagctttcaaaggggagaagatttttaaaagtggttaaattatcatttaaagactttttttttcaatgtacattcaggtttatatgtagcattgagtttagtactcatggtgggtaatcaagtgtatggaaatgagatgtttcattgatctggctgctcacttaaatgagtgaggctgcagaatatgatcctcaggggtggggtctacaaaggtcatgatgattccatctaatgctttattctggatcagaaaaaaacattcttaaagtgttatcaaagaatgccatatggtagaatcggcccaaagcaacagtaagtaactttagaaaaccat

SEQ ID NO: 47227 - DNA, 1873 bp, Bovine  19866881128170
  misc_feature (1)..(1): n is a, c, g, or t
nttttcccttagactttatatatgtaagactccacacatctctctattttttttactccctttaaaaagggagtacaaaaataaagctgctgtgctggtagttttctcctcagctcactttgactttctttacaatctgtcttgtttaaccccgacttcatctctcagccctttcctgccttctgaaaactcacttaaagctctagcctgagttttcttaagtcacactctgctattttcaaagtacagacttcatctgttccgtgtgccccatgtttctaagaatgtattggcatattttgcacggggattttacaaagattttaacaaaatgatcatgagtcctttgctggttttatttactatacttttattacactgtggacttttactataaaaacagcagtgatatgctttgcaagttcttgaaactttttcatggtctcttatgagctggatgattttaaaagcaagattacctcccaagtagagctccacagtgctcctcttcctgtaagtaaagctgtggtctgttctccctccagtgtaggcaaagggtcaccctactttggagccgtcattttatatacaggatgttcagatgtaggtgatgcaatccttatcacagttgtacaaaggaccgtgatacatttaaagtcatttcctggaagcttgtggtgatatgtactgtttctgtttgtctaatctgagggcctgtctcaagaatcatctgaactcattgtatgactcaaaaatcttagaacactgcaatctcttatgtgacgaggactgtctgggaattgagggtatttccagttgtaaaaatgtattttcctgttgtagtgaggaccagtgcatgcttgtctttaaaaagagaaatataatgaatatgtgtcatgggcactcagttgctcagtcgtatccaactctgtgaccctttggactatagcccgccaggctcctttctctgtggaatttttttggcaagagtactagtgtgggttgccatttcctccttcaggggatcttcccaacccagggaagagttttcttaagtcacactctgctgttttcaaagtacaaactttatctgttccacgtgacccttgtttctaagaatatataggcatattttgcacaggggatctataagattttaacaaaatgatcttgagtcatttgctgggttttatttattatacttttgcatctcctgtgtctcctgcattgcaggtagattctttaccactgagccatcagggaagccctgaacatgtttcatagccaaaaataaaaacccttccatctatatatattatagattctactttttaattaagaaaaattgtagtaaagcattatgtgtattataaatataacagggtgtatgagatacctcttgtaagggaattttagataaaccatagagaagtaacattcaattccacacaaacagcaatgactaggtaatatagtatattggcaatatcaatactggtaaattcttagccaacacataatactcatgatgactaagagttttgtcaaattattacccattttataagtgataaaggggtgagacttagaaagctttgttagtcatctaagtttacagagctaagaagtaataagcatagggtagattactacaagcagcttctccagtggctcagaggtaaagaatccacatgcagtgcaggagccacaagagacaggtgttcaatccctgagtcggggaagatcccctggaggaggacatagcaacccactccagtacttttgcctggagaatcccacagactgaggagtctggtgggctacagtccatgaagtctcaaagagttggacacgactgatgtgacttagcatg

SEQ ID NO: 47228 - DNA, 1988 bp, Bovine  19866881171498
  misc_feature (1)..(1): n is a, c, g, or t
ntatctctgttaaaatcatcttagaaagcttgattatgacatgttgcattgacatgctaacttaaaagcttgtgtatataaacagatttctctaaaaatgtaatcaatattgaacaatatgattctgtttttcctgagagatattagactttggtaccacctagtaaattaggtgttgcttataatatatgttagatcaatgcatacatgagtatttcaatgaatcttcctggtttataatcttctgaagtctttatcatagggttgttttgtctttcttgtttctttttttaaagttaaataaattaaaaaagaaaatatattgaggtatagggattacagaatatgcttcaaagtttttaagctgtaacttcagatttttaatctgtaactttatcaatttttatgtaactgtaaaaccttttataaaccttatatataaaatgaagttgaagagaatttgaggttaatttaatagtcagtatagcaagtagaaggaaagagggaaagagaaaaaaaagaaaggaaaaagaaaaaaagctaaggtttcctttccatacctaaaaggtcaaaatctcaagatacttttaagaatactgtggaaaagactgacaatcatcacattttttgaaacttcttaagttctgggcttaaagtcggaatgttgttctggcattaacaattggcatattctaatttcaactccttaatgttgttttccattgcttttacaaccaaaaaatatttttgaatacttcatgagttagtgtttttcagggtgattaagctacaccaatttgggggtgtggatgtaggaaatcagtaattggtatctcattcggtaaacatacccaaggcatcaattgtgattctcccctaattggcaaaatgaaccagttttataagggaaaaactgtgccttgctcattgagcatgaaatatgaccacagctgcttctcctttgagctaccaacaattaaactgggtcaaataagttccctttcattcttccaatcactttgtgcaagtccacacttttcagttaagttttaatagttgttccacagctttacataaggttaaactttgcagatttttttaagatcatgactagacttgtcttccccattttttctcgttccacatctaatgatttgtatttaacctaatattttctgcctgcaatgcaggagacctgtggtcaatcccttggtgggaagatcccctggagaagggcatggcaacccactcccgtgttcttgcctggagaattccatggacagaggagcctgatgggttacagtccaaagagtcagacatgactgagcaactaacacacagacacttgatatttcccacatgatttaatcaggagttcttgccgttcaagggctactgaaagggagagctttgggactgggttgatggtgatattaataactggagtatgatgtgcacacgaagacaagcgccagcttggatgactgaaggttctagggagtggacgtaggcagctctgaagtcctcaaagaaatgctttgataactgcagagttaaaaactggcagttcatgagcctgctagttcctgtgtgtttgtttagcatgtagagtgtttcaagggtgtttttttgttttaattataaattttcacagaaagtttttgctttgattctccttgagaatttgagaggttcagccacacagggcctgtttcacagcagccagtgggcaggagccacagtggtatgccctgcacagcaggtgtgggctcttcactcaccgtgatgtctacacctggcccaagctctctgccaagctgcctgcctggcccatggggacacagggtttattatttgtcctgaatagtgaaaatggaagggacaggaggagacatatgttcaaggcataatactgctaatgaggctggctaacaatgacatatcatttgctatttacccagtactgttctaagtgtttcatagacata

SEQ ID NO: 47229 - DNA, 1468 bp, Bovine  19866881248432
  misc_feature (1)..(1): n is a, c, g, or t
ntgagttgcaaacggcaaaagcagaaactgtatctcaagtcatcatccctgaaaaattattcagtaactacagatttcaaagggccctcagctgctaaaataagtaactgaaaacagctgcagccgaagagattgctagcaccacattacctaaatgttttccttcctacctataatgctactttctcatcctaaatgctttttgttaatagagccttttcatcattccattctcccaccatggccaatgttttcagttattttgagatgaaataaatttaatattgaagtgggacttcacatttactaaatcttagctatgtattttttgtgatggtaaattggattcttagacattctgatgtttaaattatatcatgaagttaaaaaatacggagaattagcaagaataaagctaaagcggttcctaaacctatcatccagataatttgtcttaatatctttttaaaaagaaagatgttaaatgtgcatggatagaaaactcaaacatcatggaaaaatgcacgatgaagagaaatcatccctccgatctcctctggtcattttgtaatgactaattcggctgtttcagaatattttccagatacaaggtctatctatctactaggatatatgccacacacacacacacatacacacacagtttacttactttttggaaaaaaaaaaagttctacccaatcccaattattgagtatatcccttaggaaccattttgatagtatataagtgtgcaattatattttgcaaatatgatgggtggaaatagatgacagtggagtttatttctaaaacaggatctggcccactatagctaactgctaatgtaaatatattgatcaatatttaagtaactgatggaacccttaaggaacaaatgaaaaaaatgttggatctctttaaaatgcagaaacagagcatattaatcaatttgaaaactggccatacataggggctcacacaaagatctgaaaggcacatacagccaacctttctattttattttttaaattaatttttattggagtcaggctttctgttttaaatcccagtaagttttcccattttccatgtaaggctgacaaatcattatttcctctcatagacataaccttgacaaatactacatttatttaagtccctttgacatattttccttttaagaatttgggggaaaattctaaggcataaaagagaaaaaggcaagattttcagtaaagaaacgaaaggattctatcttgaaaatatccagtcctattttcttttaggaaatagaatcaatgtattataattaggataaactgtctgatggcaataaatattgcttctcagactcctgcccctgctatctgccctctaccccacaaggaagctgccctggttggaattcagcctcagattcccagaaatgagtgaagagagggaatggtattcagttacatttcag

SEQ ID NO: 47230 - DNA, 1664 bp, Bovine  19866881269273
  misc_feature (1)..(1): n is a, c, g, or t
nttttcactcttccctcatgtagttgggtcagtaatgttccacccttaattcgtgtccactcagaacctcagaatgtgacctgatttggaaatagcgcctctgcagatgtcattagttaagggtctcaagatgaaatcattctggatttagggtgttcaatgactagtgccttgacaagagaaaggagaaggcaatttggacagggaaaaaaggctacataaagatggatagaggttagagataagctgccatgagccaagacacgctggaagccaccagaagcttgaaaaggagaggaagggttctccccttgaggtttcagagagatcacagccctgctgataccatgattttggatttctagcctccagaactgtgagagaatatatcttcactgtttgaagccactgagtgtgtgccactggttataacagctttaggaaactgatacatttctagaaggacctgcacggggcaaagacatagcactgagctgttcattgctagagaagctcgatgcttagaacagtgtctgacacacactaggtgctccagaaagatctgttaagtgggacttcccaggaagtccaggggttgagagtctgcagaatctacccgccaatgcaggggacgtgggtttgattcctggtccgggaagatcccacatgctgtggagcaactaagcccaggagcccaaactagctgagcctgcgctctagagcctgcaagccgcaactactgagtccctgggcctagagcccgcgctcagcaagagaaatcactgcaatgagaagtccacgcagcacagctagagagtagcccctgctcaccacaactagagaaaagcccatgaagcaatgaagactcagcacaaccaaaaataaataaatttttgaaaagagatgtttgctgttcaattttaagctactgtcttaagataactgcctcctgtcttacttattcctactatctgaagatgttgggagagatgtcacctaaatagaatagaataaaaaaagtcaatagtctctactctagagatgctgccagaaattatggtttcaggctggattttgaacatggacaatccaggattagagactgaacctgattagagactgaacctcactatgaaagagaagaaagagatacaggaaaaataaaatcaatatttttgctgcccaatattttacacatctcagttcatttaagactccatttttactggtaaggcaatggaatttcagaaattaagcatagttttttggaagtcattgagctgtggtacaaattagagactagcaatagaagtcagaggctgaaaagtgttctgttttcagtatggcagattacaatccttatgtacaaaactacctgaaaataaatataaatgacgaatgaaaacaggagaacaacaacctcaaaattctacagttaagatcaggcagatattggaaggacgttagaatatgaaagagacggacagtacagcctgagtcttctatttgtgtgattttactctgacaacaggctgctgtcattgcaagttacagaatggctaaaacttacttagaaaaccctctttcttgtctgaagaaccagaggacagagccaaagcaacctaagatatggaaaaaaagaaagtgttggggggggggggagg

SEQ ID NO: 47231 - DNA, 838 bp, Bovine  19866881300568
  misc_feature (1)..(1): n is a, c, g, or t
nctgggtcaatgctttatctagttcctccaccaaggtaacctcatttacgaaactccttaatcctaagtgcaagttgattcccgctggtcctccagcctgagcagacaacatccgaaggagtggccttggttgcacaagggcatcctcctccacaagtggactgtgggggaagggcagggtgtattgaacttctgttttaccctctctctgctttctgttggtcagagaagttggccacaacaaacttgtgttgaactgaatatgacagaacctatttaacatgaagagagaggacctttcctcactacacagaattcagaaattggctgacagcaaaaatgagaataaaaatcagagatgttgattgaattgcatttgatgacattattagggatgggaccatcaattgatggaaataatagaggaagaaggactgctcagacatcccaggagctacctagctctccaataaggcatttgctttatgtttaagtatcatttccacagactataaaagggaacatcattctctttaatcaatttctagtcaagacagccatgtgggcttagcttgaccatacctttcaaagatgtgattaaatatgaataattagtctctcttctttcctttcctagacatcatggcattaatattggcatttagtttccttaaattgcattctaaagtccacacccgccacagctccctctccagatatcatttctggagcctagaatttacaagccccgccccatctccttttctatacacatattttctttttaactttagatttttaacaagtttaaagtcatgattattttcttagtggtttt

SEQ ID NO: 47232 - DNA, 1128 bp, Bovine  19866881328953
  misc_feature (1)..(1): n is a, c, g, or t
ncctagcttattcttcatatattatatgaaagccaaaaaaaaaaaaaaagcctcaacagctttgacctattgtacatataagaaaaataaagctcatagaatttaattgtcttgttatcataccttgaatattcagtgtcagggatgagtcatacaaacaatatacagactattttttttttcatgttctccttcttttggtgtgtagagtcatttttttcagttctgatgcatcctggaggcagcctctaggaactaatgatgtctatttttaatactgtggtacaagattatcaatccagttaagcaacacgggcctctggcagtcactggcctcttaagttcccactttacctgtggtgctgaggtatttgggaactggacgatctctatgatgaacataaacatcaaaaaataaagagaagtaaaagaagtcattttaaccaaggccggaaaggttgtcacaaacccaactaccttcttcctgagtttccttttactttaatagagaggcatgcaatcaacaagaggctgaattttggagtatgagtcctggtttatataatttatttcctaacctattttataatattagaggagtcgggaaatatacaaaaaaatgtgaccaatttagacaatacagcaaaacatgccatttggtctcatttatcataataggaattttaaaggatactcatgagccacttagaacctatgagttcatagagaagaacaagtggttttgcataagattcacccttaaataattcagtgcctgtggcatcatgaaaaacaaacacagggggaaaaaaactctaagagtcataacaattaacgtctcagaaaaacaatttcacccctagttaaagggctgagtcaagaggaccacctttattctaagttccaatccctctgcaatccctatgcacatttctcccatggctctgtggtggggaatggaacccctttggctacctccatcctcctgtgtaacagtctccagctacagtgcattaaccaactcttggcactctgttctgcagaagagagaagctgcccacagctgattctgaacactgaacaagaacactgaacctagaaaaagagtaaaaggagaggagtggattt

SEQ ID NO: 47233 - DNA, 1386 bp, Bovine  19866881354431
  misc_feature (1)..(1): n is a, c, g, or t
ntcagggatatgaagaaaggaacatagatacttcttttaaggaattatggcagtggaaggaaggcacaaccaagatggaaaagggcaacaagtaggtttaaaggaagatgagcatactgttctcatttataatttttaaacaatatgagaatgtttagcacttttttggtaaaggtatctgatcaaatcagagtgaagatgaaggtcagcagtgctaagaaaatagagacactgagctaagaattaggagagtgttatatagttatgaaattgccccagatagtagtaagcagaatgagtccttcaattcagactcctatgtcattaacacttaagattctatggctattcttaatttggctgaagtatcccactagctcaagttgtttgtggtcttaataaatagtaacaaataattgcattaataaatagtaacaaataattgcagattgctccgtgtccaacttaacccaaggtcttttaatttcattttatttacttcatataatatattaaaaaatcttataaaagtcacagaaatcaaagatttaaaaattttattcccttatgccttctcaaagtgttcaagtaaaagaatgttcagacttgtctactctactagttctgaggagaagggcaggaagagaaggggacgacagagaatgagatggctggatggcatcactgactcgatggacatgagtttgagtgaactccaggagttggtgatggacagggaggcctggagcgctgtgattcatggggtcgcaaagagtcagatgcgactgagcgactgaactgaactgaccacatatttaggtttcccacatggtgcagtagtaaagaatccacctgccaatgcaggaaatgcaagagatgtgggttcaatccctgtgctgggaagacacactggaggaggaaatggcaacccactccagtattcttgcctggagaatcccatggacagaggagcctggtaggctacagtccacagggttgcaaagagttggacacgactgagcaactgagcatgcatgcaccatatatttttctttgtcttttcttacttatgagcactttttattttatattttatcaacatattgacctattagcatcataacttaccttgcatactgaattgctttgaaggtatttgtaaggtctccaccatattggaatgtctgcgatgttgctttaatcatttcatctttggatttaaaagtattcaggttaaacacaactcttggattattggcatattgaattaaccccatctttaagagaaaagaagtttattacaggcttgtcattgttataaatcattcctatgtaaccaatataataaaaatcagaagtgcatttatatatgggctgatagcttaa

SEQ ID NO: 47234 - DNA, 1484 bp, Bovine  19866881536472
  misc_feature (1)..(1): n is a, c, g, or t
nattggtccttgatgagctttgattcttaattggtctccactaagatgaggaatgggcttccctggtggctcagatggtaaagaatctgtctgcagtacagtgagacctgggtccagtccctgggttgggaaggtcctctggaggaggaaatggtaaccccactccagtattctctccttgagaattccatggacagaggagcctggcagactacggtacatggggttgcaaagagtcagacaccactgaacgactaacactttcacttttcaagatgggaaatagtccgttttactgctgttttaacattagattgtagtccacagagtctagtaaaacccaactgagcttctcttaaaaccggttttctcactggaggtttcaagtgatttctgtagacttaaacctgggtcccctatgttctttgaggagataaacctttttgagttgatggctcttgttaaactgtgtatttcaagcaggtgcctctcattctaaccaatagtggctaaagaatgattttgaaatatccatttttaactcttccttcctggctgccttacttaccagatggcttaaaggtattgctgtgtcattgttgtgccttcactcagcgagactctgaccttagattcacctcaaagcactcaagcgagaggaagtagttaagcagcagtgagagcaaacaaataggcccacatgccttatatgtttactataatcacctgcttaaatggaggcactgttaatgcaactaggaattctttctgcattaatgaaaaaggtatttctgatgatatctaatagcaaaagtaattctggcaagaactacggcggctgccttaggcagacaaactgagtgtctagggtaaaggagggaggaagacggaaacatacttcactgaacacacttttggactttgtgcactgtttgtgtattatctattcaaaactagaaaatacaaaagaggtagctataaataaagtcaaagagaagggaaaggacaaagtaattctgcctaattacttttgactaaaaaggaagcatgagcatactggcttttaggagaactttatttgttgttgttattgtggtttggcttctgacgtgtttgcagcttttcagaacttaaggtaaacctctgggtggatacttggatgaacttatttgcagataacaatttaaggcaagagcttggcttttgctcacatgcaacatcaagacatatgccattttgaatctcaggtttcagtggacatttatcatagaatcaaagagtatatctttcctcccctttttaccaataagaaagctagtgctgaggggccacaccaagaaacattcaaggttacagaggccctggaagagctgtgtgtgtgccatgttgggactctttcccctatatagctgtgtgtggtgatttactccagtaggagctatttggtgaatgcaggcatacttaaaggcagaatttgtcagtgt

SEQ ID NO: 47235 - DNA, 1163 bp, Bovine  19866881685710
  misc_feature (1)..(1): n is a, c, g, or t
ncgctcagtcgtgtccgactctgcgaccccatgaatcgcagcagccaggcctccctgtcctcaccaactcccggagttcgctcagactcacatccatcgagttggtgatgccatccagccatctcaccctctgtcgtccccttctgataggttattataaatatcgaatatagttccttgtgccatactgtatatttctttttaacaaacaacaggatcttatgcactgttcagacagctaattttttaaaaatacagttcttcattagaggattgctaaaaagtaacaccacaaagttacatgaagagtctgagtgaattaagctaagacttcaagtctttaaaggcctctcttcaaaggaacgctttccccggcctgaactcggcaagatggatgcttgttcatccgggatgctgctgctgataattatgccatcagagagaggaaacagtgaatcaagcataaaccatgctcattgttgcctttagtagttctctctgttcacctccctgtgtggagataataaaaatgggggtgtggttgaatagatgtggaaggatttctgtgtttcacattccccgttcctgcctggagcacgtctcaaccataatctgccgggcactgctgcttggtaaacagcggaaaactacagccgcagacttcaaccagcgcccataagaagtctttgctgacatgtgatgtcaaatatttttcagttgacttagaaaagactgagattaagaatctctgtaaacattagccaatgagacctttagaactttctgaggcatcttccttcccactagaattgggcaatgctttaaaatcaccatcaatggagcagacatctagtcactgaagacttaatgagacatcccaagaagtcatccttcacgaggtggcttttaagtgaaccgatttcagtgagtagcgttggttggagttggaaatcaagctgcaattcccatctgcccataattagcctgtctctttgtatgctttctgaccttgttcccctgccagtttcaaatgctgggcgcagtgacttttgaatagaaatctgaagatgagaggtttgattgtaaagcctcacttctgactggactggaaatagctggatttattttttttctcttgataaccccaaactctaatacttgga

SEQ ID NO: 47236 - DNA, 1252 bp, Bovine  19866881704368
  misc_feature (1)..(1): n is a, c, g, or t
ngtcttaagtagagtgtttgcatgatgactgttaggtgcctcgatggggttacttgtcccacatttgttaatgtcaggagtttgccattactggagttcactgttatctagcatttcaaaggcaagtttaaaaaaaaaaaaaaaaaaacacagcagggccctgctgaaatattttccttcaatacagccaagctgcaggcataaaacacaatagtaaacatacaatggaagaaagtaaaaggcctttgtaacagacctttgtcatgccactgtgcacatttcataacatcagctattgtttttctcaactgacatcatataggtcccagttaatgaaaagagacatggacaatattgcatcaaatagatgctagacaggaaacagaaaatggatcatgtgtccaggctccctagctgaagcagtcatacatctgaatagcgaaaggactaatgtgttttagccatcctcccttccagccataaactcaagagcaacgttgaaagtattttcttttctaggttgctaacccaatcccctacccaccccaccccactgtgaaagccagtcagcaaggatcaaaaacatttccttttaaatgaatcatggcaatccaataaagatgcaacacacagattatgttcaaatcaatgacagaaccacagccagtatcagcaggcctcaaggaacaaaaattgctcacagtcagggggtgtctgtccgataacgagctgcagggctaaacacagagcacatgctatgccctgggcaaaatcccttgagcttctactgctctggcttctttaagcaatgctgggctgttggagtattgtcctcttttgtacctccccagacaggtcatgatggcttggcttagctttgcaaatggggccttcagtgatagttacatccgggaaacaggcaaacaactgtaatgctaatatctagaaataaaagtccacgtaaatagggaatgggatggatttaagagagtcaatgactatgcatgattattcaaaaacccaaaaaatgaatacagagaagattcttaagacttcagtgaacttgccaacaactgcctgccaacatcttttaaattgctgctcattgtaaatatttgagagggaaggagatatttttctgtttaaaaagcaaagggaataaacacataaagctatgtgtctatcacgctctttccttttttcaaaatacttaataccattagtcgacttgcagacctctcagtttccttat

SEQ ID NO: 47237 - DNA, 730 bp, Bovine  19866881943273
  misc_feature (1)..(1): n is a, c, g, or t
ntaagataaactacatagaagggagatatagaggaaggatcggagaaggcaatggcaccccactccagtactcttgcctggaaaatcccatggatggaggagccaggtgggctgcagtccatgggatcgctaagagttggacacaactgagcgacttccctttcacttttcactttcatgcattggagaaggaaatggcaacccactccagtgttcttgcctggagaatcccagggacggggaagcctggtgggctgccatctatggggtcacacagagtcggacacgactgaagtgacttagcagtagcatagaggaaggataaaatgctttgttagtacatttttttaatgcatttcacatgtgctagggacaagctgcaaaatttgactcagtgcttcctagaaataaaagcaaagactgaaagaaaaccagtgaaaagattcttggtatctataaggactttttttttttttttttaaaaagcccttagatgattttttttattattattaagacctgagaagaacttcttccatgagttttcattaaaagtataatgaactcctttctcagcagtgtctcttaagaagttcaaatacgtatccttagcatgcatgcttcttctggtgagttaacagcttatgcccaatgtaattgattagaaacatttttagaagctaaaattttaccacatggtaaaaatttttcaccattctgatggcttaaa

SEQ ID NO: 47238 - DNA, 1138 bp, Bovine  19866880123112
  misc_feature (1)..(1): n is a, c, g, or t
ngtgtacacgtgttccccatcctgaacctccatccccataccatccctctgggtcatcccagtgcaccagccccaagcatcctgtatcctgcatcgaacctggactggcgattcgtttcttatatgatattatacatgtttcaatgccattctccctaatcatcccaccctcgccctctcccacagagtccaaaagactgttctatacatctgtgtctcttttgctgtctcgcaacaccaaggaaaccagaattgaaagagacacgtgtaccccaatgatcatctcattcttaagcttactaagaaataaatgaatgacctattgtggaagtgttggagatatggttagttgctgaatgtgtaaaaggtgatcaatacatcaaagaacaaatacacaaaaaaggaagaagcatacaccatgtgtacagaattatgttgacagggaagaatttgaattattatagaataaagtctgcgggaatgacattaaaataaaccatttcacaaagactttcaataagactgatgagaagctaatttccagagacagagaagaggaatgcagatattttataagagaaaacattgagatgaagtcaacatacacactttaggagcctgtcatgacagttctccaggtagagcaagtaaagacactgtaactgcaacttagatcaaacctctaagagaaacaccaaaattacagacaaaccagaatcaggcaatctgaagagtggaggaaaaaaatctatcacaataggaaaaaatcatggggaaataaaatcaagcagtagataagaaaacatttcatagtatcagatacaatggacatttattacatattctaggagtcaaatatcagctattcctttgagaaattacccctagtatcgctgactatgagtcccactccactgactaaaatgtacatagattctattgagctgagttaaccagagcctactgaggagactgatcaatattatactaggagaagagaatgtgtttctttttttattatcaggctgtagtgatttgaacaaggtcttcctgcagaaggttccctcactggaggagaacatagcctcagtgagagaagccatcaccacacagagaaagaagggaaaggagagaatcc

SEQ ID NO: 47239 - DNA, 2012 bp, Bovine  19866880450300
  misc_feature (1)..(1): n is a, c, g, or t
ntggatgtttctaaacatcctccaatgtacagaacagtccctcttctgccccacaagaaagaatgtgcatgttcaacacttttgcaacccctggactatagccccccaggctcctctatccatggagttctccaggcaagaataatagagtgggttgccgtttccttctccaggggatcttcccagcccaggaattaaaccggcatctcctacagtggcaggcagattctttaccactgaacaacctgggaagcctaagacaaagaataatcctgtccaaaataggattagtgctgaggttgacagatcctgtcctggaacactcctgagcgtcttgtctactcacaaagccaaatgtagagaaatgactgtaccccaacttctcacatccaggaaccaggaaaactaagttcttatgtttgattttttacttaacttcaactcaggacaaatctttgcttcagtgtcttctgtcaaatgtgatgaaagtatccgttgtactgtctttgtaaggtggtgataagaatgaaataatagaaatgaatgttctttgaaaaaaattacaaaaagccacaaaactcattatttctgctatgttgagagagttctagacacaaaagtatcctggctgactatggagtggaattactccctgctttatccctttgcttaactgtaacatcaagcacctcagtttagaaatatgtcacttgtttaaatataggataggttatctagatgagagaatttgcttgacgttattgtctttggtgttaatcttttcttatgctcgattagttcccttgtcatcactttttttttttatggcccaggttgcatagaatattatctacatctgtgaagatattaaagttggactggtttgtaattagtagtatcaccaaaacacctaaattagtggcatcacctaaaatttatgatcagagtctgaactaaatctatatcattttgaacatgacataaatgaaataaacacagtgaccttgggcatgcacaatcattaacagatacaaatgcattaaatgggatgaaatgttacagaaaacctgtgtacctgtgaaaatgcttccatagttagatccttaccaaagcaatgctaaaggtaacatgaaagggacctaatgtaatcttattatcaatagttggccatttaccaaaacagtttggtaccttcttagagtgaatctcttgtcagcaatccagttgcaaagcttcattttaagagttaagagggataaactggaaaatgctgttaggattctgcattaaaatataaaatattacaggctgagaagagcagaatggataaaaggcttttagtttgctccctttgaagcactgtttaaaaggggcatgcctgtttagatcgagtcagagtgatataaggtatgttgtagaaggaacatgttagtcctgaggaaagagggagcacaagcgaaagaatacatcccaaatcctttttgatgattccatcatcacacagaagtgacacagctggcttctctgtgtttatctggaattctggaaaggaatctcaagtatgtatcataactcttccttcttcaagattgtgatactagctaccgttatgcttaaatccatgatttcctttaaggtcttagtactctatcatttgatcatttttgtactaagttctctaaatcatgtgttgctactctcaggaggtgcttgtggtaaagaacccgcctgccaatgcaggttagatgttgggcgtgccagtttgatctgtgggtctggaagatccccagagaagggaatggcagtccactccagtattcttgcctggagaatcccatggacagaggagcctggtgggctacacagttcataggtttgcaccaagtctaacatgactgaatcgactttgcattagcactctcacatttgctgagttctgaggtggccctcgtggtaaagaatccaggagactcaagttcgatccctgggttgggaagatcccctagagaaga

SEQ ID NO: 47240 - DNA, 1262 bp, Bovine  19866880609807
  misc_feature (1)..(1): n is a, c, g, or t
ncccctccgcctcccaaaggtgcatataaaacacggactgtctgccaaggtcaggagtacaagctagatctctgtgtataaacatgctaacataaaaatggaggattaaaagctcattaagatgttgtgatgaggataaagagaaaagactggagcagaaggaaaagcaatgacccacacgtgtttcttttgctaatgccctttatttaatcaaagctcagaattcagaggttatccaagctgctcaggagcacactgcatagtgtaaaatgcctgcacaaaatcaccatttccctgcagcatgaatgctctgctctgccccaggaagggtcccttctccctgtgtgcctgagcctcctttctttgagtctccaggaggcagaagctctgtttgcttctttccagctctgccctttttcggggtgctggtacctgtgttatttaaggacccagggcataggaaatacaggaatcatttccttaacaggctattatacttcaaaacaactacttcatctgactgaattaaagagcagtacgtttagggagggcttccccggtggctcagcggtaaagagtctatctgcctgcaacgcagatgagggtccaatccctggatggggaagatcccctggagaaaggcttgcaacccgcttcaggattcctgcctagagacctccatggacagaggagcctggcaggctacagtccatagggccacaaaaagtcggatgtgactgaagcagtttagcacacatgcatgcacgcatgcacatttagggaatgagataatactgctctgtttgctttggtaagactttcacaggtgaacgaggggaacttggctccttccagaattcactgttcattcccataatactgcccctcactctcctccactccacacctatgacacactgtcctttccaacagtggacccagaggagccgaaaggccaccaggtaacagcaggaaaaccaaacactaaggcttcttggctcgttgtccagtgctctttttccatatccctgaaattctgaccactcacccatcactctttaactctgcccctagccccccaacaccaagtcccgattgacgagcagatgtaaacatgaatctgggggagctggcttaacactcattgctgaattctaatgaaaaaactcagtgatgtccgtttacagaatcttgcaagatgatctctcagagtgcctggaatatgaaaggcagcagcagagaaaaatgtcagagctaatttg

SEQ ID NO: 47241 - DNA, 1723 bp, Bovine  19866880799168
  misc_feature (1)..(1): n is a, c, g, or t
naataataggaaaagaaaattggcctttggggttaaactgaaagcagttcaaaccccagctctattagcagttggtaaatgaataaaacctctctgatgctcagtttttatcatctgcaaaagagacatagtaattcttacctcacaggttacttttattggttaaatgagacactgtatgaaaagtaccaatagttatatttaattgttaggagtactccctttagacacagactattatgtccaaattcttattctagactacaaaataataacctgttattaggctgagaaactatagataaaaaggcaaacaaaccaataagcaacaagaatttaccatatagtacagggaactattttcggtatcttgtaataatctgtaatggaaaagaatgtgaagctgtacatttgaaaataaccacaatattgtactttgactagttaaaaaatttttaaagggcaaacaaacaaatcatcaacaaaataactttctaacttggattcacatggtaacttttgtcttgggtggtggatcacttacaatagtcggtaagttattccaccatttctcgtgtatgggttgttctctgctggcctctatttatagtgtgggtactgaataatttccccatttttgctcatttcctccttttaaatacgttgtaaaccgtaaagcagtgttcatggtgggttccagcatactctaggtcaagcttgtacgcatactgtgcgtgcatgaatgtgtgctaggctgcttctgttgtgtccaagtctttgtgaccctgtggactgtagcctgccaggctgtgttgtccatggggtttttcaggcaagaaaactggactgtgtcaccatgccctcctccaggggatctgcccgacccagggattggacccatgtctcataaatctcctgcattggcagacgggttctttaccactagcaccgcctgggaggccccatattgaagagtaataaatgataatgttcagtgaatggagtcatgcaagtctctaatcttctattacgttattcaagaaagatttttcagcaactctcatagctagctctcgcttactttcttcacatcttctgaaaagggtcagatttttccattatctagaatattgaatttgctaactttgaggtgtttatgaactctactgaagagaaactcagtgaccttgatttagtcttggtttcaactatgaaactttcttcttcagtaaataactggctttatatcccttttctttctctgtcttgatgtatatgtataaagagatgtgtatctatccatgaattttattctcttgccctgacaccccacctaccacacaaaagatcaggatatataccatatatctattacctctttggtgacttttgtacattatatttgaaaaaaatattattttctcccttttctttttttggaaccttgcctctagtttaacaatatacccatcgatctgccaatctgtattcagagtttagtcagatttaggttggtaattatatatgaattagactacatgcccccaaacagcaactggtttactgacttcaaatgctactgcagacacccgagggtattcattaaacgttaattaataatggtatgctgagttgaattgacttgtggattctggctgactgctctttaatttaaaattatgagatgcatagcatcaatctatcagcaggcaggatcaatttt

SEQ ID NO: 47242 - DNA, 2313 bp, Bovine  19866880819968
  misc_feature (1)..(1): n is a, c, g, or t
nctgaagaagggaatggcaacccactccaggattcttgcctgggaaatcacatggacagaggagtctggaggctacggcccatggggtcacaaaagaagtcggacatgatttagaaactaaaaaaacaacaaaaaatcaagagtactataaagaaggaaactcaagatattgtgccaactagcatctaaataagccttcagatgcctacaatttttacatttaaaagatctttagaatatttcactcaaccacttaaggaagcctttgtatttgtttacttaatacaaatgcttcctacaaatgcttctagatgctaccaaactctttaacttcaatttaagtgttttcctattctttgtttctagaaatagacggggggtgggggtggggggtggggaaacaggccagataaacaactgtaaaccccaagagaatcagacaacaaaccaataagagatttaagaaattctcttctgcctttctggtcaatttctattcacctttcgtggtaacatttgattctttaggacacagaaaaacaccaatattaacttactggtatagaattcaggaatataatttatgggtcttaggagaagagcataaaatgaatgacaacgttaaacagaacctacatatttgataaattaaattgagctttttgtgtaacttgtagtttctgaaagcttacaagattagacaaagtaaagaaagaccttgtgatgatctgattagcaagctgtaatcgatcaagcctgtaggttatttccttttgaccaccaaagaaaaagttaaaccagaagagtttagaaatggagttgccctgctccttccctggtactttagaaagattcactccccaattactcaattatagttaactgtactactttccttccttgctgattatgaaccagtcacaatctgtattttatacttctgacattacctattcattacatttaatttcaggaagatgcccctacacatcaattttgctacaaaacgtatttacagcaaaatccatgcagtgttcctaatgacttttctagctttgtaacatgtatcagtcatccttgtaatattcctgatcaaatgtctggatttaagtatgttagtaagaaaatggaagccacatgcatcaaggtattgacttttctatttctgaagtcttaataaaggtggtgtaagattaattgaaactctcaaaataccaaatggactagaaattgaaactctaaaaataacagagaaaactttgcctaacaatagctttttaaagaatccccaggtacagattctcttttaaattaattcagccaagtcccctccccttgctgtgtttctcaccatttcattccttgccatcctggacatctgagttataaaaccagtagttgtgaatgaatgatctggctgttctgttatatttacatggaagatgcattttaaagctactttaacacattatttgaaaagaaaagttgacattttagaaacaaaaaaaatgagaaatattgagcaacactaaagtgtgagagttaattcaatcactagcatctacattttccctgctttgtggctggggggtaggtctaaggtatttactgattggcttctttctctagagaaaataatgcacataaggagagaatgagagggggagtcacaactaagttaattataaaattagattttaggtactctactacaaagttaaaagcctttaaaatcttaggctaagcagatttcattttttccacacaacccaccaaggttgactgagaagtaataaggccaatttcccctagcaacaagtcaggctgccctcgtagctgcttgtgtagctgccaagcattctgaactttaaggaaaaaggaagctattttgaagaaataacaagtgaaaagaaaccaattatttttcaggatggcctcaaaagaatatcttctaagctatcagacatggtgcttagagaactgagtggtactagggatccaaaacaagggaaaaatgtaaataggaaagatccctaatataatctctctttttataaagtccttctatcatgaggatttccttttcataaaaatcagaatgagtaaggggataaaagaactatagcatataacgtattaggaaacatattaataaccttgctgtactttagctataaaaatgtttatcaaaatgagacagaattctctaacatgtctaatatgtaatatattatatctgacatatcatttcaagtaatagaattggcagggagacaattaacatggccactctatacatctgaaatactcgaa

SEQ ID NO: 47243 - DNA, 679 bp, Bovine  19866880917607
  misc_feature (1)..(1): n is a, c, g, or t
naatgacttccctttacttttactttcatgcattggagaaggaaatggcaacccactccagtgttcttgcctggagaatcccagggacgggggagcctggtgggctgccatctatggggttgcacagagtcggacacgactgaagtgacttagcagcagcagcagcagcagcaggataccatgtttatgcctccagattttaaagtaagtacagtaggagccaatcaaaattttccatgtggagaatcattgtctgatttaatttttcagagctcactttggctactttgtggagaaggaaatgtgtgagcatgtgcctatgtgttcatgtttgtggttaaaaatggaagcaatgagactagattctgggctattagaatcatctaatcaaagacagtggtgacttgggtcatagagtggagatggagatggaatcaactagatagatttgaaatatcttttggacatataactttctgaatttacagatacatttgatgttcagggtgaagaggaatcaggaatctaaaatgatcacctttttttcccctctaactgggcataacatggtatcctttactaagatcaggtttggggcaagatcaggtttcagaaggagatcatgttcactcttagatatctagcaccaagcctattgcaaaatttattattcatcaaa

SEQ ID NO: 47244 - DNA, 1150 bp, Bovine  19866881176307
  misc_feature (1)..(1): n is a, c, g, or t
ngggcaaaaggtactgggataaaggaaccttatctctatggccctcaaacaagcaaagaaatacactgcttgctctgggagtgaaactttaagaagaggaatctggtacccacttctaaacacattctagatatgagccacttctacacagaaattctataacaacattattggggaaacttcaggaggtgagaattcccggcatgaggttgcagaaggtgcttgtgcttagtcactcagctgtgtccaactctttgtgaccccttggacagtagcctgccaggcttctctgtccatgggatttcccagcaagaatactggagtgggttgccatttccttctccaggggactcttcccaacccagggatcgaacctacatctcctgcttggcaggtggctcccctgagtcacctgggaagcccaatgttaacaaaataaattacagaaaatattcttgttatatttctaccacttcattaatacagataaatttggtttaaatatcatatcaaatattttatttatttagctacacctgatatcaagaggcacatgcttccttaggagtgggagctcttttgttccagcatttttgtttcaataaggtaattattcttatgaatttagtcatagaagccattaatgttacattgaagtatagtctactatggaattaaggtaatcgatcactatagactgtgagatctatatacaaccattggaagagagaaatggcctataaatctttcagacaggttgtgggaaccagtattaaatttccatattatcaggcaggcaggctagaaacatcaaaatacaaagaaataagataagaacgatctagcactcagcttttgaaagttattttgttgatcatttacctcccataagtctgtcaagcaaaatttccatataatactcttcattcatacacagcaccatttgtgtttagaatcaatgctgacttcaaagattgcatagacagaagtcagactggatacattttaaggaattaggatttagaaatatgaattatgtcatcaagcattgatgcagaacataccacatcaatagttgcaaaaaataaaaaacaaaaaagaaaaaaatctcccctgcaaagttttctcaggaaaacaaatacacaaaatg

SEQ ID NO: 47245 - DNA, 1327 bp, Bovine  19866881225576
  misc_feature (1)..(1): n is a, c, g, or t
nttagcctccacttgagattgctataagtataaaatacacagtgaaaaataaaaataaaaaaataaaaaaaataaaataaaatacacagtggactttctaagacttagtaaaaagaaatactaaaatatattttaaaaaatattgtttgtgtgttgaaatgatacatttttggatatattgggttaaaatacattattagaattaattttacctgttcccctttacttttttaatgtagatagtagaaaattttatatgtggcttccattatatttctgtgagaccaacctgatgcagatatttatgacaatccccatagtccatagtattgggtactgagaactccagtgttccatggcatttatattaagcccatactgtaacagggactaaatctatattattgggttatgacaataaatgcttttatgactttaggaagtaatctgaccactttgtgactcagaaaacagatttgttgaccaaatggagttgctgctaagctgctaagtcacttcagtcgtgtccgactctgttcgaccccatagacggcagcccaccaggctcccccatccctgggattctccaggcaagaacactggagtgggttgccatttccttctccaatgcatgaaagtgaaaaaataaagtgaagttgctcagtcgtgtccgactcctagcgaccccatgcactgcagcccaccaggcccctccatcagtgggattttccaggcaagagtactggagtggggtgccattgccttctccgaaatggagttaatgctaagctaatattaatatataggaatcaagtcattaaaacaactagaaatatttagagtgaggcccgaataaatgcttaccaaaattttttcttattccagatttccttgccacaactttcaaagagatttatcttagtcaaaattagctaagcaaaatatattgttccaaatatattgcatattgcataaatcaaacaataaatatttatgaatcatcatatcagatttacaatgctcctggtctcagagtaaaatacaaaagcccaaaagactttgtcttcacctgtgtggatcttagaaacctgagaagctaagaagcatatttttaaaatttggtaatataaaaaatcatatatcattgttcagtctcttagtcatgtctgactctttactaccccatggactgcagcatgccaggcctccctgtctatcaccaactcctggagtttactcaaactcatatccattcagtggtgatgccatccaaccatctcatcctctgtcgtccccttcttctcctgctgtcaatctttcctagcat

SEQ ID NO: 47246 - DNA, 852 bp, Bovine  19866881233888
  misc_feature (1)..(1): n is a, c, g, or t
naatgcacctgtacaaattaggtagttagcttactgatggaagatggactagacactctgaatcattaagcatccatataagttctactttcaaagtcagagctttcatttggacaacaacatctctcattattactcaagttgctgcctggcaatactctgaccaaaaaggagcctcattagcccctctcagtatttttagaattgtttaaaaggtggtacacatctttgcaaatccttgtaagacaactcagtaaatatcatgtctgcagtcagaatgcagcctgcagaacaagctattgccttagactgttgcccagatgatgtcaaaactggactggaacttgagacttcctgttttccagtaacaggcttagatgactcattaggcttgaataaagatgctttgaactgtggtgactacagagatgttcttctctgcatgttgaaatgagaagcacttccttggctggttgcttatcttgcctgctgtaaaaaatccccagctgtccaatgatgggaaaaaaaactaagcctatatattttgaaaagaaaaaaaaaaaagatatgtgagacgaatcgaaagaattacccatggtttataaatatatgtctcattattcaataggcttgaagtactatgattggaattaacctttataaccaaaaataagggacttgagaaaaattttattcatacattggagcactaagcagccattaagatatttgtatagatgaataactaataaaaaggagaaaatgttcatatttttagttaaaaatatatgtttcatcctacttttaaaattttaaattatttttagatatattactcggtcattcataata

SEQ ID NO: 47247 - DNA, 743 bp, Bovine  19866881272308
  misc_feature (1)..(1): n is a, c, g, or t
ngagcaaaaagtgtatttctcctctaaaacctagagaagttagaatctttgggaaaaggctctgaaatctacattccaacaaatcccttaagtgagttttctgtacaccgaagttgaagtatatttactaaaatgtccatcccctactctggcccttctgtgaaaaacaaaaatgcagccatgtataactaataagcacttattcacatttctaagaacatgaaagctatctctgagagagcaaataacaaatcactaagaactcattcttttcaaatattgcattacattttcttttatttgcttcaggcaacttagaatttcactagattaactagtgccattcaggagatcagagaagaaaccttgctgttaagtgcctcacacttattccacagcttatttttattcataaccagcctattatcatttgttcaactcttcttagttcagtgttattatttacttattagatcttgctcagaatgacttctatcttagttctgttgctttagagttagaatacataccaacactgatatttgaaagaatatatcaacatatatttttggtaaataaagcatcattaagatctcaccttctaaattgaccagatttaagaaaatgtaaagataggttggagatgtaagttaagttttggtgtatctattagacttttaagcctatagttttataatctagcttatatttgaatttaaaattaataaaatgctctattttag

SEQ ID NO: 47248 - DNA, 1380 bp, Bovine  19866881351170
  misc_feature (1)..(1): n is a, c, g, or t
nagaataaaacacatggataatacaatgccgctctttgatggtgaaaggaagggtcagtttgctcttactactttgtccctcaagcagaggagaattaattttggaacaaatgaagcttaagcttcaaggctcctcaactgcacagccctcatccaaggtcctgcaagggttatgtcaagctgctcacatggtcatgtgctttgtaaaattctcaaaattaagatgcgttagccacagtcttggagaaggcaatggcaccccactccggtactcttgcctggaaaaccccatagacagaggagcctggtaggctgcagtccatggggttgctaagagtcagacacggctgagcgacttcactttcacttttcactttcatgcattggagaaggaaatggcaaagcactccagtgttttttgcctggagaatcccagggacaagggagcctggtgggctgccatctatggggtcacacagagtcggacacgattgaagtgacttagcagcagcagcagccacagtctagtaaaccccctgtttccaaccatcgtacctcccttgggtctgttaacaccagaatgggcaccagcatttttggtatccagataagaagacgtactgaggatatatctagctcaggttccctggtggctcagctggtaaagaatcttcctgcaatgcaggagaccggggtttgattcctgggttgggaagatcccctggagaagggaatagctaatcactccagtattcttgagtcagacacaactgagcaactttcgtgttttttcactttagtggaatatatgcatgtggttcaaggaaaggctgaattatcttttcactctttctgtagaaagtgatattacaacatagttgtcaaaaggtaatcagagagtactctgtcaattaaggtagggcagaaggcgttttaggcattctgtaagtaacaatcctgttatttttctggatggggtgattcttgtgggtactgggctgctgtcataaatttggaatttgttgtgaattctttttcattctgagatcacagttgatttcttattcataattttgtactctttctcttaaatacaactcccacatggtctaagttttagatccctcaaacattactttatagagtaatctgaaatattcatggagacatttatatactttctttatatactttatacacatccatacactttatatactttctttggaatagacaagaaagtcaacagctttattccaactaggaattatttaagtggtatttatttaaaaaagagaatacataagaataaaagtctagtctgtctacttaataattcctccccttgtttcaacattaccatggtaagcaagtagaaat

SEQ ID NO: 47249 - DNA, 720 bp, Bovine  19866881560250
  misc_feature (1)..(1): n is a, c, g, or t
natatacatggcaaggtgaacagttcagtgctaactaggggtgggagatttctgtccattaggatatactggccattggtcccacataatcaaaagttagatgtacaggagttcatatacaaacagagatcttccgtttcagcttgctgaccaaggaaatgagtcaaagtgagccatttcagacagcgaaagaactgtccaagtgctaaaagagataaaatcttgtattttaatcacatggaaaataattagtgtaactatgtacattataagttgattgttgttcttagagaaaggagtttccattctgggttcaaaaatctctgtggacaatatgcatgttgggcattgtgagcagggtagagagtggagatttctcttcagacccaaagtggttggaatcaaagatttctcaggctatttaatctcttgctctgagctatacaagataaattctcttcagctaacctggttgatagcattcatcacagagcatgatgcttttaagatttagattatcatatgttgagaattacatagaaatagatttggaataatttagattttgcaatgactatttaaaattttgaagtccattttgcttattctgccccccacccttccctggcaagtcataaaaggatttatctaatcttacctagtctacttattctatttgtcaaggcctatttcctgatttatcagtcagctgctatcagt

SEQ ID NO: 47250 - DNA, 980 bp, Bovine  19866881684939
  misc_feature (1)..(1): n is a, c, g, or t
nttcttggggctattttccttgtattaaaatttgagaacttaattaggaagttggatcaaggctctgctttagtattttaaattcctcagacataatttaacaaacttctcattagtctaactgaattattaatacataaaagtagcaatgaaattacattctccactcattttttgaaatttctattttttagcatacctttaccaaggccaagcatttgactaagaattggtatatatatgttatgaaatgcttagaataatccttcgaggtaggattagcctcatgtatgaagaaatcaatgcttaggtataaagcatattacccagagttagattgtggtgccatgtttgcctctagttaagtccaagttcatatgctttcattcaaagatctcataaataagttaataagattatcccgtatttatgtcatgacagctataaggcatttccataaggacagggaagtctggcatgctgcagtccatgcggtcacaaagagttggacatgattgagcaactgagcaacaacaatgacattcatttcattatagcaaaacagtggggaatgtgggagttattattacaaatgaagaaactgtggctgagataagcaccttcatatagagatcagaggcaaaggagtcttgtttgttatcttatcattgtaccttgttttatactatgtaatacagtaaggtattatcttgaacataaaattatttttaccaaactcaggttaatgtgaaaaaaagtagaacatggggcattcattatagaaactttgatatggaggaccatgttgaatacagaaggagatggatgagtaacattcaatattttattctatggacttttgttctggcatactttggatgggctgggttgttaaccagaatgagtacaaattaaatcattaattaggtctcatctagaatctaaacaaaggattaggggaacaaacggaggttttagga

SEQ ID NO: 47251 - DNA, 1572 bp, Bovine  19866880166631
  misc_feature (1)..(1): n is a, c, g, or t
ntgtcttaggttggggctggcttttcgcgtggtagatatcccacagtctggtgtgctagcccaaattatttcgctcagagagtgctcagggtattcaggccagattcttaatctcagtgatgcagcccgcgctgcgcctccctgcccagcccccgcttgctaatggcgcgtgcaggcgtctgcgctgcttctctgctgggggagttaccgtaggactcgcaatcttcgagttttaattgtttatttattttttcttcctgttatgttgccctctgtgcttccaaagctcggcacagattcggcagtgagaaggtttcctggtgtttggaaacttctctctttttaagactcccttcccgggacggaactccgtccctccctcttttgtctcttttattgtcttttatattttttcctacctcctttcgaagagttggattgcttttctgggtgcctgatgtcctctgctggcattcagaagttgttttgtggaatttactcgacgtttaaatgctcttttgatgaatttgtgggggagaaagtgttctccccgtcctactcctccgccatcttggctcctctcagtatattggtttttaaattgcacctcctgtccccctccttgtgtttattcaaaataactctatccatttgttagttttctacttaaaatatttttgttgttgcagtgttaggcaacccattctaaattatttgtggaaatggtggatagtgataatacaaacataatattaaataattcaagtgaagacttagaagaatcctcaaatctcatttgtttaagttgaaacccatcaaaccttttccatgtctacttgacaaaaagtaaaatagattagccttaatttcttcttttctgttgttgttaatcctttagcaaagctgggggtaaaaagtactagtaatgcaaaagaaaaaagggggtgccaggcaatgttcatatacttaacatattttaactctcttaatccttgtgaactctgtgaggtttgtgccattatccccgtattgtagggaggataggaaactaaggcttaataacttgctctgtggctagtaagtagtgaaaacagtgcacaaacccattccccctctttaaacatcctgcatccttacaatcagtcttcaaatatagtgtgatttaaattgctcgccctctatcctttgccttcttctctggatctcaccctctaactcttaagtgcttgtttactgtttttcttatgtcctcagatagatctgtacccattttatgttgcctcatttgggtttctgggaccccagaaggtgaagttctccagttggaggcacgttttgtcaaggcatctatggacttttcccgtagtctctacttgcttttctccccagtgactggctggtcagtgggagacactcatttgtcaagtccactccatccttcagagcctggacccagagctaaacctcctctttctcagaggtcctggctcccccgcgctttgaggtccatagcacaaagcacacttggtaccatatcttgtgacaccccgagagagaactgttacaatccct

SEQ ID NO: 47252 - DNA, 1450 bp, Bovine  19866880181273
  misc_feature (1)..(1): n is a, c, g, or t
natgcctccgcctctcatcctctgtcgtccccttctcctcctgcccccaatccctcccagcatcagagtcttttccaatgagtcaactcttcgcatgaggtggccaaagtactggactttcagctttagcatcattccttccaaggaaatcccagggctgatctccttcagaatggactggttggatctccttgcagtccaagggactctcaagagtcttctccaacaccacagttcaaaagcatcaattcttcggcactcagccttcttcacagtccaactctcacatccatacctgaccacaggaaaaaccatagccttgactagacgaacctttgttggcaaagtaatgtctctgcttttgaatatgctgtctaggttggtcataactttccttccaaggagtaagcgtcttttaatttcatggctgcagtcaacatctgtagtgattttggagcccagaaaaataaagtctgacactgtttcccaataaaaatcatacatatttcatgaaactgcatgatcaactgtatttcaacatacagaaacagagcccagtgtactttagtaatataggtaatatggcacttaaggcttttcttaattaaaagccaagaatcttatttgcatttctttgaaggaaaagactgtaataaggacaaagtattggcaaagtgatgagccaaacagagaggaaattctaattatagacttcagaattcagtttaagatgtatatgtatgtcgctttatttttttttttttacagttttcacataactcattatttattttggatatatttcattttaaagtatagttaatttacagtgttatgttaatttctgctatacagcaaaggagttcagatatatagagagacattctttttgaatattcttttccattatggttatcacagaatactgaatatggttccctgtgctatacagtaggactttattgtttatctattctatatataatagtttgcatctgctaaccccacattcccactgcattcctcctccacctcctctcccttttggcaaccacagatctgttctcaatgtctgtgatcctatttcatagataaattcatttgtgtcatttttttggattccacatagaagtgatatttgcctgtattttctcccagtccattggttgtcttttcattttgtttatggtttcctttgctgtgcaaaagcttatatgtttgattggtttagtcgctaagtcgtgtccaactcttgcaaccccatggactatagcctgcgaggcttctctgtccatggcattctccaggcaagaatattggagtgggtcgccatttccttctccaatatgtttgattaggtatcctgtttctacttttgcttttatttctattgccttggttaactgacataagaaaatattggtatagcttatgtcagagaatgttttgc

SEQ ID NO: 47253 - DNA, 1519 bp, Bovine  19866880464581
  misc_feature (1)..(1): n is a, c, g, or t
nctttacctcttacaaagccagtactaaaggccaagataatatgaaaagcagtcagtgacttctaattctatcaaattcattgcatagaaatgttgtacaacataagcattttcttttccctagcattcccttttttattctctctacttttcccaatggttagaaatttttatcctgcttttagcgagcagtgtgtcgatcactcagccactttggattaaattcaaattcatttgtgcctgctacacagacaaacacgagagtttattagaagcatgaagaataatatcttcagaagccaggaagtctttccctcagaaatcatctcaaatgtgccactgctcatgcctccacttttaaacctccactcccctacgcacacacatgactttaaaacataattaaacaaggaatatatttaacactaggaaagtgttcttttattgaacaaggaagatattaattctcctctatatagcaaaacaaaaaacatctgttaatccagctcctctctggcttttacattaagaaagctcagaggttttgtaggtaccaacaaaaaacacacaccccaaggcacaaaagaatgagaaaaacaaccatcaaataggcagcagcaacagcaggcaagaaaggtaccctgggtaccatgctagaggcagctaggagccttgagtgctttgcaagacatcaggcttagctagagcagatgtttctcattcaccagagaggcctgggtaccatgcatgcctgcctgcccagcaaaggaaacattatcagattgaagagttagtacaccctattcaagtttcttgctctctttttttctcagagctctgtaaagttaaaaataaagaaaaagaagtaaaacaagtaaaggagaagatgacctgttttgaactgaccatcattcaagaacacggcttctgctctgggccctgaaagggaaaccaggagaacacgatgagccaatattatgctgggaacagggagaagagtcgtacctggcactgctgcctgggacactgcaaggaaaagatttctagccaacgtcaaagcagagagagtccacgccatttggattggctacaaacaatatgtcagttttcattctctcagccaacatctctgtgctgctgctgttctagatgctaaggatacagccttgaaaaagggtaaagaaggttctggattcatgaagtttactctgatagaagagacagtaacaaagctgggaacaaataaataaaggtagtgtgagtgcagggaaagggaataaggcaggatacaagaatgaagaaagaccgagggtagatgagtggaaggagggagggaagctgggggttattttagattgggggtcaggatagatctatataagccaacaaggatttcagcaaggtctaacttcactgcctgctaaatgtgatttaaggggtcctgcctggaaaggaccgattcattcattcaaacaaatacgcaactgtgccactactgtgcactggccactgtgctggg

SEQ ID NO: 47254 - DNA, 1057 bp, Bovine  19866880486446
  misc_feature (1)..(1): n is a, c, g, or t
nttccctttccccttctcctgcttataagtctgttaaaaactttcaagggctttaagaataaaacttggtgaaaaaattgttgtttgcttgggaaaaattaaatttagccctttcagttggagccaatatagataactgagcaaacaaaaatttacaaatttgtttccaggtcccatggtggtttcaggtcaaagtcataatagggtttatctcatgtctaaatttaattgaagggtaaatgaaatgatgctgagagattttgctgactcctcactttacaaaaatatacagagtaggtaatagacttttagtggaagaggaaagtaaggagcctggattcatggactggggcagaagacagaaaacaggtgaaaaagcattttgaaaaggcgaacattagacctgtagtttgattgaggaccacgatcaaaagaaatcaatacaaatgttttggtttatttttttcccctccattttcacttaagtagcagtctctaatacaatggaaagctggcacaaagcgtattagaaaggaggtaagacgaatgggctcagcagtaataggaagtaccgcatgtgttgcatgctgcttagtttaaatttactggagccttgctacagagccctgaggggaggcttggggatttgcataggaggactttattaaaaggagatacttagtggatgtcttgagaacatcatccctaaagcactgttgcttgctgttggcttgcaaggagagtacaatagcaaggcttgactttggtgtgaaaatgtgctagaattcaaatcacagaagcttgtgtccatagtagcatcatgaatggcagtcgtcatggaataatgctaaaattctatacatagaggtaactgtcaggatagcagctttagagtttatagatagaattgtttacctgatatggtatgatattggtaattttgatactactgacatctctagagtgatgcttaatggtcgactttgccatcaaaagccatttgatataataatggaaagcagggggtcttgcaggtgagaaacgagctcaggttgaa

SEQ ID NO: 47255 - DNA, 1543 bp, Bovine  19866880533767
  misc_feature (1)..(1): n is a, c, g, or t
ntttgttgacaaactttaactgtatctgcaagtttggatactttaatggattccagtggaataaattcagactgaaaacaagtaactttagaagcccttcctatatattcaggagttcctattatgtaaaggttaattctgtgtatatctcaactctgttgattggttttataccgaaataaaaaatatggttattatcaaaatatatttatttgagagaggagacttatttctgttctacttataagcttagaacatatataaacgtgcagatttttcagcataagaattttcagtatacagaaaagctgaaaacacagtagaaagaacagccatataccatccgtctagactgaacagtgaggttttgttaagagtgtttatcagataataatttgtcatatttgctgtttggtgtccatctgtgtcacatccattctttaaaaaaatattgttttgctgaatacttgaaagtgaattgcatatatcatgatacttcttagagtgtcactttttttgtttaagagtggggttcttttgtgacaacctggatggccctacatggtattatgccaagtgaaataagttaaagacagatactatatgattttacttatatgtggatctaaaaatcaaaacaaatgaacaaacatgacaaaactaagtctcatagacgcagagagcagagaagtaggtggtggttaaaaggggcggggggcgcagtgaaatcgctgactgaggttaaaaggcacagacttccagttctaaaataaatgagtcatggggataaattttttttttttttttaaacaaaaaaggattccatatgatcttaatggagaatgtttttcagattcttcattggggtattaaaatgctagctaaatttctagctgttttatatagagctgatggtataagtttgtggcttatacacatttgtaactgcttgttttcaggggtataaatgttgcttttttacagacctgtgaggcaaaaaacagacccttgcatatgcttgtctgagttcattttaatgtttctacagtttggaaataataaaatactacttacagggttgttgggtagtctgtttcatccacgcagtaaatgttagttgaatttgagtctgttggaatgtatcacatactgtgttgagattatgaaagacaaatgctaagcttttgtttctagggtatattggactttgccaggaagttctgccatattgttcagaattggctcatccaaaaaacaagaataagatctcataggaacccatccaagaccagaaccaacatcttttgttgactcagtttggttatagttggtaaagaccacattaccagccaaagtagtctgcagaaggaaaaaattaatgacagcatttataaataagggtttcttttatcctgctcttaggataattgttggctaatttaaagaaagacagtgttatttgctttggagaatggtagcagcgctagacagtagaatcaccctgattcccaaccctggcagcagggctgggaattaaaaattc

SEQ ID NO: 47256 - DNA, 1624 bp, Bovine  19866880564363
  misc_feature (1)..(1): n is a, c, g, or t
ngaaatggttcattatccaagtatgcagttcttgtgcatttcacttcaaaaaaaaaattgaaagcctgtgaaccagatgatttttaagacctcttccagctctgaaatttcttaattctaagtgattttttggttctggtcgaatccgttattttaggaacactattgccctctagtggtaaaatgcagtaacagctatggtagtgaaactgttagtcaccagtctgtcccactctttgcctccacatggctgtccgtggaattctccaggtaagaataatggagtgggttgccattcccttctccaggggatcttcctgacccagggatcaaacctgggtctcctgcattgcaggcagattctttactgtctggccacccgcgatggtagtaaatgcaaagaagtattgagattctcaagtcagaactagctggtgaaaccacttgtgagtattctgttttgtttactgattataaggagagattgtaaggagagagtcatagtgagggacacaggcatccctcactgcccctgtctgatgacctctctttcccaaccgtacactacccttccatgaccagaaggctcctgtttctctgatgccgcaggccccagagcatggaaggttgtggtgttgagagctcctgtgctacccagggtaccctggataagcctacttctgaccacctggggctgtcccctacagtgaggcaagcacactcaggacacttgtaagacctacgaccactagtccctgccccaggcagctgttgagaagccagcctttccctggcatttagaaagactggtgagatctttgtgtgcacagacttaagaacaaaggcaacccatttgaaatcagcccttatttgaggattgctcagaggaccaggccacgacctgattggaaacattaatcaaaacatttgaccagaggtaaggcggggggaattatgcccaaatcttaactgcttcaatttaaatgaaaatcagcaaatataaaactatcatctgtcttttggtgtagcgtgaaggacattaatgggcactccttgcagtctttcaagcaagaagatccacccataatggacatctgtgactttcacttttgtttacgtacgatggcagaagcacttgcaaagaatacagttcacaatcctctccttttacttctgacttttcttgcctaaccctgattcactcatacccagttcaccagcaagagtttttagagactttatcaattctttttatagtatttaacttggattttgtggacttacattttttcctgcctactcttcaccagtttacttaacaattttgcagctagggaatgggtacacctgacacaggcaagtttcagagcaaaccagctgacttctggtgatcatccctccccctccccacaggtggactggctgctgtgtgcccccaccaaccccagtgtctatgggcagaacaaagcctgtccattgagccgacaagacagctgggagagcgcctagtatactaagaaaaagcttcttcctttatcccttttcaatctataaagcactttaatacagcataattcatctaattactgctctccttgaagtcttctctccattaatgtcaata

SEQ ID NO: 47257 - DNA, 896 bp, Bovine  19866880603635
  misc_feature (1)..(1): n is a, c, g, or t
naactgagcagctttttttttttcaactgttgaagaaacacgtatttctgaagattcaagctctactcacaatctgcttgtctgattactttgcatcaggatcaaacactactttagtccccatttagtaaagcgtatccacaagagatgcagcctattcattaagtactttagcttttttcagtgacagcttttctcaccagggcaggaatgagcctttcaacatgtcaagttagcagctattttccagcataataggcgctctctggtcaggtcagttttcttcagcatggacaactaaaacaccatactatagaaacaagaaatttcctccctcattttatgagtcttctcaaagtttctgccacatctccttgcatcatcttttttaatggatattaatttattcaaaatcattaacctcaaggctgtcttaagactttattgtgtttggtcagtcttctacagtttaactatcccttaaaaattttttcccctactttcacaatacaaagtattatttatagcatgttcatggagggaaaggggtggacagggtgctccatttttaaaaacatacccaggttttccaatgaccttccctatcggtttccttgggatttcaagggaataaacagatttattttaataagcttaaacataaaaacctgaatttaaaaattagataggccttctattcatactaaatattttaacaataaagctgctccagagcatctaaaatattcatccagtagatttaaaaatatttagcacttgttttgtactaatatggtaggtaagatatgcatagaataacaattataatgtagccattatactaataatattagaaaagttttataaattggtacagtagttcagtgccagaaaga

SEQ ID NO: 47258 - DNA, 1823 bp, Bovine  19866880632210
  misc_feature (1)..(1): n is a, c, g, or t
nggccttgctaccacgctttgtctccccgtgtattcttccctttaacttccgctgagtctccatctggagcgtggaacccaccacgcttactaattatgcctgggcttctaagacccactcgagaaggtgtctagggtgaggcaccttccgctattcgagagggcgcctgcggcctacgtaagtggtgcaaacttcttgtcttgaagttttattggtctcccgcgtaaaccaagctactcagcctcttttctccactgaattttcctactgagctatcctcattctattattctttatatctctaattagcatataaatagtcgcctaggccgtctctccttcgaataccctggatcagctggggctggtccccagcagggactgatggtgtgctagggacaatgcataggaaaatgaccatgttctccattggatagaaataacttgttgtatgtatgattaaagattagttactcttatttgtggaaattgaagacagagctgtcacagtctttgtagaccgggacctggggacttggagttgacgagaagaaggaagcaggggacccaagtcttgagtgaaacagggtgctttatttgcaaaaacacatgtttctatatcttcatacaaggcagctttaggcagtaaaaaaattgaggaaaaacaaagccaagcaaataacaatcttgaaagggccagaaagcattccatatcctgagtaagaggggcataactgaatagattacctgtaagtaaaaggtcactgaagggagtcactgaaaggaatccaagcaggtaccctttctcatgatctcagtcctaagaacttcgtgcagctctgcttgttcctgttttccaggaactgataaggaatagagtccttgagaagctgcacagaaaagaagagaataacatattggatcccttaaagttgaacgtcccctgacagattatgataaagttcactaaattttctgatattcatataataatacattaatttaaagctctgttaaaactgacttgtatatgctttttatggttgacttttagccaccagctgaacaggccaaagcaagactgcaattggttctagaagctgctggtaagtgtaaataattaattttatttaaatgaaaaaatgtgaaataaatcctagcattcttacaggtttatcaaagaggaaactacatattttcatatagcctcacaaatttatgacatctatgtatggccatgtgtgcgtgcacgcttagtcgcttcagtcgtgtctgactctttgcagccctgagaactgtagtccaccaggcttctctgtccttgggattttccaggcatgaatactggagtgagttgccatgtcctcttccagaggatcttcctgacccagggatcaaacctgtgtatcctctgtcttctcaattgcaagcagattcttttaccactgtgccaccagggaagtcccatgtgtggtcatattttaacctcaaatatatattgctacagtgtaatggtcctttatgttctcatttataatattgctacaattttagtttgaattttgatgagatctagtttattgatttttgttttttatggactattattttagaggcatgtttaagaaaaactttatacttttacatttcagatttgagaatgtgatctattttgatttaattgttgtataaagtgtgagatttagatcaaggtttcattctgaaggaaatgagataaaagtcatttaataatcctccagttcagttcagttcagttgctcagttgtgtccgactctttgcaatcccatggactgcagcaca

SEQ ID NO: 47259 - DNA, 1673 bp, Bovine  19866880697736
  misc_feature (1)..(1): n is a, c, g, or t
ngtgtggtgattatgatggggtttggggagggtggacatccccaatctagagtttaatatccgtaacattaatgctttaagagtgatggtgaaatactttcttagacacagaaaaatggtgggaatatagtagaggaaatcctttagacagatgaaaaatgacatcaactaaaaatctgggtttcagacttccctggtagtccaatggctaagactccatgttcccaatgcagggggcctggggtcaatccctgcttggtcagggaactagatcccacatatttcaacaaagaccctgtgcagccaaaataaataaaaataaatactttgttttaaaaatctgggtttcatggagaaagtaagagcctcagagaattaaaaaatttcactgacatataactgcaatggaacactgtgtatcttcaaactgtataacatgatttgatcttggcttccctgatggctcagatggtaaagaatctgcctgcaatgcaagagacctgggttcaacccctatgtcaggaagatttactgggagaaggggaatggctacctactccagtattcttgcctggagaattccatggacagaggagcctgatgggctacagtccatggggttgcagagttggacatgactgagcagctaacactaccacagacttctctgtcaccttggaaaagtcagcttcacctccttgtgcttcagtttccttatttttctccccagcttaattttgatgtgattgacaaattaaaattgtatttatttaaggtatacaatgtgatgtttaaaacatctcttaaattagccttagggatatcaggtttttttgggttttgttttttaaatatgctgccagacacctcttaaattaactaaatgcatttttgtccaaacttgctctaacactgtctagaaattaacatttttccttcattaaaatggactaaattatttccctgttatgaaattactttgaacttagacactcttactttggtttgtattttagtagttttcaaattaactgaattatgccacccttgttgtatccatgctgccaaaataagcaccagacaacccacagaaaactaaacagacctcaagggagttatattgaatggggaaaaaagtcagtctcaaaagtttacaaactgcctgatttcatttacacagcattcttgaaataaaaaacctatagagatgaagaaaagattagtggctgctggacttgggggctgggggaaagaggtgagtgtaaaaaataaacagaatgtgattattaatcaggaatatagaaagatgaaatcctatatatcatttatttgaaaaatatttatcattacacatttgatctttttcatttccaaccatatatagttttcaccttggcaatgaccttgctgagtgggaaacataatatctttaatacacgagttaaatctaagatgatgttcaaatggactgcaggtaaccgtttatgtcaataataaatacagtagattacttttaaaacccatactttgggttttttattacagatgcaattgctgacttaccataaatcaatgtgcttaaagtgccatatgatatcaaatgtttagcttaacagcataaaattgagcagaaactgtaaaacatgttttatagatgccataaaaccctgggg

SEQ ID NO: 47260 - DNA, 1143 bp, Bovine  19866880698860
  misc_feature (1)..(1): n is a, c, g, or t
nactcttaggaactgcctggctgtccaatggttaggaatccccacttccactgaagggggtgtgggttcgacccctagttggggaactaagatcctacatgccatgcggtgtggccaaaaaaaagaagaaagaaaaagaaaactctacgtttcagggaaagactgtctcatgtttttcccctctgccattggtttccaggcacagtcccttcatgcggccttagagccggcagtgatagccttaaacttcatgtcccacaccgagggggtgggcggcggggacaggccagttgttgagagctcaaagctgatgctgatctcccctcgggagcacagtgagcttcagtgacctaacagactcagcttctaaatgtcccctccagccttcacgtttggtaagaaaacataaatgtcatgccattccaggaaaagcaaacttcttcattttataaggttagttttatgagtcaggcttagttggagacaagtaaacaactcatttgtggataaaaattgctgcgctgcacttatgttctggacagggagaacattagtgtattacattataccctggagttatttcattgcattttccttctctcgggcaatgcctgataaggtgaatgcaacatatggagcaaaagtcagtgaccttcagattaggccctatcctcctgtggagatgaaggagatctctgccttggatactatcaagctaaggggtagtggagagagacaggaagactactgttgtgttaatctgtttggtcagctctggggatgagttcttgaccctccccaaagagctggggagtggtcagaggcagtgttcccctctggcctaggatggggctcctcaggaaaggctgaaagagggattcgagttgttgtaggcaggttgggaatgggttgggtcctggcctggcctcctgttccaggtgcccagtggtcccaacacccttccagctgcctttgctttcatctaattttaatatcttaatcactatgctttacatatttaaatatttttcttttggggtttgtagtcagaaaacttcaaggatatagaatcattaaatattagacttggagactttcaacttcttgccaacacagaattgactgacactgattattcagcat

SEQ ID NO: 47261 - DNA, 1771 bp, Bovine  19866880720667
  misc_feature (1)..(1): n is a, c, g, or t
ngtggcaatcccattttacagatggcgggtatggaatatctttagctgtaccacaaaatttgataccaaagaacacaactggtaagtggtaagagctattcttataactaatgatcagtccttttggattttacagcagagcatttaccaaaagtccttatatttttcactagtcttgcacataactttcaatgccttggctcttccaaactccgcaggctattggtgccctcctgtttttccttccttccctgcccaacctgaactccaagattatcatttcaattccacatttataaacaccctcttttccctgattactttgttgctgtgctaagctgctatcaacatatctgaccatttttacttttgccatataagctccctacaaaatggtatataaatgttattgactataatgatttagaaattatctgaatccttccatgttgctccttcttaatcagcatccacagccaatttctattcttgtttcctacaatttactaaactttctccactggaagtgccaataatctcacaccagctcacctgactcccttatattgtctcagcttcactcccgttcacctctaaacttttatgtgcatcattccttatctcttttttttttgccttgtttcaaaaagtaaatccatccacttatgctttagaacctattcctttctgtatcctttagggttctttctgcttctcaaggttcaaaatcactcttctctatcctcagatgataaatacattcaagtttcacaaatcctgtacaatatttattcttctgtcaaccacgttactgacttttcttgttcctattagatttttgccccaaagcttttgtaatggtccccccaaactctatcacagccaaaatctaatggttatttcagctttatcctttcatcatctctccatctttttttaaacagctaaccaaccacatctttattcaaatgctttcctaattctaacaatcctttgtcagccttttctggctgctgtctcttttgcccacctttcatttcttggagttctgttgtttcgcagccttgtaggtcatctaacatgtaatctatgtatttgtcataactccagttctggcctcttttcagacaatcagaacattttccccaactacttcctgaatacctccacatagatatttcaaaattgtgtccacaactgaactcataatctttccctcaaacttgatcctcttttctagcaaatagctgttttctctctcagattagaaacctttgtgccactatcctccaaatcatatcctcatgcagtacagactgactaggagttccatcagattccactccacggattatctccagaattcatccagtcctttgcattttcattaccagtattcacatttaggcctcatctctttttacactgaataaaaaaggagctcctatttcatctctgtacttttaatactgtccctctaatgaacccttttatattacgaccagagcaaggaacatgttccttttacgcatctccagcagcaagcacagtaatatctagaacataaaatgctcaataattacaaaataaataaatctagcattctaaatacaattatatcacactacctctgaaggtaccctgttgtgcatatatatgtaaatccaatcttcttagcatactatctaaggcctttcacagtctgatctcaatgagctttctagccttatcattcaccttttttttttttctttttctcttggccacacca

SEQ ID NO: 47262 - DNA, 794 bp, Bovine  19866880745023
  misc_feature (1)..(1): n is a, c, g, or t
nttaatactccgtttatatatcccaaacccatgattttttatatgttgtctaagtaaccattataaaagaataaacttagctctaaatagcagtagttgatgaaagaatatttattgtcacaaagcccactagtcattaaatcaacagatattaatgaatacttattaagtatataacaccttattaggtacaaatagacatttctaagctctttcccctcaaagagtgtccatctttgaaactgaattttgtgggcacctttaaacatatatgcataatcttaatttctctcacattatatgtattttcttcatataaagccatatctccagtgtgaattattcatgcagtgtttggttcctgattatgcacacactgcccttagtcactcaggaagctcaggtaatggaaatgtgttttaatgacagtttaaatcagaggtgagcacattacagccaacctgccaaatccagcccaccacctggttttgtaaatagagtacaggaagaacaaaagccatactcacagtttacatattatctatgactgcttttgtcctcagttcagttcagtggctcagttgtgtcctactcttggtgaccccatggactgcagcacgccaggcttcctcgtccatcaccaactcccagagtttactcaaactcaagtccattgagttggtgatgccatccaaccatctcatcctctgtcttccccttctcctcccgccttcaatccctcccagcatcagggtcttttccaatgagtcagctcttcacatcaggggccaaag

SEQ ID NO: 47263 - DNA, 1996 bp, Bovine  19866880792959
  misc_feature (1)..(1): n is a, c, g, or t
ntcaaagaaagagtccaagggctagaagggcttgtaagggctataagtgctgttcatttggtaagtggagagataacaaatctgaggagcccagagttgctagattgacaggtttcaatgaattcttacatttacttccttttagacagttataaagaatatcattaactttacttaatattattagtgtacaaagcaatacatagatgtatatatgtgatattatgctatgtattcataatgctgttaatagttcagtcagtgggtcaattttacaatgttaagctatagagtttgaataactgaggtaaaatgcattaaaatcatctacttccactacctgttatattaatcctggctctctaatccctaaaatgcattatctttgaaatacatttgatgtatatgactcagataaaaactaaatataacttagagtcaagaatgggaaataataatttaacaaaccattactcctgactataattaacacacgtggctatacttcatcaaaggttttaaaatacctatagtcgcagaactctgtttagatgaaatcttattttaaaagtttaaaagtatataaaatcactaaaaatgggcactgttctggctaaagtgggcagtggaagcctggagtgctatttgctatggggagaaaacctggcagcccagggcagtcagaaaaccactgttgcacaagattacaagtcaagtataaatgcaagaaattgtcactgaaaataaattcatactagtatgaaaaaatataaaatttaaacaaaggttagaatctaatttgtttactgatgaatatgaatcacataaatataaagtctttttattacataataatttacaagagattggcactacgttagctattcttccttgttataagctgccaactgatactggcattagatgttttagattaatatttttattgtaatgtccatatgtatctcctaaatatatcttgtactattaagtgagaaatgaagattcaagaaataatttttaataatgagaataacaatgttatttatttacttctaatctggaaatatatacatagttcaatttttctaacttggttattgtgttctgcttttaataattaacctgtaatttttagcatgacttaatcactttgaaaagtctagatttcctcagtttcctttagttattgaaagaaaaaccaaaaatcctttcaactctaaaactgctataaataaaaatggagctgctcctatttgctcttgtgtgagcacaacaaaagcacattaatagataacaaagctacaatatgatacatgaatgaagtcttgcatgaaaaaactacttagatagtatttacaaaagaatctctatcattaattattcaacatttggatctgaccagaaaccagagcatgactttataatgctctgtttaaatgaactacttaatgttgtaatgaacactcaatgtggtgagctcaatgaattttggacctggtataacacagcagttttccaactttttgatcaatggacagattttaatgttaagtcagttggaatttcacttgtgctttaaaaatgtttactgaaaccgaaaattttgcatctcaattattttatattctaaaactgaatgtagtttaaaccaatgcattattcataaagcaaagacattaggaaaaacaaagctgtgcacttctttcaaagctgttaaattgctaaaacataccacatttatgcatgcaatatttgattgtttttttcttaacacacaagcttgtttttgtcagatcaagatatgccaaaaattctacaccaaacatttttgtttataattaaagcaatcatcaatccaaggattgtcatctattttatttcatctctacatcaaaaaaaaaaaagtaatttaaaaaaattttaattcccttgaaatgataagataaatgaaaatgtaagtgccttcacataataacagtaagctgaccctttg

SEQ ID NO: 47264 - DNA, 1376 bp, Bovine  19866880820089
  misc_feature (1)..(1): n is a, c, g, or t
ngaagttcacggttcacatattgctgaagcctggcttggagaattttgagcattactttactagcgtgtgagatgagtgcaattgtgcagtagtttgagcattctttggcattgcctttctttgggaactgaccttttccagtcctgtggccactgctgagttttccaaatttgctggcatattgagtgcagcactttcacagcatcatagactagattagcgtttcccaaaatatgttctttgtttatttatattacaggaaaagaatcatcctttagtaaaatcaagttggggaaacataggataaactaagttaaacagatatttcaacctgcagaatatctctgagctttgattttgttgatgagcactgtagctttccaggaggagaggttcagtactgcatctagtctaaggtccaatgttgtgaaaccttatttaaatgaagaatcatgagaaattagtatgccatggaacatactatgtgtcttattgaagattccttctagcttcagacattgatgattttctgagaatatgcattacatgtgatttgtacttttacttcattcttgacttacgatcattttaaattgatagggtcttcctggcagtagacagcaccctttatgaacatagtcatgtgtccattcatgactttctgacttaataatttaagttaaaaagaacaagctatcctttattaagcagtactagtacgattagatttgttttgggtaactaattcctggtcaaaagtccctccttggatcctatgacagcatacctccgggatttctactactgttttttccaaggcccatctcaactggattgtaaccataaaacgaaacataaaatatacttgagctggtgcatttagatttcatgaaccaaatgattgtcctgtcctcctaactaagttatcctacaataggcagcccaagtatcacctcttcctggaagtcttcctcgaccatatcctcattcttcgttacttccagagtacctgtacacaggtgtgtgtgtttggttttatgtttcccagtgttaatttaaacttttcatttctcagtcttcagcacttagctcagtgattagggtgcagtattctgctggagaattttctctgtcatctgttttatcttttttgtaaatctggacacttgaaggaactaatgaaaaaaacctgcttgtaaggtgatctagcaaaaattaatattttagagcatttactcatgttgaaagatggctttttttttttttgcaatagctatgtaataattgaaatttcatgtttgtacaatagttttccagttgtagtcactattgaccctgatgctatttgaggcagattcagaataatcatttcaaa

SEQ ID NO: 47265 - DNA, 1796 bp, Bovine  19866880845923
  misc_feature (1)..(1): n is a, c, g, or t
nctgtgttttatagcccagaatgtggtctatctcagtgaacattcccacgtgagcttgagaagaatgtatattttgcaaacactggatgaagtagtctattgatgtcaattacatgcacttgcttgatgatgttgttgagttcacctatgtccttactgattgtattaatctgtccatttctactagaagggttttgaagtctccagctatgataatgtattcatctatttctctgtgtagttctatcagtttttgcctcatgcagtttgatttggttaggtacatatacattaaagactgttatgtctccttggagaattgacacctttatcattttataattcccttctttatccttgataactttttgtgctccaaactctgcctgaaattaacacagctactcctgctttcttttgattagtgtttccacagtatctttttctccattcattcacttttaacctatatgcatcttatatttgcagtggaattttatggcagtgaagagttgagtcttgttttttctattcggacaatctcttttaattggtgcatttagactgttgatgttcaaactgtttattgagcagctggatttatatgtagtacatgtgttcatattcttccctgttgattgtccttgttctttgttcctatttgtgtcttttcattttttgtgattttaaatgagcattttatatgattcaatttcctctttcctcttagcatatcagttataatgttttcttgctaggtcaaacttaaaatgcaaattttataaaactctaacaaatattagccaataaagttcatcactatatggaaaagactactgtgtgaaaaaaatatatgccaaaccttaaatgtgatacagaattcaaaaccttgggttcagcttataaaaattagcatgtccttctgaggctaaacataactattaaaaatggctagaagtaattcataatctctagatgtaaagacttaagctccaaataagaatgtcatagtatgaataaggtatgctactttcatttcattttaaaaagtatacttggtgtagtgctaaacagtatgccttgaaattagccagatgtggttaacagacaggtgttcagaagcatgaatcactcctcaaactcttccacatttgaaaatctgtgactagaaccaggcatttggcccctttcacagtcttcagagtcatggactgtctttctataattaatttctagtgtctaaaaatgcttgaattcaacgctgcatcactgtaacacccttttagaagacattttaatccacagaagagataggaatttaagtcaagattcaggagagtgtggtaccttcagatccgagaactcaactgaggtgctaactggataaacatgttctgcccaagctctgtccacatatacctgaggccttgacaaatctgtcccagcccactcctccacccagtttctggcaggcatccttgagagccattgtaagtcaccccctgaaatatatgggttagagagaaaaaggaaacagtgggtctcagaatggaaaaaaaaaaatgagtgtagatgaccacacaaactgtctctgttatttgctttctttcatccttaacacactccaatcagtcatctgctcagtgtacctctgaactctactcagcaaaatgaccaatgacctccatgtagctaatgaagtaaagtcatttctaaactcataacgcttgactgctcagcagtactgaccctggggtgaccccactcaatattcccatctcctgggtttcttttgg

SEQ ID NO: 47266 - DNA, 877 bp, Bovine  19866880882626
  misc_feature (1)..(1): n is a, c, g, or t
naaaaatctgatttcaaagtcattgacggggtggtattacccttttgtatttttacttcttccagtggtgattatttttccagacagtaacatcagtttcagagcagccaccttctctgttgtgacaatacaatgtcagaacaatgcttcccaatcactccctgtgtttacactaatttgaagctgccaattttgtcagatccttgtcaatagaaaacaaaaatgtgcaagctgctatataattattgaaattaagtactcaccgtctctagatattcttctaaattatttaaaggatccaatttgcttttccttgtgaaaaaataaaagcccttgccttcttatgtttgtggacaattcacacatggaaaagagatctaggtacacagcaggcacaagcccacactgcaaaaatataatacaaaattattaaaaggctaatcagcaccttttatcttaagactcaaggtatagtttaaaactgggttgctatctaggtctcatacttgaggttttcttcaagatttttttcttttttgatgaccattttttaaagtctttattgaatttgtcacaatattatttccgtttaatgttttgattttttggccatgaggcatgtagtatcataactccctgaccagggatggaacctgcaccccctgaattgaaaggtgaagtcttaaccactggactactaggggaagtcccttgaaagttttttaaaactcagatctgtcctctctctctttaccattatctccagatcatgttttttgagctagggttctgcaatgcaggagacctgggttcaatctctgggtcagaaagatcccctagagaaggaaatgacaacccattccagtattcttgcctg

SEQ ID NO: 47267 - DNA, 2638 bp, Bovine  19866880913518
  misc_feature (1)..(1): n is a, c, g, or t
ncccttctcctcctgcccccaatccctcacagcatcaaggtcttttccaatgagtcaactcttctcatgaggtggccaaagtattggagtttcagcttcagcatcagtctttccaatgaacacccaggactgatctcctttaggatggagtggttggatctccttgcagtccaagggactctcaagagtcttctccacttcttcagcactcagctttcttcacagaccaactctcacatccatacatgaccactggaaaaaccatagccttgactagatggacctttgttggcaaagtaatacctctgctttgcaatatgctgtctaggttggtcataactttccttccaagagagtaagcgtcttttaatttcatgtttgaatcaccatctgcagtgattttggagcccccaaaaataaagtctgacactgtttccactgtttccccatctattgccatgaagtgatggaaccagatgccataatcttagttgagctttaagccaactttttcactctcctctttcactttcatcaagaggcttttcagttcctcttcactttctgccataatgtaggagacctgagttcaatctctgggtcaggaagattccctggagaaggtattccctggagaatccagtattcttgcctggagaattccatggataaaggagcttggcagggtacagtccatgcggtcgcaaagagttggacatgactcagcgaataacacataggtatatacatactttcacttcagttcagtcgctcagtcatgtccgactctttaagaagactctattgtttgtctggggaattccccagttagaccaatggtgggaagcagcccagcttcccattactgaaactgaaagtgacaacttccccctacccccacctcctggccagaaggtacaaccatgtggcctcagaggctgggatttgtatttgagaaaatcagtgtgggagagatcaaggtagtctcccctttgaaactatttctaggttgaggttttgatacctttgcaaagcagagggcaggtaaatgtacctgtttaaactataaatattcctgggactttgctggcagtccaggtgttaggaatccacacttcaactgcagggggcacaggtttgatctctggtccaggagctaagatcccatatgccatgagatacagccaaagagagggggaaaaaagaaagtaaataaaatgtaaatattcctagataagtgagatgttactgacctggaagggagacagattgcttttcatcataaaggaaaatcaagggaaacaagacaagagagaatcatgtttgaaagaagaatgctggaaatactcaagaggcagcccagcctgggagtccaagggggacaaaggacccagacttctgggaagcctgggaatctgggaaggacagacaaaggtcttcaggtaggagtagacctcttcagcgtgtggtccagggcagcacaggcgagacattagcgtagtagatgccacaattgtcacctatttaaagtaggaggtctccccttatggctcagctggtaaagaatccgcctgcaatgcgggagacctgggttcagtccctgggttgggaagatccctgtgttgggaagtctaaataaaggacaaaataaatatttagtgtttgtgggccataagatctctaccacagctatacagctctgctgcttgcagccataaacaatgtatgaacaaataaacctggctgtatatttgcacagtatatgtgcaggatcatttcacatatactgttactgggtagtgaatatgcgtttcttaaacagaccttaagaggaatattgtaaccttaggatcagagtcacctcttttaacttactcatctataaaatgatatctgtcttagtttttaaaagaaaatagctataaataagttttttgcaaactgcttaagctgtttagaaaaaatatttgattaaaattcttatgaggaatttgctattggaaacagaatatgtgctattggtttaattctgttcttttctggtctttgtttaaactaacttggtgctaagttgtagaggcaagataaatctacttttgagctatgtgtaatatttctagcttagaccttgatcctaagagatagaattatagtaactgttaaaatgaaatgtagccagaaatatgataagctgttgatatgtgtctctgtcatagtgagattgcatttactttaaaggaaagagcagagtacctatactgtgaatatgtttaatatttttaaagttactcatttgaaaaagcttgattaaaatgagcttttttgatgacactcacagtctttaagatggttaatggtagcattcaaaagactaaagaaaatttagttctaactttatatggtcttttctggcaactaaaaattatttgatttattctcccccaccccccgccatgaaagttaataaacaaatgaatctctaattatgtagaagtatagtgttgctaagaacatggattttgtgatctgggttaaaatacaagttctgccaccttatcacctttgtgacttatggtaatttattcttcatctaagagatggcattaagaatgcctgtcttgtcaggatcgttatgtga

SEQ ID NO: 47268 - DNA, 2315 bp, Bovine  19866880951010
  misc_feature (1)..(1): n is a, c, g, or t
naaatgtttaaagcccttctaaaatcattatttctaaaacatttcaattatattgtatccaaaggctttaagaagttagaacactcatgtttatgactgcaaagactacacacttaaattttaaaattcagatgacttcatgaattcaggcaacatgaggataatccttttataccaagggagaaatattctaactaggcacctttctgtagcagcacaagttcatcaattcttccaaactctgctctgaccagttgttttgcctcagtaaaggagaaaaccatccctacccttgaaataagtaagaaaaagtagaataaaatatttataggaaagtaattttgaaagtctgacattctcaaatatacctgttcattaatatttaaactttaaaatagtatgtaaattaaaatttgtcattatgaaaaaaattatcatgaatctataaaaaatttaagctacataagaaaaatagggtatttaaaccataaatcgcttgtgttaaacccactatgcaaagaaaaacttatatgatattctaaaatgattatttagctgagcaaattttattattccaaattttacaaacttagtaacaggtatattacatacagtaagtcaatagtgagtatttctcaataaatttttatgactgaaatttttattcattattttatggaaaagtttatgcattattacaatgtggaattcaaaaacccaattagtgacaacactagaagttcctaaagaattctacaaacacaagactatctgcagagctcaactcttcttacagcctaccattgtgaggcctcatatagagtgaggacactagggtctccctattactggagtgccttatccttttttttgagttccaggacctttattaactcaggaggtagaatgatctttcagcttcaagcagccctgctgcagctctttccctcattagttccctgaggttagctctaagcaaacacagcagcaaagacagcagggagtatgaggcatctcctatacatcaaccactggaacaaatgtgaagagtgtttgaggaacaccacaagcctagcacaaaagcctcctggaaaattacacacaggtaccaacaagcaacctggtatcctgaattatgtatgtggcgatcctttacttacactaacacctgacaataacacctgacaacaaggacaggagctgactgtagctcagatcatgaattccttattgcagaattcagacttaaattgaaaatagtagggaaaaccactagatcattcagatatgacctaaatcaaatcccttatgatcatacaatgaaagtgacaaatagattcacggaattagatctactgacagacagagtgcctgaagaactatggatggaggttcatgacattgtacaggaagcagtgatcaagactatccccaagaaaaagaaatgtaaaaagggaaaatggttgttcgagggtgccttacaaatagctgagaaaaaaagagaagctaaaggcaaaggagaaaaggaaagaaacacctatttgaatgcggagctccaaagaacagcaaggagagataagaaagccttcctcagtaatcaatgcaaagaaatagaggaaaacaatacaaaggcaaagactagagatctcttcaagaaaattagagctatcaagggaacatttcatgcaaacatgggcatccaaatggtatggacttaacagaggcagaagatattaagaagaggtggttagaatacacaggagaactatacaaaaaagatcttcgtgactcagataagcataatggtgtgatcactcacctagagccagacatcctgcaacgtgaagtcaagtgggccttaggaagcatcaatacaaacaaaactagtggaggtgatgaaattccagttgagctatttcaaatcctgaaagatgatgctgtgaaagtgctgccctcaagatgccagcaaatttggaaaagtcagcagtggccacaggactggaaaaggtcagttttcattccaatcccaaagaaaggcaatgccaaagaatgttcaaactaccgcacaattgcattcatctcacactctagcaaaataatgctcaaaattctccaagccaggcttcaacagtacatgaacttccagatgttcaagctggatttagaaaaggcagaggaaccagagatcaaattgccaacagccgctgaatcatggaaaaagcaagagagatctagaaaaacatctacttctgctttattgactatgccaaagcctttgactatgtggatcaccacaaactgtggaaaattctgaa

SEQ ID NO: 47269 - DNA, 1367 bp, Bovine  19866880997690
  misc_feature (1)..(1): n is a, c, g, or t
ntatttattatacatattgattaacatgtaatcaataatttaatgcccttaaaatatttatctctgaatatattatagccatacatcttatggtcaaaggcagattataaggtatgctgtaggagataaacatttacaccctctaattggattttgtccatatttcttttattagagcaaatactttgctatagcaaacatatactgatatcattaaaggtattagtaagacttgagggaattcccttgtggtccagtggtaggactctgagctttcactgcaagaggacatgggtttgatccctgatcagggaaccaagattccatgtgctgctgagtgtggtatcctcttccccaagaaaaaaacttgagccttactaacattaacagttgtaagttgtaaaaattatttgcatttcatctgttttctgttaacaggtaattactgttttcaaatattaatactataatcaaggcagagttcttaacttaggctaagccatcatcattcttatattaaatacaaccctgattcatgctaatctgctaacttgctaattgctcttcctatgtgaacactggcttatgtttgatcttcggcaaatagataagtctcattattactgctaaaaattaaatgttaggtaacttgacatgtagataatgttgccagcttattcaagtaaacatcagttttctcctcaataaagtcaagatctttcaaacccagtgtaaaagcagatttatatttataattatttatagattgtttccatactgtttcatttccctgagaagatgttgtagtataatactcaacacagcacagtattaattgatccattttcagctggacaaacatcttttgtgttgataacatactactatcatagccaaaaactgtaaaaaagctctatcttttggattataactataggaaggaacaggtggataaaatcacttatttctgtaatatcactacgcttcatacaacgaaactgatacacaaaaggtgatttgcagaaacttttaaaataaaaaggaaagttgtcatttacaagtaataactgtgacctacatattttggggtatttttctcattatttagagaaaaactcacaaaaataactcactgaaaatgttatccactatttcactatttagccttgggctaaataaacatttacggttgggctgaggaatgatatcagcagcataagatgtccttccattttgtctaacaactaatcaggcatctatccatgaatgaaagcaccttaatgggaggtgtagaatccagcaccatatgccaaagggcctgggaagactcttacccacttgtgtatcggtaatagacagatctcatt

SEQ ID NO: 47270 - DNA, 1207 bp, Bovine  19866881037478
  misc_feature (1)..(1): n is a, c, g, or t
ntttctcttttctccttatctctgcctttacgtcgttctctattcccgagaaccgactacgtgttcttctgtgacttgacctttcactgcttcgactatgggaacgtggccgaggtcttgatcgggacctatggtaagtagatttcattaaatacattgagaatataatttgtattatgaaataaaatttttttaactgtctgaaagaaaaggatttagttttaattaaggattcagttaactgtgtgaagtgagcatctaaagatgattctttatgaataagcatatgtgagggaaacatagggtgccaactttacaaaaatataaggtttagtcaaagagtgtttgttcaggtgttcacaggaccctgttggcataatggatacaaatccgcctgccaacataagggtatgtgtttgacccctggtccaggaagaccccacaagccttagaacaactgagactgtgcactacaactactgagcccacactttagagtccatgagccgcagctactgagcctgcccacctaaagcccatgctctgcaacaaaagaagccactgcaatgacaagtctgtgtaccacagctagacagcaacctcagctctctgcaactaaagaagagcccacacacaacaatgaagacccagtgcagccagtaaataaataaataaatagaaaaaaacaaaagtgcgccagccttgtagtactacaaccagctttttaaaaagtgtttgtttagtcaaaaaagtcttaaagttcaaatcaagtcttcaatgctgaaatctcttcaacataaaataacaaatctaaatggatctattctaatccccaagaattaggatcttccccatccctacgaactctgcttctattaatatattgattcaacataatttcctgtattagttacactaaaactattcttctatataatccagcttttctttcattaaatggaggacaatattaggtcggatatattatatgcctttaaaaagtaaatatttttaaatctgccctatagtactgacaaaaaagtctctaacagattgatgatcctacagacattataaaaaactgtctgaagtcactgaacagtgactgaaagaaggcaatgacctataaaagggaaaaaatcttactatttaaacatgttgctgatttatttaacatatttcaaacaattaggttaggaccaaaaat

SEQ ID NO: 47271 - DNA, 1069 bp, Bovine  19866881042981
  misc_feature (1)..(1): n is a, c, g, or t
naacttaattgtagaacatagcattttctaaaatttaaacaatgttgaagtatgtataaaaacaaagcttcctttacccttcacgtccccctctccttttcccatcccacatagcctctgctaataatttggatttgcttatcaaacctctttatgcaaaatttgtctttctatggtgaaagcaccacagagttaggagaaggaaaaattctcttctggtagtatgaagtctaaatagtgacagccatagaatttcttcacccagtttgatcagaaaatgtaagtgcttcttccacttgtatctcccttgcaggaaaccatctgcatgagtaggtctgaaattcagagggtgtgaacgcagaacatcctgtaaggaaatctcttaaatctttgttgcctctcctgaccacatagaaattgcctttccttctgtcattcatttggataagctacagctgctcttatggctgttttttcttcctttttttgttttacagtgtcctttcagtcagaacatcttagcaaatgctttccttcgctaagcttcccaaggccatgtcaaataaagcaccaggaacatctgaaataaaaacagcatccatcacagtgttgaggctggctgtaaatcaacacgttcgtgaagtttacaaaccatggttgacactcatcaggggctgcccacatactggggtgcagacttccttactgagtgacactctttgtagatgcctagcactgtccctgaggcctttatggaagcgctcgtctgtgctcctgtcttgtttcagctcactgcctacatcctggtggggtcttactctgtgtccttgttgcggtccattgagcctcctgtgtcttcctggaacgctcttaccctgctctccctgtcccctactctcatgccctttttgcagggcctggcttaatgtaattccctcagatcccccacatcaggtttatctgcctttcctatctctatgaagtgttttgtacttcatccaacacttaacacttaaaacttcttggttgatgtctcttttccttcctaggtggcagccttcttgagagt

SEQ ID NO: 47272 - DNA, 1162 bp, Bovine  19866881103525
  misc_feature (1)..(1): n is a, c, g, or t
naaaataaaaataatattttgtgatacgtgaaaattattgaagttcaattttagtgtcaactgtaaagttttgttgggacacaactacactcattcttgtacctatttttatagctgctctagtgctacaacaactgctcagttgtcacaacagagatcatatgcggcactttcactgcttcgcactgcagctcagagcacaaaaatcacagtgattcagtatacctcaacagagtttcaagagcttcataaattgctgtaatgtgacatttaaattttgttttaatacaagtatataccaatcatgtcaaaaccagaaaagaagagagagggggacttcaaatgacatgcttgtaaggcacaatgcactatagattattttatccaattaaatggcaatgcattgcatttattctacaatgactatatagctgtgctgaatgaataccatacaggttgacactaccaaactaagcagccttcaggatatttccaacgtaaaggaaagcaagagtaagaaaaaaaaaagaaaacttaaaatggaaggactcattatggtagagtttcttcacaaaaataaaaaatacaaatgggtttcttagtggtgtatttgttcaccaataaatgaaagccatttaacacagagttgattaaatcatatttgactgcagcaggcaaaggaatgtgaatggagaaaataaacttgttaaaactattagcctttcagcaagaaaagttgcttgaaagttgaggacatagggagtatcatcaatagtcaaagacaaggcaaataattttgagtacttttccttggtacttgatgaatccacagatgttagtgataatgctcagcgttgtttatttgaggagtcagacctgaatctgaagtgactgaagaattacagcctctgtgagaagtctatgtagaacgtgaaaatattttcaagaaaattgagaaaacactaattcagtacaacctgatatggaatctactaagatatgttacacaggatgggtggttaacatatgcacagaaccaaaagaggcttagttggacaaatttacaaagcttgtaaaaatgtaagcatatgtgaaaatttattacttttttttttttttttttttttttaaattttattttatttttaaactttacataatt

SEQ ID NO: 47273 - DNA, 1417 bp, Bovine  19866881123510
  misc_feature (1)..(1): n is a, c, g, or t
ngaaggaagaagtaagattgatgagaagtggtttttctttcagttagtaggagtttatttcattttggtaattacactatgttgattttttttttcttctcatattactttcaggtttgactttacacataaaaaacaatcaggtggtgcaggccagtttggaaaagtgataggtgtactggagcctctggacccagagaactacactaagttggagttttccgatgaaacgtttgggtcgaatgtaccaaagcagtttgtgcctgctgtggaaaaggtaaaaacaaacaaagcctttattgcattgaaaaaaataaaaaagtgtattagatatcaaatcatattgctgtcatgtattctgtggttcatttttgttccagtcctgcttctttatctgattaagctctccatctggtttagaatcattaagttcaagagctataaatataggctatgacaatgagaggaaatcattctgtctctgaatcatagttattacatttctcttgataagttgaaactacttgattgattataattagcaattgaaattttcagtagtcattaggggtttgtgaaagttttacatgtagtacccttgtagtagaatggtcatgcgttaagattcccaggacctgcgtgtgttgttatctctgctaatgattaatatgtccttgcataaatcacagtgttcagagccaatttcttttgtaaattgagcatacagtacttaatcccgaacccctcacaaaatcgaagattggataagactctgacatttctttgggaattgtgaggtgtttgcatatataaggggttatttgtgttttgctagctttctacatcactggctttaagactgttgtaaacctttagcaactgtctattcataaagattaaggttattttttaaaaacttttaacttagaggtctttagtaacagatcatgattttggttttagtattaattgtggtagcagtttttgtgatcatccattatacttaatttcaaaacagtattttgtcattcccacaaatgaatgtgtcattcacacaaatttaaattatcttttactctccaagattaacataggtgaaggaaagcttagatattttacagcattcagagtttacagttttgaagtgtcagaaatatattgtactacatgtgcaactgtgtaactagaattgtagcagctctgcaagtatttaatgaatgaaaaagaactgcacacatagcaaactgcactcttgaaatatgtctagtttattgtatatcagttatatctcagtaaagctgtgtcttaaaagaattgctttggaaaaatgaaattagtttttaattttagttctaacattgtgtagcacaaaaattattatgtagtggtctgccagtgagtcagagcagtaataggt

SEQ ID NO: 47274 - DNA, 1529 bp, Bovine  19866881127827
  misc_feature (1)..(1): n is a, c, g, or t
nattaactttattttaattttattcttgtctgccatagtgtgattgatgtgtggcatcatcttcttcctggaaggagatctaacatcaacactgacaagtgtcacaaggtttatttaggacaacctcagccttgtcccagttagtttcaagatgtctgcctcatacatgttgagccactgcatttcctgctttaaagccttgtgttatgccaacataactatctgtgctgcctcaactacaaattggatgaacagcccgtgacactttttcaatattattacattaaaccaagtggattttgattgataacctaatattcaactaatgcaaaacatcaatcatggcaagtatattaattatttaatattgcagtctaattcagaaatcgatgtgctgcatgaggggaagggaaactcatggttcccagaagatttaagacagggaatgattaaaaaaagacctgctgtactcctgtgtgttagttcgatacaaatctttattcatttgccaataatctcttcccattttccacttcaggaccattttatcagttttgaaacctataattgaattaagtctgctttcagcacagggcaaaaggagttgcacaaatattgatgaagtcatgacagggacaacccaagagacagaccactaaagaggacaggctttgtaccatttgttacaagatccttctgtcaatgtcttgaatcttacctctctatttaaaaaaaaattgttttagccttttggaaccactcttaaagacttttgtgttaaaatatctatcacaataacagatttatatagcatattacaatatatagtgtacgttcatatactttatcttgcttattttttcacagccaccctatgtgttaggtaaaacaagagttaaaaaatctgcacatcataggtgaaccatttgagcttcagagaagttggattattacccaagctcattcaactgttttgttgtagaacttagatttaagatattttacttctagaaccggtattatacatcatgctctctcatgtagtatttatgtactcatgatggtttattcagaaaacaaagatcgtggcatctggtcccatcacttcatgggaagtagatggggaaacagtggaaacagtgtcagactttatttttttgggctccaaaatcactgcagatggtgactgcagccatgaaattaaaaatgcttactccttggaagaaaagttatgaccaacctagatagcatattcaaaagcagagacattactttgccaacaaaggtccgtctagtcaaggctacggtttttccagtggtcatgtatggatgtgagagttgggctgtgaagaaagctgagcgccgaagaattgatgcttttaaactgtgatgttggagaagactcttgagagtcccttggactgcaaggagatccaaccagtccattgtaaaggagatcagccctgggatttctttggaaggaatgatgctaaagctaaactccagtacttggccacctcatgcaaaga

SEQ ID NO: 47275 - DNA, 755 bp, Bovine  19866881130948
  misc_feature (1)..(1): n is a, c, g, or t
naaacagtcgtataaaagccaaaatgcctattagttccatttacttttcattaagaaaagtcattccatcatttagccccagcatctatgattttacattttttggtctctgactctaagtaggtcaaagagtaatgatgaattcatcaagtttttgttattcatcaaaaatgtcattttttaaggccacagggctgaagtgctatatttcttaactgttaataaaagaatattgtgaatatatctatttgtgcccttggtgagaagtctgtgggatggattcctagaagtagaaatgctagagcagaggttttgcacgctgaacatcttggtggatgctgtgaagcctctgctgtaataactttctacccatttaggactttaccaataatatatgaatgtgtttgttttttttattaatagtgtcctcgctatgttggacactggcattgttttaattgttgccaatttgatagggataaatgatgagtgatcttattttaacttaaatcataaagtctcttctttaattggagaaaaagttagcagtaggtgctgtttaatgagcagtggttgttactggttctatgcttggctctctagatgggtggtgatgacccagaggtaagataatagactactggcataatgttaccatgattgcttaatttgtaattcctaatgaatactggaaaattagctttcctgagacattggtaatgactttttgcaaattatctttattttcttacttg

SEQ ID NO: 47276 - DNA, 1108 bp, Bovine  19866881192283
  misc_feature (1)..(1): n is a, c, g, or t
nttgctcatctgaattagcaacacattcaatcagctcctgccggtggtctgctgccgccgccctgaattctgctggaatttccccgtatcgaacaatctgactaagagaagaaatgttttattttggtactttaagaatattcaattaagttgtaactaactttactccaataaaaattaatttgaaaaaagaatattcaattaaacatataagttatcagtgaaaaagataaactaatggccaaaatgttttttgagataagagctctgatatttttgcattaaaatcacaaataagaaaaaaatgtatctgtaaaattcagacggaatagtggacaaaatatttaaaacaggcaaagcaaattgctcaaggttctactaccagtaaatgtatgagccacacacaattcaaagccaaactgactccaaagcccatgagtatagctgacccgtgaacaaaacaagtttgaactgtgcaggtccacttatacaaagatgttttcaataaacatgcaaaaatatgtgtattacattgtctgcaagacttgtactgaagtgtatcattatgtaggaataagtgatatttaatatgaaattaaaaatgtattagtttaattactgttttaaaactttgctttcaaagaattacatccatacagtatgcctctcacagaattagagaaactgcataccattacaggtaatttttttaagtcacaatatttccaatactgtattaggaatatgattataatatcatatgccataaacaattttataataactaggctaggctactactttacaccaattatactaggctaccataaagcaatacattgctgcttctttcttatcaatgcatgaactgttatacctgtaaataaatatgaatttcttttcacgttatcttttcatttttgatagtgtccagtcaacagtaggttactagtaggtaagttttgcggggagtcaacagttatactcgaacttttgactggatgagggatcgacacctctcatctctacaccgttcgagggtcaactgtactggaaaattctattagattaatcagaatatcacagtctttgacaagcaagatagaga

SEQ ID NO: 47277 - DNA, 1087 bp, Bovine  19866881205355
  misc_feature (1)..(1): n is a, c, g, or t
ncattagcattgagagtactatacagccaaatgaaatcaaaaagactttatgtattgatgactattatttatatactttaaaaatagttatcctgtggaaacggacatcaagtctgtctgccccactatcacgagcactgcgatcagaagaccgagcagggcttctgctacgtgctgtacagtcctccctgagccccacggtgtcagcagccacattaccatagcaatccaggggttccacagtgtgaaggccagcatgatgtgggaagcaagtgtggtcaccactgcacacaaaacccagatgatgttctttcctgttttatccaccagaagcccaaatattggggacatgggagctgatattacatatacgacactgcccagaaaatacaaaagatacttaataaaagatatcacagcaaaaaaaaaaaaaaaaatccaaaagtccttaattctaaaattcctagctcatttaacattcttctaaaatggtcatcagtaaatagaaatataaagatataaaagtgatccaagacttcgctggttttccatgaatgtaaagatggccattttcaggatcaagacccaagacagacttggtttcacactatagacgttagctcacataaatcttctctggctctaacacggggttataactaaagacccacactaagcacacagtaagcattcacagaattaatggaatacctgttaatagcactggctgcctgggaggaaaatccaaatttctctgtaaagaaaactctaaaatagagaggggggaaaaaaataaaccctttagagagaattattctgtttttgtaaaaataaaagcaaaataatactgaataaaatagtcaacttccccttctttctgaactgttttcccatcttatttgatattcatctttgagcaacgggctaaagctttagtatttatgtaagtacttgaccaactaaataaaatacactgatgcctaatttttcctcttttacatatacagaaaataatacacacaaattttcagaaacccaaatatattactatatgaaaccaagatggcttctttttcttaaaaataat

SEQ ID NO: 47278 - DNA, 1038 bp, Bovine  19866881238401
  misc_feature (1)..(1): n is a, c, g, or t
naaaatgagagtgctacataaaaccaatactgggttatttgttctagctaaatactagcacctttagctagaaatagcatgacctacaagctgactgccataacactgaataagtgataatcatcaaaatgactgagaattaaggaagaaaattaattcccaaaggtaatcactatagatctcattagctcaagaataacctaccttaggactttaattaaaaataatatttatcccagataaatgagtgctggcaggtttctgcaggatccataatcttggttatgctaaatcttcttatattaaggcagacatcattaatctcatttgcaatgccctccagtctgacagctcttatagcactggggctatttcttacaatatcctttttatcttcacaaaagagttataactcatgcagatacctagtgtaaaaaggtctaggcaattagagacatcactccgagatctacactggcattttatcatgtcagaaggcttctcataatgagtttgttcttaaatggaggccaatatctcaacactaccatcaaattaatggtggttatgttattattttatttatttatccctatcattctttgttccagagaagcatcaagtattttataattcaaaggatatgaccagataaagagaaattgtaacaagtcagtgaagaaactagggccaagaagaaaatgaaagtagagacagcaggaagttagaaggaatgaggttaatattgtaaacgcatgctgtaaagttctgcagaattacacacctgcaaacttgtcagctgatgttggcatatattcccaatctttggctcctcctgtggctcagcggtaaaaaatccacctacaatgtaagagctgctgaagacaggtttaatccctgggttgggaagatcccctggaggaggaagtggcaaccactccagaattcttgtctagagaatcccatggacaagagcctggtgggctacagtccatggggtcacaaacagttggacacaactaaagtgacttggcattc

SEQ ID NO: 47279 - DNA, 942 bp, Bovine  19866881306792
  misc_feature (1)..(1): n is a, c, g, or t
nacatacttgactatttttcttcaaaaatttgacttttcttcactgtcaacactgacactttcttaaaatataaaacttatataatggtgttgtgaagtgctatatccaattacacagacatctgtttccatttacaagctttaatacatacttagactgcatttaaagtcatgaaatattaaaacttttatgccactcggtatcattgcaagaatctattaaattagataataaaaacaaaccaccagtaactctaaagacttttacttcatttacactttattctccctggtagaaggacaaggataatagaaattccatttaaattcaattttggttatatgtgtaattgtagatataccccttgagtcatgtaaaatgctcagcttatgtttctttcaaattatcccgctcagattcacattctactccttacaaccatcttcaatatgtattagcagagctcattagactgaaatttaataatgcaaacatcaggtggatttcaagaacctccattaacaacgtaagatggattgcttatatatagctcttgggccaactgggcacaatttaaattcaataaactaccctgcctaaatctgatttatctatttcactaggctggtctgtcctttcttactgatttgttgggcaattcattggaatattgttttatatggttttctttaaactgcaaatggctgttgtgctgtggttaaatattttatgtaattgagcttcacattgtcaatcaagattcccaagtatgtgcttgtgtatataatttaaaaaaaaccaactttgaattatggaaaaatattaaaaacacatttgaaaaattttatcaataatcaatacaggtatgttctctacaaaggatatcaatgaattcacttgaataaaatttatttattcaaactgagtcattaagatcaaac

SEQ ID NO: 47280 - DNA, 1671 bp, Bovine  19866881338906
  misc_feature (1)..(1): n is a, c, g, or t
naataccagttttattttactttttttttttgagataattgtagacgcacatgcaattgtaagaaatgatacagacagatccttcagacccttcagccattatcccccagtagtaggaaagtgtattgtatttctgcagaataatatcataatcaggaaattgacactgatacaacccctcaatgcctagtttaagttttttagtttgccttggccagacagatgttgtagacactattggaggctctagctttgcattttcaagcaagtttctttcttcttcagtcagccaccctcttctgctttccccctccctctcctaggtagcctgtcattatggcactattctagctgtctttgtgcaggtgtgtgagctctagattcttggaattccaagcactgatgttccttagagcccctgtgaaataaggtcagagactatttcttcttctatcaatttgtagccatctcttggtttctactcctaataccagtgtaggtaacagcagggtatcagagctggcaggaataatagatacagtctgctgtccatcaaattcactaattaaggttacattcctttgttcttatttcagattctgtgtagtcacattttatatacatatgaaagtgtgtctgttatattacgaaaatctcaccttacacacaagtgaaatagcacaaatttcaaataaaaaatatcaagaattgtgtaatttcaaaactaacatgcagcttgagtgaaatagtcactgtgtttaccttttgcttcaccttttgctttagccctgcaaatggacgcacccatcacgctttgtcagaacaggaacttctgcaagtgatattggtggctgttgtgcctttatctgaaaaggcactgttataattgagtctctttttgtaattgtaaaataatgtcatacatgtatttattagtgtcttggacagatgctggtgctagctctgaaaatgtgcctgaaaaccagtaactagaaaggaagggagatgtgataaaactattgagacaagcgtgtactatgatactctgcttttaatttcagagagagcatttcctgaaatattatagataatgccaaggaaataaaaggctgcattaaagggaaatatgctactatggttgtagatttatgtgccagcatcttcatacattatatttattccaatgggaaaattagttgtgaattatgcaagttttgatttatgcgagatcttgactaatttatcccttacataaaatacatccccctatagtactgaatttactttgttcatgattcacatggtgtgtacatttaagatgggagtttgaaacttcttagtcctagtggaattgaatttcttatttttacaacttatgaaatttttaagtcagttgtttgaaattcaaggatacatttctcaaagaaacagtcattgcataggaactcacatttgttgattacctactatatttgtgttggtgctttacatattctttctattggtacttcaatagagccctttcaataactctgacattcaccaccctgaatttgtagaagaagcttccaagaatcagaggtgaagaaatgggtcctacaaagatgagaaggctaggattcaagtatacatatgtctgatgaatatttgatgtatatacaaaacctgtgt

SEQ ID NO: 47281 - DNA, 771 bp, Bovine  19866881370999
  misc_feature (1)..(1): n is a, c, g, or t
nttttttggtcatctcaaatcatttaaaatttttttcctaacaagacaagttattctctttaacttttaaatttcttctgtaaaacgactatgctgtgctgtgctcagttatgtctaactctttgtgaccccatggactgtagcctgccaggttcctctgtccatgggatttctcaggcaagaatactggagtgggttgccattcccttctccaggggattgtcccaacccagggatcgaacctgcaactcctgcactggcaagcagattctttaccattgcacacgtgggaagcccaaaattggggtaatgatagttgaaaagctgtaaatattagaagcattgtgtgtaagagactatctatgtattaaggttttactaaatcgtagttattttattttttattaatactatgaatttaactattgattcctgtgattaccagtttttcaactatcattcttttttcttacctttgtgtctttttaaagaaatattccctcagccttaaaaactctttctttaatgttgtccattccaatgatctttttgtctcattttagggatcacatcctttataaagtatttcttgcctctcatgaggtgctaaatagatatgcagttagcacccacagtatctatacctaatctgaacagagacctttgtaactataaaattttgtaattgccagattatatatatcttatttattgcatttatatttacttggattataacaagtactgaaatatttgtagaatgtataaata

SEQ ID NO: 47282 - DNA, 1310 bp, Bovine  19866881579430
  misc_feature (1)..(1): n is a, c, g, or t
ngggttttaaatatatttaatttaccaggaggactcagtagtcttcataattaagtttattgagtatatgcaccatattttgtgatcattaagcttggaataaatgaagcttaattgctgctgccaaggaaataggaagagcttttttacataaacagtaacacagatggattttcatatgtcaaataatttaagagattttaaatgtgtatggccttctcccagggacgggagagcctggtgggctgccatctatggggtcacacagagttggacacgactgaagcgacttagcagcagcagcagcatggcactctccacatccccattctggttactaaggtaatgtaatatttcacacaatgacttaactcttgcactgcatgaagaatagatcttaaacttgatatttttgaactgtctgttttgacatacaatctataaatgggaaacttggaatatactcaataaatgatccaaaaatatatttatattggaatttctggtgattggtacccaattttgatatttcagtgtatgattagcaatgtgtctcaatgccatttaattcagattatcaacttgagcaaataaatgaagtcacctgattctctttaagatagcttttgaatctcccactttgacctcaactatagttagattgcttttattcaagtaaaatctttttaaattttctaccaagaaaataagcaccaattttagaaatttatcaattatttaattccataggcctaggaattaaaataaaccattcttcatcaaagtaaacattttagtggaactgaaaggggctgtaagctcctttcaaaagccaaggaataagtaccatattccttacatgaatggagcccactggcaaatgctatcaagtatggaaagagtctgttgaaggattctggcaggttggaagacttaatctgccttcaaccattcctcccactgtgaaaaatcttctaatatgactggctcttagtgaagggataaacagaaattttcaccttagttgctctttatctctaataacctgagaaatctaaccagcatctctgccaaataatgccaagtagacttgctttcatcataaagtatgactgatttccccacatttctcctgatgcagctcaacaaaatgaatgtgtggtagttaacgtaggcctatctgtaacatctgcatcaaaagtactaagaaacataacacagccaataacaagtgtgctttcaaaaataaaaacataagaattacagatgtaaatttcactttccttgtcaatgaatatatcctgcagctg

SEQ ID NO: 47283 - DNA, 715 bp, Bovine  19866881822619
  misc_feature (1)..(1): n is a, c, g, or t
nactgttttaaagtagatctatttatttttagttgtgatttggagccagaaatccacacaaagtcaaagtattttaaggaagtgcattaaaccaagggaagtgccaatcggaggacacagcacaggttttcctgagtgaagctggacacggttttggcttctgacctgcacatctctccacaaggttgagcaaaacatggagcaaacatcatttcaatttgagaaaagaaaacatcctgaatattttatgacttcagatctgaactcggagcagccacaactggaacactgctcctggatgtagagggagaagcccagcaggtcacaggcttacagccacactgggctctgctcagccccacagcacaggccacacagccctatgtatacaggagccactgcccaggcctagagagctagaggggacaacgtattctcatctaagtagaccctcaacttcagatttctttactgaaaggtaaaggttatacaatattatataaacttctggtgtggaaaaagccactctgaatgtgcaataaaatctcactgagaataaaagtaaaataactttaccttgggacttatccacaatccataactgctttctgttggattctaaaactctgtttgaattttacatataactgaatccattgctttaagcaaacccaatacataaacatcctgattagggagtgagaatttgctttat

SEQ ID NO: 47284 - DNA, 746 bp, Bovine  19866881837676
  misc_feature (1)..(1): n is a, c, g, or t
nctctgttgtctgtctgaggacttaatcaactgttacttaagcacctactatgtgcccagaaaatgccaggcactttccaatagcatcaacagaagtctgtctgctgtacaggtcaactcactcagtctttcagagggaaaagcggttcctgctgctctcaccagttacccctcctggccattttaatgacccgcagtctggatgcctgatcccagacacagccatcagggcacaaatctgccatagcaccaggtaaccacagaaccacgtcctggatctccaaaagcatcaaccagaggtgcagtgtctccagttcaagagaactgtctggggccagaatcgggaacatatttgctcgacacaaaaagaagagcccatggtgtacatgtgtgctcatctgccatgttagggcttttttcatatattgaaacttcctgggatagatgaaagactcaggcagataacagctttgattgatgaaacaaactgcaagtggatgacttctacttccatatgggataaggtcaagagataattttttttaggttgcaaatagtaacaaaccaggttcagctccttctgatctatatatttttgaaaaatgaaaagtattattcacatttccagtgattaccacaagtaaaagttcctgatctatctgattacagctattattcttttcctttgagcacaaacatatctgtctttgtcagaagcagtttgctggttcaacctgagctcgttt

SEQ ID NO: 47285 - DNA, 881 bp, Bovine  19866881867935
  misc_feature (1)..(1): n is a, c, g, or t
nttggtgggagggataaaatgggagattgggatggacagatatacactgtggtggtttagtcgctcagttgtgtctaactcttgcaactccatggactataaaccacgtcactcctctgtccatgggattttccaagcaagaataatggagtgggttgctatttccttctccaatatacacactactatatatataacatagataattaataagggctactgtacagcacagggaactctactaaatactctgtgaagtgaagtgaagtcgctcagttgtgtccgactttttacaaccccaaggactatagcctaccaggctccttagtccacggaattttccaggcaagagtactaatactctgtaatggcctatataagaaaagaatctaaaaaataatggaaatatgtataacaatcactttgccatacagcataaactaacataatgttgtaaattgactctactccaataaaaaaggttttaagaaaacacatagtctctgagagctcacctaaattcaactagagggaacaggtggactccagaagtcccaacatcaaatccttcactacttaagagggaggtggcttgggcggaccacctaagctcctgtgaaatggggataaaaagatctaccttacagggcagtcatgaaaactgaatgatatatctgtatgtgaaacgcatggagcttggtaggcatttatttaataaatagaaagtgcccttaagatgtagactcttgtctttgcgactgtgcatcatcagaaaatgagaggaatggagttgtcttttgcagccttgaatttggctgccctgagatttacaacatctgtggaagcaataaatcatcagctcgaaggtgggccaggttaca

SEQ ID NO: 47286 - DNA, 1555 bp, Bovine  19866881023888
  misc_feature (1)..(1): n is a, c, g, or t
natgctgggaaagattgaaggcaggaggagaaggggacgacagaggatgagatggttggatggcatcaccaactcgatgaacatgagtttaagcaagctctggcagttgctgatggacagggaaccctcgtatgctgcagtccatgaggttgcaaagagtaaggcacgactgagtgactgagctgaactgtactgaaagataaaaggattccaactccaaaaatgatccttttaattactaacagtatgttgtgctgctcactcctgcttctgtgcagcttccatattctctgtcctctatcacagtgatgacttcagctgcctggaagttccagctgtctataagccctcatcaagctggatggattccctgaagactctgcagccccacagctgagttccaagcctcatccatttcatagatccaggaccctgctattcaaagtgtggcacttggacaagcagtgtcacctgggagcttgttagaaatgcagactctcaccccatacctactgagtaagaactgacattttaaaaagtttcccaggtgatttctatgaatattaaaaacagtgatctgagaattgaatcacagtggatacagattatcttaattgcttggatatttttcagtgtgataatctcctttctgcattagccatagtgtttttgatacctgtgagcaaactccaccatgaagcttatcacactctcctttcccagctttatttaatagcagtgtcttcactgacacagagttagagaatttgggaaccagtaaatgatttcactttggggtagtcctctgttccatgccaaatagaaggtcctgctcaacttctactctggaagtcaggaccactgattgaccaagcctttacagctcatgggataagggatgtttttctttgttttctggaaatgagccttcctgtttattttttcctttccacattagacttaaacatagcacaactgcatgtgtgacaattgtccacctctgcaaccagacattctgaagatgtcagcttctgtgcacttgaagaaaacccttcttatttgtttctaagaagccatttctgtcttatttctcaaagcagacagaattagagaaaggaattcattcatttaaggtagtaatagaggggcagtgggtctttaaattctggcaaaagagagatttcaaatacctgtttgctataatgcaaaagagggtaaaaataggggggcaaactgttcctactgctgccaatcaatttcaatatatcacttttaatcttttgagaaattctatgatttagaggttctgtcaatggtcagcagaacaggtgagaacaggtgagcttcccagatcccactctccatcactctccatcactcctcatcagaccctatcagaggacttggagctgggatgctggcccatgatgactcaggagcatgaacgtcagctcccagggctgctgagactagtgctcacatggcacatctggagaaggctagaaaccctgggagagggaattctgcataaaaatgacttggctctcagtgctcc

SEQ ID NO: 47287 - DNA, 970 bp, Bovine  19866881805891
  misc_feature (1)..(1): n is a, c, g, or t
ntaatgtttccaactgaagctccctatatcattctatgttgataaattcttgagatcagcttggattttggatttcttttagtctcaagtatttttaagatctaatttaattattcaggaatgtactttattctccaaatattttttatcttatttccatgttgaaactggaatgcttggtcatctccctttaaaaaacagtttcatactataatttgtgtgtattttggaatgtgactttcttccatgagaatttgaaaataaatgccctgagccatttacatgaatatgagacactggaagataaaattaatgcatttgtatctcaggactcttgctataaccccaaatatactactagccaaaagttgtattttcaagtttcagtgcaactctttttggcaagagatttcatttaagtctttcttttttccctctgaaagcttttctgatgtaagatttaagattaaggtgaatcaatggccttcactgctttttattttcttcccaaccatgagcatccacacaggagaataagaggtgaacttgaagaagccagcctgcagcctttccattcttctcacttcccctgcttttctcttcctttgccctcgttcagctttcgagatgaaagtaggctatgagaaaggatggtggattgttcctggatgaagtggagccaagtgacaacacagcccataaaacaatgatgcagtcctctatttttgctacagtcaaattgcttttcaagatttttgtgttataaaaatgcatggatttttagaaactatactgattatataacctaatcctcattccaaccctgaaagccagatgtagggcaaacaactatctagcttttcttgtttttctgcttcatcccataaaataagaacttttgacctctcagaattctcagaaggggtgagaaaatagcttattttttttcctatctctcactgctttctct

SEQ ID NO: 47288 - DNA, 901 bp, Bovine  19866880067302
  misc_feature (1)..(1): n is a, c, g, or t
ngctgctgtagtctgaagggaagacagaatttgctgctctgttggtttgtgacacgtactttttctttaggagaacttattttcattttgctggatctcacattttagagagctctttttggttaagctgattccgagcaatgtttctgagctggactaaccacagagtaggatcttatctcacttatggctatgaatcttcagttcagtcagttcagtcgctcagtcgtgtccgactccctgcgaccccatgaatcgcagcacgccaggcctccctgtccgtcaccaactcccggagttcactcagactcacgtccattgagtcagtgatgccatccagccatctcatcctctgtcatccccttctcctctggccccaatccctcccagcatcagagtcttttccaatgagtcaactcttcgcatgaggtggccaaagtgctggagtttcagctttagcatcattccttctaaagaaatcccagggctgatctcctttaggatggactggttggatctccttgcagtccaagggactctcaagagtcttctccagcaccacagttcaaaagcataaattctttggtgctcaaccttcttcacagtccaactctcacatccatacatgaccactggaaaaaccatagccttgactagatggacctttgttggcaaagaaacgtctctgcttttgaatacgctatctaggttggtcataactccttccaaggagtaagcatctttaaatttcatggctgcagccaccatttgcagtgattttggctgtgaatcatattaatccatttatcttagctgtcatgcaatttgctaattaagtcattgtaggggttaggggaagtgaaagactttgaagtaccagcagttaatgctcttgcccagt

SEQ ID NO: 47289 - DNA, 2516 bp, Bovine  19866880125207
  misc_feature (1)..(1): n is a, c, g, or t
ngaaagttatgaccaaccttagatagcatattcaaaagcagagacattcctttgccaacaaaggtccgtctagtcaaggctatggtttttccagtggtcgtgtatggatgtgagagttagactgtgaagaaagctgagcaccaaagaattgatgcttttgaagtgtcgtgttggagcagactcttgagagtcccttggactgcaaggagatccaaccagtccatcctaaaggagatcagtcctgggtgttcattgtaaggactaatgctaaagctgaaactccaatactttggccacctgatgtgaagagttgactcactggaaaagaccctgatgctgggagggactgggggcaggagaagaaggggatgacagaggatgagatggctggatggcatcactgactcaatggacatgagtttgagtgaactccagtagttggtgatggacagggaggcctggtgtgcgtgattcatggggttgcaaagcattggacacaaccgagcgactgaattgaactgatgtaatgtttattccatgtgaaaaattacgagtgggaaaaggacctacttttctgatcctggtcctttctacttgaggtcatcactgttctctgattattctttcagtgataagttttgtgtaaggcaaccatatacgtatatctcctcccccaccccactgctttagcatttaacaaatggtagcatgctgttatatactttggagactggcctcagcgtagttattcacttaataatgtgttgtttcatgttagaaaatacagatgtatcttatttttaaatacgtatatagaaaatgtgcttgtaagtaattggctatggtgtattgacattataacatgatgatatcttgagtcttagagctgggttcaaatcctggctttgccatttataaactgtgtcactttgggcaaggtacataatttgtctgtttcagttgttcatttatgaaatcaaaagttagtatctcttcacaaggtttttgcaaggattagaagagaaaatgtatgtaaagcatttagcacaatgtcttgcttaatattaataaatcatagctgttattatgctcctgaatttatcagatcaagtgaaccgctaatgtgcttctccttcctcaactaaagtagaatacacaggaagcattacatgtttcttgacctcttaacttacgttggttgtcctttttcttccagtctattactgtttatgttctctcccgctcccttccccaccctctccccagtcaataatgcgtatttcttttacttgtgaggtttcttactgatcagtggtgtcctcctttcaaattgttgcttttcagttgctgagttgtgctgactctttgtgaccccatggactgcagcatgccaggcttccccatccttcactctctcctggaatttgctcaactcatgtccattgagtcggggattgccatatgactgtctcatcctctgttgccccttctcctgccttcagtctttcacagcgtcaggtcttttcctgagttgactctcggccttggtggccagaggcaggtgctgtcgtttgtgctttagtataaacctcagcagagaaggcgtgtttctgttgatgatactctggagtgaatttaatattggcaattgcatttagtcatgtcactagacaggatgattcttcttgtgactgggatttcaaccgggatagaactgagatttggatacagatggcagttgacagggttaagtgtgggcctgagaatctacagaggcacttcaactgtgggcctgtctggaggtggccctaggaggccaaaccatgatgggggaagtgtgtgtgtgcattgctgggggtatgcagtgatacattgttcactaaaaactatcaggagaagtcagaggcagtgggttctcatggggaatagtatgcagggtatggtgtgtttttataaaaaagaaaaaaattggtgcatataaaccagatgagcttccttactgagctcttctaatgttctgctccagagtacgagctgtctagctgtgggaagcccccagccttttccacaggggaagcatgagtctcacttgacagagcatgccaagctgtcacacttggaggactgaggattggtgcacccaggaatgcttgtggacctttttaagggggttgagtgcctggaagagtgtctgggggcttagctgcccagtttaaagtattaattcacatcagtgtgatttcatctgttcccactgactcgggtggcctaaacaagccggcttatatttgagaggtttcttttatcctctcttcaaggttgtgctttctggcttcttggctttgataggttttcattacctgaatgatacatatgtgcactgtttgataatcttaatgtttttgtccccattgagtttctatcatatgttgtggtcatgagtcaggatctgttatctactcccagggtatctggtgatggtctgcatgtccttggtctgtgtattgccaactcaa

SEQ ID NO: 47290 - DNA, 1910 bp, Bovine  19866880142724
  misc_feature (1)..(1): n is a, c, g, or t
naactaaaaagtctcttgatgaaaatgaaagtggagagtgaaaaagttggcttaagctcaacattcagaaaacgaagattatgacatctggtcccatcacttcatgggaaatagatggggaaacagtgggaacagtgtcagactttatttttctgggctccaaaaccactgcagatggtgactgcagccatgaaattaaaagatgcttcctacttggaaggaaagttatgaccaacctagatagcatattgaaaagcagagacattactttgccaacaaaggtccgtctagtcaaggctatggtttttcctgtggtcatgtatggatgtgagagttggactgtgaagaaagctgagtgccgaagaattgatgcttgtgaactgtggtgttggagaagactcttgagagtcccttggactgcaaggagatccaaccagtccattctaaaggagatcagtccttgggtgttctttggaaggactgatgctaaagctgaaactccagtactttggccacctcatgtgaagagttgactcattggataagactctgatgctgggagggattgggggcaagaggagaaggggacaacagaggatgagatggctggatggtatcactgacttgatggacatgagcctgagtgaactccgggagttggtgatggacaaggaggcctggtgtactgcgattcacgggggtcgcaaagaatcgggcatgactgagcgactgaactgagctgaaatagcatcagtttatgtatacttcttcagtattttaaaatatttgtgaagagcttgtctacttaattgtgatttagttttccaggtagggcatgtttctaggttggtttttcaaagaaagtttttgccaagtgtcaatgccatgcttttcccttatccattgacatttctgaagtctttgtattctccatttaattcctaattatttgaggattctctgagcagtttgcttgaagtctgtttttccctcttagccactgacagcaaaacgcatctgcctgagcgaggcccctttgatcttcagagagcttcatctaaagggagattaaaaagaagtctgccaggcattatcccaaggaaatggaaagtgcttcccaagatttcagatcaggtgaagcttctctgaattaggacataggaaagtaatgtgctgatcaatggcttagtcattggttagagatttcagagaattgcttgacttggtatgagagaatatttttaatgttatcctaggctcagaatttatgccataatattgatggccagaagcaacgtctttccattaattttcctgtatttaacactcctcatgtccatgaggacagagaccagcaagattcaatggttttcagccttgttggggcctggtgtcattggaagaatttgcaactgggcttttctgagttgagttgaaaaatttcagaaacttatatgccaaccccctttcctcattttaaacaaatatacagagagtgcttattttttgtcagattctaggtttgtactgtttaccaggagcaaatctaacaggtataggatctgacaggcaatgggcttcagagtcaaagtactgtcctcaaaacactgtatataactaagatgtcttgtagggcctcagttttagtaaagaaatataaagcctgtaatcaaacaaagtttcattttaagactattaatttagccttttaaaaagttagagctgggggtggctaatgagctgctgatttgtaacataaaatatgtctgtgaaaaaagtcttctttgaggctctctttctgtcagtaagaaaaccttggggagaaagctgtaactgtgtacagtggaaactttttattgagtttggggttggaaaggagaggaaactataaagtctaggaaggattacag

SEQ ID NO: 47291 - DNA, 1207 bp, Bovine  19866880513198
  misc_feature (1)..(1): n is a, c, g, or t
naacgtgaacattctcatatcactatctcatctcttttaaactttctcactgcattaatgacctcctaggtttcaattagtcttgccctttttttcttccagccgtttaaataaataagcatctcacattttaaagaaatttattcctccaaacttcaggtcttcattgataaattgcagcactaattcattttagagaacctaaaattttgagtatgaaccactttcaggctagagtaaatatatcatgtgtaagatggcagcacctaaggagaaatattatattgcatcttagttatcttcgacattgtaaacaccacagcaaaagcaaaatgaagagaattaggttctaagagctaagacataaggagttatagaatccccagatagaagacacagaagcttggtaaagggcagaaaagatgtgacaaaatacaaatcaaaaactcacggcagaacaattctgaagatgtagtttaacctccaacttttacaggagagaaaaaaatcaactcagatgctaacaaacctgctaatataacaagttagttagaggatgaaataaaaaccaggtctactaacccttatcccaatgccttttgcattcaccatatccttttttctaggaaagctttataaaatgttctcattcccacagtacccacaggagaccctggggacagggagcctgcagccagatcaaggcaaggagtgtgtcttcagagcggcctgtcagggggtcagagcacctcaaggccagaagagcaaaggagcaaacgagcgcttcctgaagcactgctcctgacatctctaaccctgtctgtacttggatatgggttagtaacaatgtgtttctccagagcaggtctcaggtatgggatcaataactggtgggtggtatttatcaaactatgagacacttttctatttcagggaatcattaaaaaaacacaagactaatttctatgcactgctacaaaagaatgacatgagaggccatcgctgcagttccatgtggcaaaataaggcacaaatgtttatattagagattattattttattttttaaataaattttttattttaaacattttatttaattaatttaaaatacatttaaatttaattaaaataattaattttaaaaattaatattttaaaataaaaaaataaaagttctgttttattaaaagatttatgaactgagg

SEQ ID NO: 47292 - DNA, 3686 bp, Bovine  19866880520887
  misc_feature (1)..(1): n is a, c, g, or t
nataaaagaaaaggggctttgttagaagtcagaaggcagcctgagggcacccgaggtccctgtccctgtcttccctatcacccatggcagttccaaatacatctctttgcaacaagatggtctatgaagcacagtccgtaaactttcattttatatcatcttacaactatgaaatagctgggttttaagaaagttctattgagatatgtcatttatcataattttagctgtttaaagggcataatttaatggattttagtaaattctatgagttgtatcactatgacaatccaattttagaatatttcatcatcccaagagaaacttcaattctattagcaattcccattccccatctcactcctatccctaggcaattattatctttctctgtatatagatttgcctgttctgcaccttttatatagatagaatcaaacaaaatgtgttctttgtgtctgtcttcttcacttagtataatgttttcaagattctttcatgttacagaatgcagcagtatttccttcctttttattgctaagtaatattcaagggtatggatatagcacattttatttactaaccagctgatggacatttggattgattccactttggggctattatgaataacactgctaggaacacctgtgcacacattgttgaatggatgtatattttcatttttcttgcatacatatctaggagtacaactgctggcttgcatgataagtgtatctttgacattttgaagaactgccaaactattttccaaagtgacattcccatgagtgatccacaagagtgtttttcttttgtttcttacgctttcagtataatatctaagaaactaatgcataaatggctgaagatttactcctgttttcgtctaagagttttatagtgttagccatagaagagaaaaacagagttattttggtacaggtgtgaggtagggatccaaaacattctttacatgtggatatacagctgtctcagcacaattttctgaaactatttttttctccattcagttgccttagaattttggttaaaaatcaattgactttaagtgtaaaggtttatttctgcagtttcaattctactctattgatcaacatgtctttctttatgccaataccacactgtcttgatcgctgtagctttggagtgtctgaaattgggaagtgcaaatcctcccattttactttctttttcaatattatttggttattttggatcctttgtatttctatatgactttaggatcagcctatgaattctgcaacagacagaaagattcagctggatttttatatgaattgtgtttaatctgtagatttggggaataatgtcactttaataatattaagttttctgatctataaacatgtcatgcctttccatttacttagatgttctttactttcttttaacaatattaaaaaaaaaacacacaatgttttatagtttttggtatactagtcttgcacatctctttattcttaagtatttcacccttttaatgctatcataaaatgtagttgttttctttaatccatttgtggattattcactgctgtatactgtgtttgacaagattcaatcattgcaggcaaaaaatgaatatactaaaatattatgaataccataagccaaataatccaactgttccaaatacaattgctggaatttcttgaattttaattaatattttcttactccctatttttccctagagctgataaattcttcagacaccttgtaattatgtataatttaaatatttcgtgttaatattcacttgccatttgcagaggaggacaagattgcagcaagcatgccactatctccctgtaattttaattaaaagaaatccaaaacattggctgatacaatggcatcattatctagtccactgtactgaacataatacataatattaatgataatatcatctatttaggtaactccaattctaaaaagaagaaaatatttcacaaacattcattcattaatcctcacaatattgcaatgatttggtagaatcaggattaacatcttcatctcagttttatagccaagaaaagtgtgttacagaacaaataaacaatttgtctagtctctcagaaaagcagaagctggacatgatttctaccaaaaagtcctttcatttgtcaaaaaatataggtatatataagctcatgcaaaatatgtagtcctgaaaatgcatgtgaatccaaattttgcatatataatcagactttaaatacattagatactattaaaataaatcatcttgtgacacattttgttaacaatttttatgaaaacaatgaatgttaaaattctgaaccagcaacctccaattaacaatccttgtatatacatgagttttcatttcatagctttgttttaatggcagtgacttaataaaaccatgattttaacattaataggttaattcattgtaagcaaatgacaatgagcttacatataaatggaatttttattcaaggtttttctatcactagaaatctaactgtataaaaacatatgaaatcataaaaaaaaaatacctctctggtctaggagggcaaaacaacaaccaagaattagttaaaatggctactgaatgcttgaaatttccaaacgtttgtgaatcaaaaggaaatcaaaatatgaaccttggagaacatcaaaagtaagaaatacttctcaaacataatgtattacttttgagaacctgtacatagtttataattacaaaaagttcaaaggactgttctagttcaacaaaaataaagattatgataattatggaccagtattatttaattcagtaggaagattagagaacaaagtaataaatcattttatcatcaataagagaagtacacatactggatcaattgaaatggtcaagaaaaaacaaattattccagaacaatttgcaataacacttcgtctatttagaattctgttacatgaacacatgtttccagagtacatctaagaacacaaaataaacaaaaatatgtttctaggtcaccaaaatagatgccaaaaagtccacacattaaaagcattttatgcacaggccagtcccttaggctgtcactcaggatttaattgttataatttcaaacaatcctaatcaggttttctccccatctgctagatatagaaaattggaaatagcaaaatagagaaaggaagaaaaagtggccaaagctaacatccaagttaagtgattgaagtaatctcctctagggaatctagtccaacaggaattctctaaagatattaatgtcaaagtgaccaaagaagagctcgagcagatcatcctgcaatgaaactccaagttaaaatgccccacccacatgcttagcactttccatccactttccagcctgctattcggcattataatcacatatataggattaatagtcatcgaaggaaagacttccaagaagtcagaaatcaaaacaattacaaagaaaagcaaccattagaatgtaaagactatgcagaaagaagaaaactcaaaaaaatatatcattaaaattctcagagatatggaacaaatattgcatctaaccaataagaacaggacactattaaaagaaccaacacacacacacagacacttaaaacttaatagcataagaggaataaaggga

SEQ ID NO: 47293 - DNA, 1395 bp, Bovine  19866880589899
  misc_feature (1)..(1): n is a, c, g, or t
nttccatagtgtatgtgtgtaactagctagatactaagccacattcaaatgcataaattattccctgggaattaataaggcacttaagaaacttgtattaactctttcaggccacaggggtatcattcagtgaactgaattcttcatttactaaaatggtacccgagtggttcagaagcacattaactacctctgagggcatggggagaaaaaacctataaagctatttaggaatataaaccaaattcagaatacaattaaaaacaagctacagggagatactgctctagtgatgggccctgggccctcaagaatttggcagaaatgaaactaaagggaagttgtaaatatctaggtcttttggacagaaaaccaccttggacagagtatcttggctacacttgactgtagtcattagagaacaggagaaagtaaaagttgacttgctcctgtttcagcaggtcctttcggcagcgagagcaggagagcagcggctctagggagagtcgccagccatccaaccagcaccactatctctccattctctcccacagcctcctcacttgggggctctaacctgtcacagtctgtctgccagcaacagtcctccttgtcactgtcttcacagtaacagcagatcagtattcacaagtctccagcagacttaaagttcactgtatatcttacatgtttgttgctgttcagttgctcagtcgtgtccgcgtctgactctttgtgaccctatggactgtagccagccaggcttctctgtctatgggattcttcaggcaaaaatactgaagtgagttgccgtttcctactccagggggtcttcctgacccagggatgcaatctgcatctcttacatctcctgcattggcaggcagattttttgccactaacaccgccttggaagaagtggtacaaaaaactttgtagaattaagggaatatcaaatgagatatttttaggaactttgtcttttaaaatagtgattctaagaaatgtcacttttatctgtttcagctgatgacctactttctatttacatgtcaaatgttgacatcagaatatctttgtgattctgtttgtgtaagaataaatgaattcagttaaataacacagtggtttttacatatttagaccccatgtccaggtggtgctagtggtaaagaacctgcctgccaacacaggagatgtaagagatgtggactcaatccctgggtcgggaagagtctctggaggagggcgtgggaacccactgcagtgttcttgcttggagaatccccatggacagaggagcctggcaggctacagtctatggggtcacacagaatcggacacaactgaagcgacttagcacgcaggcactcattcccctcagagaaatgcagt

SEQ ID NO: 47294 - DNA, 673 bp, Bovine  19866880596928
  misc_feature (1)..(1): n is a, c, g, or t
ntggagaaggaaaaaagagggcacacagttgtcaagctccgttttactggtttccagagaaagggtggttgagttcacagaagtccatgatttttagagccagaggttatgacttctatttcttagctctctcatgatgtctatgtgtgcatttgatcatgaatcatcaccttcccagaaacacattttatgacatctaaagttagatttattgtccttgctgatattattccgagtataatcagtcaacctcacagattttactacctgagtcaaggaagaacgcagatgggtacacaccactcttgcaactttaccctgtaactgtatcacacggggagagcacggactacttgccagagtgatgcttcagaaaagacacgtgtgtggttagattgagagctgaaatctggtgggttataacatattagcatcactttccaatttaatgtaatttaacttttcatggcattcaaaacagtcaatcctaaagaaaatcaactctgaatattcattggaaggactgatgctaaagttgaagctccaaaactttggccacccgatgcaaagaactgactcattggaaaagaccttgatgcagggaaagattgaaggtgggaggagaaggggacggcagaggatgagatggctggatggcatcaccgactcgatg

SEQ ID NO: 47295 - DNA, 1362 bp, Bovine  19866880691727
  misc_feature (1)..(1): n is a, c, g, or t
nttgcttttaaaactaaaagtaacttgctcctctatctgcctgtaaacaatcgccagggacactctttccaatgcctacttaggatgcaggtgagattttaaaaatcaattccctttaatggagggaaacattgctgtctctctaatgtcaagcctgctttcttgtcacaaacacatcatgtctgtaaagactgaaaggtgcattctccagaatgccactcagagacctattcttgatctatttatcatggagacaggcaattacagtttgattagcatgtataaatggcatttctttccaatatatctagcaaagtggggaagcaaaaaccgtttggtatcatttacacccctacaggggcttcccaggtgtcgtgagtggtaaagaacccacctgccaatgcaggagaggtgggttcgatccctgggtcaggaagatcccctggaggagggcatggcaacccactccaatattgttgcctggagaatcccatggacagaggagcctggtgggctacagtccatggggttgcaaagagctgttgactgacgtgacttagcacgcatgtgcacccctccagactccacagtagattgagcaaggggaagagctgggttggtcatagaacatttactagaaaagtggaacccagaagatctggtggccctgtggtcactgccgaatctgccgtcatgagctgtgaccttcccagctcccaacaacaccggagaacccagtttaatgttcaccacttcccaccttttaaagtttttgaaggattaaaggtttatatatatatatatatatttttttttaatttgatttgcaattgtggagcagattcaatgacaaagaataaactaagaaataattgcgctgcaatggataaaaccaagcctcagatcaagtattttagaaaactcttaccaagacaaagacttactgcctcaaaggaaaacacgtagagggaacagttgggcctcaaaacttgccagtaaggctacaggaaattgatttcctagaagtaagaagtatctacagttgagctgctgcttccgatttcactgtttgcatgtactgtccatcttaatatccaaaagcattaactctgttcttcatgctgatcggaggtaatggagttggggaagcatgcctctaaatccactttttaaaaagaaagtctctgtcaactcagtggctgtcatattttgcctgcggtagcacaaagattctcacaaactgggttctggcactggactggaatcgtctctggaaatgctgtctccgaccccaggactctttgctgtgaagtgggagctccctgttctgtctccctcggatgctgggagggccaagcacaa

SEQ ID NO: 47296 - DNA, 1960 bp, Bovine  19866880763431
  misc_feature (1)..(1): n is a, c, g, or t
ncagaagaagaccagttagaatggccagccctctagggctttggcttccacttggttctcccggcagtgggcagaataagaattctccatttcaggaaagatgaaaccccgaggagctactggcggtctttggttgtcagcagcgatcagaaacactgagggggacaggctcctgggaggcggctcccagacccgggctgatgcatgtggtgcgtgggttttgggggctgggcagtggcaatatggtcaagtgtgcttcccccgacaccagcctgtgccacacggagcatctgctgtcagagaagtgacatcgttgtatcaattccagaagcaccaggtttgtcactgaggcaaacagcccagggtgtgcctgctcaagaccaggaatggaaagcgagggcctgtgttcccttggggtgccatggagacaggtccaaacaactgtatcactaaggagtgggcagccatttgagttcccaggcctgactggagtggagggaatccaacctgaaccaggcacacattgcccatgtcccatggcgcttagagctggtacatttatacaccacatgaagtaacaggaaacactagtaatttgccctcaagactgctaagagtgttttgggggcttctcaggtggttcggtggcaaagaatccacctgccaacgtaggagacaaaagacactcaggttcgatccctgggtaggaagatcccctggagaaggagatggcaacccaccccaggattcttgcccaggaaatcccatggacagaggagcctcgcaggctacatacagcccatggggtcatgaaagagtcagacgcgacttagcgactgaacagcagcagcagcaagagtggttatggacgcaaagagaggcgctccaagtttcccaaaatttccataacgttcatcacagcgttcaacgtgggcttccccaacggtctagtagttaagaagctgcctgccaatgcaggggacacgggtcgatccctggtcggggaggagcccgcgtgctacagagcagccacgcctgagcctgagcgccgcaacgcggaggccctcggccctacagcctgcgctctgcagcaggggacgccgccgaaacgagaagcccgcacaccgcgacgaagggtggcccctctccctgcaactagagaaaagcccacggcaacggagccccagcacagccaaagcgaagtaaataaaccttaaaaacactttcactgtaactcatcctttttgttttcataaaaaaatttaaatatatacttagttctcaataagtattttgacctttgacactttttaacacacagccagatggtaatataaacaccgatctgtattgacactttatcaaacagtccagacacgaccaagcgactaccattatgatgaaaactcggtcaaggcttcaggaaaataagaactttgcccatgagaggagagtataaatctgggtctgtggttttactattgcagatgttaaagcaacatttgactggtttcgattgttattcgattacactttttttttaaattgggagtgcagaaaaatgcagaacattagtttttaaacccttaaaaataaaaatgaaacatttaaaatattccctattttaattaaacagctttttaatgggtaggttctgaggtttagtgctctgaggataatctggatatcaagccttcctgtgtaacagcaagttcaaggcagacaacttgtaaattgatgaacttcccttacttgtacaattacaagaactaaaattgcttttaagttgtcggccgtaaaggagttcctgggtactcagtaaatgttaaggcagcggaatgacgtgtttacttagtcaagatgtaaacacttgctgctcactggttgccccgggtgcgagaagaacattttaaaggcaactgaacaagaatttgggaaacctatttctcaaaatttcaaa

SEQ ID NO: 47297 - DNA, 1159 bp, Bovine  19866880836983
  misc_feature (1)..(1): n is a, c, g, or t
ngaaggggtggcaaggtgaggaggcccctccttcccttgacggcggtccatccctcccgtgtgttagggcgctgaccccaggaatcggtaaaagccgatggagaggtctgagctgcctcaataggcgtgaaacaccttgagccaaacgctccgttttaagtgacgcctctcacggtcaagaacagacctaatgccatctgagttttgtctgcccgccatctgggcagaggcgatgcgtaagtgctcttccacctgaggtctgagctggacttcattggaagtgtaaagtaatacatctgtgaatgatgcataaacttgtggagataactacgcaagtactgatttatgatacctcgcacagcaggtacttaataaatatgggggtgatgatgaggtggaaaatacgaaactaaaaggccttgagaaagtgtaaatatccataatcagcctcatctcatctcttaaaaaaaagaagccatcaggcatattactctactgagactggagatttatcagtcacttcacggtggtaagcagactgtctgctatgacactaagttaaagccctatgagtatcttttgtgttattggctcaccaggaattaagcagtcttcagcaagaaatcacaagttaaaaaaaaaaaaaaaaaaacaagcttacaaaattaagagttgttatttctttctgcatccttttgtacttgaataaatgttgtctcaggaacatagctagacaatggattaacaaatgaattactttgtagttatttgctactgaatgaaaataatcctccaccacagacactaattagaagctccagtgtttgaggggaagcctaagtcaacctacccgcccttccgaggactgactctttccacccgtgcccagccacactgtgctcaacacaaggaccttccagaacactgcacaggaatctacctcagctgccttattctcagccccaccaccctctaagaaaacgagaaattgatcccttatctctgtttcacaccaattccagaggcatttgttataattggaatcaatataaacgtggatacctaagcaagtttcaataaaatacagaaaaagggcataagttatcccatttcccaaggtaatttatatttttactagaattttaaaatatggctttta

SEQ ID NO: 47298 - DNA, 2112 bp, Bovine  19866880866399
  misc_feature (1)..(1): n is a, c, g, or t
nataataataaagtaacaaattggctttggagcttggcaaacccgaaaaccatatgctctgagagttgcttcattcattggtaattaagttttcttttctcctcccaaatgaggctttttctggacccagcacatagcttgaggcctgtgagcatcttaatggggactcctctcttcttttgaagatcaaatcctggctagttttctttgaagttcagagccctgtatgggatgtgaaactcgttaataaaatagtagtacatatttggagtatttctacaaccccaaagacttcatcctgggagggaaacgtattaaggactcactgactttaaccacaaaaaaaaaaaaaaaaagatggcctctaacttaatctgacatcatggaatcatgcatataccttcatgcccctgtcgtcatgctccgggccaccaaaaagactcaggcgtgaggatgccagggcattatctgcacctcttccaatcaaagcccagcccagacggtcatcatccctctccacagcaaaagtcactgagcatttgggtatctccacagtttgtttgtctttgaattagagcagccttgaaaaacagatgttttcctcttaatcctgtttgtactttgcagtggtcacactcgaagtcactgggctgcaggaaacccctccaggacttgatcccacaagagaaacggcgtgtgcgtggagccatctgattgggggctgctccttgcctctctgcattgctgagcacacttaatttatctgaacagaatggattacgagggtgaagatgcacgtacaaatacctttttttttaaacgctaactctataggctctcattaaggtcaatttaggactgtggtttacacacttttggatattcactcctctgccagagagccttcctggctttcctgagaaagatgactcaagagctcaggccgatgataaacagtctggactcgagtcctggacctgctgcttccctgcctgtgtgaccttgggcaaactatttaacctctgtgggctgcttatttaacagtaaagaggagctcatacaagtattacatcacagagccgtggcaaagattaagggggatgctgcacagaggcacagggagtagacatgcaacgcatgtttgttattcatttaatctctgtttcctgggccttttgctactcatttcaagcccttgatctcataaagagcccgctcgagagtcagaaccttggaatgaaacagactgtgtgtatgtttctcctctgcccgcgaaaatgtccactttgctcccttttggctcaaggagcaaaggcggctatgaagcacgatattatcatgttactcacatcccggacattctgtgatccagaatatggatcagctctggagagagacttggtcttagatgaacaggacatggggcagataaagtccagattcaataagcattcactgagaggctactctgtgccaagaaatttgctaggtctattctttgtatggttttctttaatagtcacgacaaaactctaggacaggtgtccttatgacctctctgctaaagcagcagcagctgagctttattgaggtaatttgtccaagatccgaaagtccccctttgccatcaggataaagtcccagatgccagagatgacccgagggcaactcggtgggaccctctagccatccacctcacccccatccctatcttacctcactgtgcgtcctgggctgagtcactcagtcgtgtcccatcccctatctttcctcactgtgcgtcctgggctcagtcactcagtcatgtcccatcccctatcttacctcactgtgcgtcctgggctcagtcactcagtcgtgtcccatcccctatcttacctcactgtgtgtcctgggctcagtcactcagtcgtgtcccatccctatcttacctcaccatgcgtcctgggctcagtcactcactcttgtgacctcatgggctgtagcctgccaagctcccctgtccatgggattctccaggcaagaatactgaagtgggttgctatttccttccccagggggacctgcctgacccatggatcaaacccacgtctcctgcattgcaggcagatt

SEQ ID NO: 47299 - DNA, 1491 bp, Bovine  19866880912081
  misc_feature (1)..(1): n is a, c, g, or t
ntgtggtcagaacactgtgaggaatgcagggatcagaggaaggggagccagtgatggagtggtcaatattttcagctggctcttaaaaaaaaacaaaactaaccctcctcccctaaccccctacagtctcaatttgcagtgtttgccaatttccacgatgtaaacactcacatcctggctgatgtcatccaccaaggtgaaccctaaacgcagaactggaaagagatgcaagtctggctctagagagggggtaccagccagctctctcactcataataaggagcaacggtaaggagtttggaaaggaagatggaaaactgttagaagggttttgggcagaggacagaaaagatgatctaatttatgtctgtcaatgagccctgagggtaggaaaaaaaatgggatgagctgtatgtagcatttagaagtagacctaagacctaaccaccttagaaccttggcaggggcaccccacacacaccctggttctgagaagcacagtttcagagaaaagagagaaaatctgttctcagacgctcccatgctggtctgagacccctcttctacttgctgttgttccgtcgccaagttgtgtcagactcgcgatcccgtggacggcagcacgccaggccctgccgtcctccactgtctcctggagtttgctcagattcgtgcactttgagtctgtgatgccatctaactgtctcattctctgctgccctcttctccttttgccttcgatctttcccagcaccagggcttttcccaatgagtcagctcttcacattaggtggttaaagtattggcgcttcagcatcagtccttccaatgaatattctcttccatttagaaagccttaaatatttttcataagttaacaaaacatggggggctgcaaataaagacagacgcactcccatcatcagaggtgatgtgttcctttccccgaagttccccttcacccaagtaagttaaagcctcaacacaagctttggtgacttctgtcagtttaacttagacctttaatactccttaaacatattttcctgtaagtaatagaatcatggcagagaaatgaagctatttgtcatgtaaacgccagcgtggaaggaccagaagggtaataatggtggggggagggcagtgccaggcaaccagaatacctgtgcaaatgaaaattgattttctggagaattccttgcctggtgaaataaattaaatctacatttacttctatttgtttaaaaacctctttgttaaaataagtacagcagtatatagacataatctaataaattagtggaggataaattatagctaataacattctgcatggagaatatacacagagggaacccataggaggtaggctcctggaagccacttaaatgtttggactaattctatttgtaatggtaaaactgacaaacagatatgtttagatctcttcaagcttgtttaattttatctttttccaaatcagttttatta

SEQ ID NO: 47300 - DNA, 1165 bp, Bovine  19866881035300
  misc_feature (1)..(1): n is a, c, g, or t
ngccttttctaaaaggcgcttgaacatctggaacttcacggttccgtactgtgaagcctggcttgaagaattttgagcattactttactagcgtgtgagaatatgaacctaacacccagtttttttcacatagtgatttcagctcatggctaatcttgttgcatcaacatcccacttgcttccttccgcctgtccatttgaagcatgttccagacattaccatttaatctgtgtcaaattattatttaatacctcatttttatttacatctctctgttaccgagaatgagtatctttttatatacatgttgggtgccaagtggttatacattttaatttagtagtgaattagttgatcttctctctctcaatttataccagttgcattagtgtgatttagcacttaggtttaataatcttaagatgttagaggtaaaaataatacttggttccaggaaagactagactagactctgtgctggtcagataacgtcagcatttcgtcctgtgtatgacatcttcaggatgttgacaaatgagagtgccttcaagagagtgatcagtgtggaaaaaattacggaataatgtcacacagaggatggttcaaggagcctggtgggcatctttagtttggagaagacaaaattgaggaaagaaggtgatgaatgggggtaactctgatgatgtgtcatgtggaagggttttggggagataaagaggaagaagctgctaattaagtagcaataaatgatatttcttctctggctctcctccttggattttactgattttgtttatacacagctgataaaagaaagcaagtgattagttatgtgatgcctttgagtttccaggagaacctgagatgatctttgtcggatatacacccaacacacccctctctccaaaagaggacttaattctgaggcttaaagtgattttgccacacaagaaaatactcttcagtagaaaaaaatttccagctaggaaactgcccagtataggcccagaattccatatccatcacttcagcataaagttttgaaatattttttataactcattggaggcgaaacttgacctgaacggatatgtctttatttgtcccccttggtgtgagtattcatacatttctttgcagaaacagtaatgtgttagattatat

SEQ ID NO: 47301 - DNA, 679 bp, Bovine  19866881040198
  misc_feature (1)..(1): n is a, c, g, or t
nataaaatggaaaacagttcatatagaattcactcattagtgtacaactgaaataatgctttaactgaaatctactaaacatctgcagactaaagataaatactgctggaattatgatattattaatctaatgcaataaaccccatggctggacttctgagccactctttacctaaaaaatagatacacttgactttaaggaacactgtatttggccagcatatcagattgcaacaagacactttatctctctacggatcagcttccttatccatgaggactcttggattcccaaagattgacctaagtttcctttaaatgctgaagatcccttgtacctttgaaataagattcaatttacaaagaattgatttacccacagcttttcaggagcaattctatattggcatagacataagtttattggatcaatgaaccatccaacacattcttattgaacattcagtacatggaaagcgttgtgtcggctgcagagaacactgaggagaagaccgggactctgctccaggggagctcatacctaaccaggatgtgggaggtcttgatgtgcacccctgcgaaactaggactccatccaaggaaggccagggaggaatgcaacggtcactttcatgtgtcagcctgactgggtcaaaggctgcccagacggctagttaaa

SEQ ID NO: 47302 - DNA, 2048 bp, Bovine  19866881085793
  misc_feature (1)..(1): n is a, c, g, or t
nttgatgattgatgattgggatccccctgggctcacctttggaaaagctgcttgcttcttttcttccaaagttcaagaagcttgaaggtcagtggataacctggcaagagtctcacccagagtgcttgatttgtgaggttccagctgtgaggctcacagcaccctctgaaaaacacaatcttattttaaaataatttccatgttaatccttttggtggagagggaattcacaagtattcacatcagagtgtgagtagccttttctaaggagatctgattagtttgttaaattcagactagcatttggacatgacttcagtaaaggttacaggcactgtttggctctaaaatttcatttcaaagtaagaggtccctaagggctagtttgacttatttaattataccgtataggacttgggtaatagttttataaaaaccctcttcaaggcaaattcataatttaatacaaagtggtaaattggtatacctttaacatttgtatcatgagacagatgatgtagatgaggattaaataaaggggaaaagtaggtatcacatttgaattagaaatgacaatattggtatattgtctgagaaaatatttctgagaaaacttggagtgaaatcacctgaaaaacactaagtgcaattgacctgaatgatgtaattgctaaagagccaccagattttgcaaaagcatttgtaagtcatatatgaaacagctttgttccttctccatctacaaacggatcctgctgggcgctgggtccgggacgagacctgtgctgccttgtctcatggggaatgagccgcagactcaggcatatgtgtccaagggggtttactgtgggtgcagagcgagcgtgcagggagcactccgcacacagggaggcatcaccaagcactggagtactgaatgacccttcttccaagcgtgtctgcctggtgaatggctaccaagctcttgaagtttagcagagtcccccacgtgtctcttatctttgaccctttacctcctctctggagtgtgtgcttctgtcacagcgtttacgacgctccagtgggtacagccatcacaatgaatgcagcgtggggagcctggggggcccagtgtcccagagcagcaggaaaatctgtaactgtcagaagtcagaatgatcaagtattaagtaagctgtgacagttgttaacaaccagttaccttttgattggcagcaatgcaaaactctttttcttttcatcaaggtagaaaacagaaacaaaggaaaattcgaacccttccaacaacacaggaagactctacacatggacatcaccagatggtcaatactaaaaccagattgattataacctttgtagccaaagatggagaagctctatacagtcagcaaaaacaagactgggagctgcctgtggctcagatcatgaactcctcattgcccagaatcagacttaagttgaagaaagtagggaagaccactagaccattcaggtatgacctaaatcaaatcccttgcaattaaacagtgaaagtgagaaatagattcaagggattagatctgatagagtgtctgatgaactatggacggaggtttgtgacattgtacaggacacagggatcaagaccatccccaaaaaaaagaaatgcaaaaaagcaaaatggctgtctgaggaggccttacaaatagctgtgaaaagaagagaagcaaaaagcaaaggagaaaaggaaaaatatactcatttgaatgcagagttccaaagaataatagcaaagatagataagaaagccttcctcagtaatcagtgcaaagaaataaaggaaaacagtagaataggaaagactagagatctcttcaagaaaactggagataccaagggaacatttcattcaaagatgggctcaataaaggacagaaatggtatggacctaatagaagcagaagatattaagaagagggggcaagaatacacagaagaactgtgtgaaaaagatcttcatgacccagacaatcacgaagggggggatcactcacactcacctagagccg

SEQ ID NO: 47303 - DNA, 2125 bp, Bovine  19866881216143
  misc_feature (1)..(1): n is a, c, g, or t
nctggcgtagggtctggcatacagtgagcactcaacagtgctggttggcaagagatgaaagacaggagtgagggctcatgatcacgagtagtgcatgatcagaaagtcaaacacctaatacaatctcttgtctatgcttagacattcactcaccatctgaagagtgtttctcttctatattaaagtaaatgtcacattatatgaaaataatgaacaatgctcttttgtgactgaactatttatgttaatagtatcctacattcagatcttcaagtcatactagcagattatgttctgcttggctttaactgaacttgacattgtccgtttgcactttttaaactttcactggtgatatcactagcctgacaacattaaattttaataaaaaaaatgtaaaaataaaagccattatgcttgctgactaaaaaataaaaatagatttactatcttcaaggtcacttaaagctgaagttagcaaattcagtttccccctggcaatcacagatgaagaaagtaagcacaaatcaaactaatatcaaggttgtatgactcctactggtgccagctgatggggaatgtttaaacttggtattcagctggtactatggattttgtaactagtcattatctccttcattaataagcagttagtgacaaaatcagatcacatcatctgtgcagttaattacaagctggaaaatattcagggtatacaaattttattagcatggctgacatctgtcaactattttggttaattacttctgaatttggattctagcatttcaatatttcaaatttaatacatgtgacataaagggttttcaagctactattacctctgtttagtagttttgtcttattcccattctaaaattgtcagaaataagctaaataaaataaattgttaattggcagaaaatggttaatttttttttatcaatgcttattaaatactctcagcactaataggacacaaaatattttgaaatctaagtttcaggatagaatgctaaaacttttctctttgctctgggatagaaaaatcatttggctttttatttttgcaggttggatatggagagattgtttctgaggttgtggaagtaaaggtatttcccatccctcctctaatctataagttatttgtggtgtgtgagggcaggcttcttggaagaaattagttttgaagtaaaagagaaggctgactaaggtgaaaagaaaagatcaaaaaagtaagagggaatgcaagaggtgagatggggtgagtagaacaaataatttacacaaagtaaagcaaaagtcgttcactgaacacacagttcacactctcacaggtagtcaggggcaacaagaatatacaaaacgaaagattaaaaatgcgttatgctaaaaacacaaaatgtaccaagcacaccaaacccaagtgttcatttttaatatctctgtgctatgattacaattttctgtaccctttaaagaaaagaggcatacagaaatggactcaccacacgtgcaaaggcagaatggtaatctgaatccatgtaggctaatttcacatcctcaaccacaacacgatcctagctcataaggttgtattttccacataagagaacagcacaggcacattgtcagtgacagagagttctgacttgtctttaaaggactggtggtttgtctgcaatgaccctcaccattctatttgttgtgttcacataactgactacacagggctggtgggtccaagctctggcagcgataagcaatcctgctgtctgtgtcacagcctggtctcatactatgtcaacactccttcagaaaaatatgaagctgcaacatgaaaggctataattctataaaaggcgtggttatctggatacctgtgatatctgacttcttcccttcataaccagaattatgctgctcttattgataatggtctcatgttggttgcatgtattcctttgcctttccggcaggaaattccaaccaagagttagctgatcaagggaggatctgaatattcttggatctctagcttgaacacctcttattttcatccaaaatgttcaccacccagtgtgggatcagcagacaaggtgagtacacctgtttatgactg

SEQ ID NO: 47304 - DNA, 1375 bp, Bovine  19866881248220
  misc_feature (1)..(1): n is a, c, g, or t
ntagtatatttgtgattagggtagttaacatctctcattaattatatgtacaattattttggtatacagtgaacaataaggacaattacaatcttagcatttaataaattttaaagtcatcatttgagaagttgaaccacactgagaaatgagtggtctctctacttgagtcttcatttactttttattggagttttaatgctatataatattgattcaccattttaaaagattagaattattatcaatctaagcccacactgcattctctcaaagcccattttaaaatctcagaattggtgccatgtattaacttcattgtaatttgcacgcaattagaacctctccgcatctgagacacacacaaaacagctcactctggcataactgggaaatgagacatcctgcaaaagcaaacatcccagacatctgatgcgcaatgcttcaagcagggtcaattgttttagaaacacattttggagaaaattttctgaaattaattatacaacagttcttttccttcttaaataaagcatacggcatgacatctaaccctttctggaggcctcagggacattttcacaatctgtctgttgctctgtaatgtatcgcaggaatgacagcatcactcattcataagagtgcaaagctcacagaatgcaaggagtttaagggcattgttttactggaatgaaatgggcaagtaaagtacaattattttctcaatttaggaggaaactgagtctcaggatgagtgactagtcagtaattaaacacctaatcaaaggcaaaaaaaggactttttagctaatcttcacattgtacttttatagagccaaagtccttttcacacgtattatttcttttaattctaagaacaataattcttatccttcatattcaccattaagaaactgcaactggactgcaaggagataaaaccaatcaatcctaaaggaaatcgaccttgaatattcattggaaggactgaagctgaagctctaatactttggccacctgatgcaaagagccagctcactggaaaagaccccgatgctgggaaagactgaagacaaaagaagggggtggcagaggatgaaatggctagacagcttcactgactcggagcaaactccaggaaatagtggaggacagaggagcctggtgtgttgctgtccacgaggttgcagagtgggatgtgacttagtgactgaacaacaaagtctgctcacagacggcactttgaggcctctccagaccctgtgctgcccgtcgtgggggatgggtagggtgggaaagcccgtctgaacctgagcccagagctgttcctgcccccccacccccgtcctgcagggtcatctacaccctcagggtg

SEQ ID NO: 47305 - DNA, 2684 bp, Bovine  19866881278215
  misc_feature (1)..(1): n is a, c, g, or t
ncctggtgacctcacgtcaccactgaatattttatgaacaagtgtaagagttgtattaaaggatcacgtcggtcactttctcatcattacattcaggctgtgggctagcttgcactgattctcacagtcccagccttcctcctgacttgttcacatgctccctccccttggggttggaagggcggccaccggcacgcccccctggcacagtccttcggctgggctcatggggagctcgggtcccctggcagctcctcactgccttgaacgaagccggggtggcaggcctgctgctgggagcggggctggcttgactcctcatcatgtggctgcctggggaggcttgggcaccaccccaaattcaggatctcccaggaaagaggacccagagcatggacgcctggtacccgctccagtctttaaagatggtcttcttcttaagcattacaaccgtcaccagagttgtgaatgagttgaatgttgttagatattttagttttcatttaaaaatcagttccttttgtataagtgctctgttcagaaagagttgaataggcagggacaaagtcttctggggaactgacccttattaatgtaatgttctgtaaagtttgggaatttttgtggtgttctttttggcaatagatacatttctcttcacaagttttgactttgctacagaaatttaaagctagaagaaaaaatgagcttatagatataaattataatagacgtaaactttaatatttctattctttatgtacttttttattttcagtacccttgaaacaatgtcataaataatacagagaattaatggatatattttggagaataattctgaggaataataggcatatttgaaattactattgcaaaaatcagatgttaaagaaaaaaagttatgatgtattcagttttaaaattgtactattaaatgtgaaacttcatgtgtaataaataattcttatttaattttaggtgccagtgtaacatatactaaaataaaatggaacaatttccatggttctataaaggaatctataaaggagttataaataattatagtaaagcttttgtgaaatatttttatgggactaaaaattgaaaacgtcttaatagggaaattttcttaaatgagaaatggggtaagttagtcatagagacctcaaatctaatatatcctatgggaaccatgaataagcagtaacttcttaagataatcttaaaaagtgtctgaaaatcaagagatttcgaaaaaggtttttggaggtagcaggaagaaaaagatgattgttatgttaaaatttctcatgggaagttatttattttgcatgttttttgatgttactggaatagagatctcagtttacctgaatctggaagggctgtgactatgtaggattaaaagcgaacaaataaaactgttcaccatagagtcacacagttttgggaggtgatataatccactccagcatcccaggatttttctagtgttttgaacatgagggcgtaggctggaggacattcggtgctcagactgtgaagaaagcgctcttcagcagacaaggaaaccatcacttacctttgtgtttttttgttttttaacacagggtcttaccgcctcccaacctccttaactagtaaaaagaatacagaactataacatgggcaaagcatacccatttaatgaaaggttgctcggatttatgaaatttttgtctttattgcttttcttcttcttcttttaaataagggtaagagtctgtatggggtatggttggcagagcaccagtctatatgtgagaagacttagtcctccctctggcatcgtcaccttgctgggttaccttgattgttgttcagtctctcagttgtatccgactctttttgaccccatggactgcagtactccaagcttccctgtccttcaccatctccgagagcttccaaactcatctcccaaactcatgtccattgaatcagcgatgccatctaaccatcttgtcctctgttgtccccttctcctgccttcagtctttcccagcatcagggtcttttccacgagtcggctctttgcatcaggtgtcctggggctggattttcctctcctctctctggtgtcatccaccttgggtctcagcccctcatcacaatcaagaactgatgaccgggtgattggtgacatttttcttttcctcttgacactagttcatttatatctgaatcacccttatcattcaggaatgacaggacaaagctgcttctgaacaaagtgaacaaactgaacaaacccatgctaattcttgccttcctaacagactgtcagccacccacagctgccacggtggggcctgtggtggacagaagagactgagtcagctcattcataaacagcgaaagttaagagttgccttggcctctgggaagggattcttgagaagccttttgttttcacccagcttttcctgaaaaatcaggaaaacaatgtgattgtttctcagaaatacagaaatataccatcttttcttaattggcccagagcaaatatttttagtaagggctgattttttttttgcagaaaaataagacttggggattttttttttcctgcagacatatactggacaaaagatgtctcttctatcagcagagtgatgatggtgaaaatggtgatggaggtg

SEQ ID NO: 47306 - DNA, 1328 bp, Bovine  19866881335328
  misc_feature (1)..(1): n is a, c, g, or t
nccacctgccctctccaccctgggcagattccatacaaccagggacgggccctgtgccctggagcctgcgggaacgatgcagaccagccagtccttcagctgcccaccccgcctcgtccacaccttctgcagaaacctcagcgaggcctccagtccgcgctgctccgccctctgtctcctggctgaccctggtgctgccaggtgtgacgctgcatggcctaagcctcctgggtgtaaatatcttcccttcttctgtctgcgtgtcttaccacacctggaatccttcagactttgtggaacccagccctgaacatctgtcctggggtttgcctgagagcttcgagcatccagatcctctttcctctctccttccctgatctgtatggatgacatcaatggaccaacctgtctgtggcttcccatcggggtcgatggatgggccagtggagacatttcttttccttgggcgcaaggaagccaaactgtgtggctctggggttcaactgacagacgcgtgtgcctgagacccgacactcgaaacagccttggcaatgttggggtcacttcagagggcatcgatctgttgggtctgcttcaccttcccacacgaccccatcgctttctttcagagaggaagacccaggaatgagctatttctgccaaaagcctcttcctgtcattaatatgttaacaaatgctgtcaaataacagttgcagcaggcggaatttgctgttggcggaggctgcctgctgccagatgaggctgcgtccgttgcatgggagccaggctgcttctgccaggagagcttggcaccggaggtcaccaagcccgcggtggggcctgcctgccccgtcaacggtgacagtgtctcatgtatgagtaatgcctccacagggcgtttctaaatgccttcctgcaaagaaggagcagagattccctggggaagggcgaacacctgcccactttctatgacgccgggagaggcggtgggggcagggggagggcgggaatggaagcccaggtgcagggagaggaggggaccaggcgggatgagccagctccctgtgtaaagggtgctgcgggaccgagaaaatttcaaaggagatggaagcatcgatacaagggacacacggggactggaaaatcgatggtggtgctgaagggtcttagggagtcaatattagcataaagaatgcagagggcagctggtgtggtggtggtgcagctgcagattagctaaaatgcatgcgggacttccctggcggcccagtggctaagactctgtgctcccgatgtagagggcctgggtttgatcactggccgaaga

SEQ ID NO: 47307 - DNA, 681 bp, Bovine  19866881349110
  misc_feature (1)..(1): n is a, c, g, or t
nagcaccagcacggcagaggaggagaaaaggaaacgtggggccgaagaggaagacccggggagagagagaaagtaccgtgctccccacctctcgggcaaaacgtgcacccgctggactccgctctgcgggcgggccgggcagaggcccagtctcctcgctgccatggccataagttggaaggccctctggacacagtgtgctgtggacagattggaaagcctgggctcaaacagccctaccaggcacactcacacttcacccaggatgatgattcttggtgtttcagtgctccgtctctatcaccgctgacggaattttactgttttaccttggaagattataaatggggaggagtccttagaacttatttatctttgagagcatgaatctttccttcttcagtcgagacatgcccattcattataagacgaggaaaattgttatatccaagattgataaattatgtcctgaggttacatgtacaatgtgaatactttatttttgtagtccgagcctatagtttaatgcatgagacacctttgtgcattacctatgctgagtaaccttgggtatttagaaattgtctgtgtgaagtctacccattttaacacatgtctttcattccacaaaaatcactgggaagtcatttctgcctacaatgagatcactatttacctaag

SEQ ID NO: 47308 - DNA, 872 bp, Bovine  19866881359412
  misc_feature (1)..(1): n is a, c, g, or t
ncccctgtgatctgcagcctgggctcagactgggcgctccaaaagttctgaccgagtaccagcctgcagcttgtcacgcccttttacagtgtgcacttatgtattattttgctctaattgtcttaatcttagggacttttacagaaagttgtcctaaaagtattgctaaaaatatgtggcgattatgaaaggagatgtggtctgccccctacctttctaagccttaacagcaccagttccctgtagagaaagggtcagcaggagatggcagacgttgttatctggtagctggcatttcctaacatgattttactttacacaagtagcctgaactctttcttcatcatcctctcatctaccttcaggcaaaagacgggttttgtttttgttttgtttttaatgtatgcacacggaagtcaaatggggcctgcattttccctgccattataactaccgtcttggtaacagccagtggtgtataataggaaagtctttctatctttaagcaaattttgttttccttattaagaaagaaggtataagctagaattttctgtacattggtccatatctttgtaaaattttcttaaaggaaatcatgaaaaagcaaggtgataatatattttggaacaagccctcatgactcagattttttaaacaatgcctttgttaagtgttttgggccttggacagaatgtctccataaggagctccatttcccactgcatgattcttcacatggctgggctgaagttcacgttatctttttgtatctgaaaaatataggcagagaatgtttttgtttcatccaacagttatttctacacacgagcagacggctcgcctgcgtctgtatttatgctctgacagca

SEQ ID NO: 47309 - DNA, 1141 bp, Bovine  19866881532097
  misc_feature (1)..(1): n is a, c, g, or t
ntccagaccaaggttacatatagttatatattacaattgtttttttaagtagataaattcagatttctagttggagctgcaatatcaagctctcaaaaataaatagaatgaatatacagagaagttgaaggatatagtaaaactgaaaagcattatgaatgaattcaacataattaagatttatgcaatttccacacaacagtaggatacaaattctatttaagttcccatagactataaactaggagacactgaacatatccaaggacatacagcaaggtgcaaagcttcatggtctaaaggtattgagatcatccagtgtgttcttcaagcgggtgattgttagcagacttgttgcttgagccagtgtcactagtgacagcttgtggagccattggtttaccgtattaatcttagtcggcggctttagacaactgtgatttgccattcctaatttctggctgctttctggcaggaagcgtgttccttcctggtgcttccgttgctcttcgtacctccgtgagagcagtgagcgccattcttctttgtacgtaacgtgcatgtttttccccttgctagattttggatgcttctggtcagggactgtggctgctcattgtgaaatacctcaagtggttaccattcaaggagtttttgttgaattggattggaccttcccccttggtatcctttggacttctttctggtaaatattcagaatgtcccccaaggctattcagtactgcattccgaaggacctcagaaatgatttacaccagcagcttgtgataaacagcagacccttggcagacagagcctttataatttatgactccacctctggtgacatatggatgtggcctttggcagactccctgatatgaaatgatttttttcccctaaattggcctcatcttagagtatctttgagtaatactgatcaccagatcctttcaaacaccgctcagataccaacaagttttgctcctacataggagcatatatccattttatgttgttaataaaacagaaaatattttcctaaaggcattatagaaaaattgatttagtatctttttttgctatacaaataagcatttagtttagcttctcttatttattactgaatattttagcatgg

SEQ ID NO: 47310 - DNA, 2096 bp, Bovine  19866880128359
  misc_feature (1)..(1): n is a, c, g, or t
ntgtcatctgcatatctgaggttattgatatttctcctggcaatcttgattccagcttgtgtttcttccagtccagcatttctcatgatgtactctgcatataagttaaatgagcaaggtgacaatatacagccttgacgaactccttttcctatttggaaccagtctgttgttctatttccagttctaactgttgcttcctgacctgcatacagatttctcaagaggcaggtcaggtggtctggtattcccatctctttcagaattttccacagtttattgtgatccacatagtcaaaggctttggcatagtcaaaaaagcagaaacagatgcttttctggaactctcttgctttttccatgatccagcgaatgttggcaatttgatctctgattcctctgccttttctaaaaccagcttgaacattgggaagttcatggttcacatattgctgaagcctggcatggagaattttaagcattactttactagcatgtgagatgaatgcaattgtgcagtagtttgagcattctttggcattacctttctttgggattggaatgaaaactaaccttttccagtcctgtggccactgttgagttttccaaatttgctggcatattgagtgcagcactttcacagcatcatctttcaggatttgaaatagctgctcagtcgtgttcaactctttgcaaccccatggactgtagcccaccaagttcctctgtccatggggattctccaggcaagaatactggagtgggtttccatgccctcctccagggaatctttccaaccaagggtcaaacccaggtctcctgaattgcaggtggattctttaccgtctggagtgcatattagatgagtttaatatttaggtagaggacagatagtacagtcttaacgtatcatgcttatggcttatcctaaagagatttgggaaagggagtaaaatgatgggattcacaagtaggagtacagtactatgaatgtaggcatgaattcatccagaagcaaggaaacatttaggtccttcctcaatttctataattccagccccctctctggcacactttcatgggatgtaatttctctacagaataataatagatgatgacaaaaataagaatgaattaaaaatgagatgtgaaagccaaagggactccttggtagaagcaaagaagccctcatgtcttgcagcaggaatgcagagaaagcctagcatgaggcctgagatttatcattctgcatgactaacttcaaaggaggttaaactcagcagattggttgggccgggagcagtgctccattaggaaaatctggatccctaacacacaggatctagacatatggatgacttcttctgaagactttgattcctctgactcttctgaaccatctaagcctgcagaaatattccatttgtctctattaagcacaatcatctcaaataatcctgagaggcactcaagatctgccctctatcttcttcctggccatatacctaggttttaagacacaatgccaaccaacagaagatgcgttgggcttcttaagtaatgaaagtattaaagttttaagatgctgccaatctacctgatatgtattagtagacatctggaaagtatgcatgacattgggttacaagattatttattaaaggaactggaacatagaattgaaaggaaagagtttatttacttgagaatattcttgggagataaaggatttagccttctggaaagaaactcagaatattttacaaattaataaagtggctcccagtggcatggtgcacacactggccaacctgagcaaaattgaaatgtgtgaactgccatgtcagatgatggataaagagattaaaaagttcggagaagcagacatgctcaaatggatgtaatatgtacagtcagaaaatgagcatgattgttatgttccttggaaaggcccagttcagtcagtcagttcagtcgctcagtcgtgtctgactcttcacgacccagtggactgcagcagccaggcctccctttccattgccaactcctagagtttactcaaactcatgtccatgggagaaggcaattgcaaccca

SEQ ID NO: 47311 - DNA, 6334 bp, Bovine  19866880169030
  misc_feature (1)..(1): n is a, c, g, or t
ntgaagatgaaagaggagagtgaaaaagttggcttaaagctcaacactccagaaaacaaagatcatggcatccagtcccatcacttcatgggaaatagatggggaaacagtgtcagactttattttttggggctccaaaatcactgcagatggtgactgcaaccatgaaattaaaagacgcttactccttggaaggaaagttatgaccaacctagacagcatattgaaaagcagacacatcactttgccaacaaaggtctgtctagtcaaggctatggtttttccagtggtcatgtatggatgtgagaattggactgtgaagaaggctgagcgctgaagaattgatgcttttgaactgtggtgttgaagaagactcttgagagtgccttggactgcaaggagatccaaccagtccattctgaaggagatcagccctgggatttctttggaaggaatgatgctaaagctgaaactccagtactttggccacttcatgtgaagagttgactcattggaaaagaccctgatgctgggaggaattgggggcaggaggagaaggggacgacagaggatgcgatggctggatggcatcaccgactcgatggacgtgagtctgagtgaactccgggagttggtgatggacagagaggcctggcgtgctgcgattcatggggtcgcaaagagtcggacatgactgagggactgaactgaactgaactgaactatactttttgttgttgtttagtgattatactttttgttgttgtttagtcactgagtcatatctgacacttttgggcctagaaaacattgaattactgtgtataaaagatgaactttattgtatatgaattatatttcaataaaatttatttttaagttaattttatgtgcatcattttcaaatttccttaaaattatgttatttctttcctattccaccaattagtacataatacttttgcacataataaattatgtgtttaaaaatatgtgaataaagtatctctagcagaggaaatttgttatcaaagacctttttctagggcctttgtgtatactttttagtgaagagtatgatttttatacttctgtaaacccttgatatttcttcttccccttccagtcttcatgatcatcactggtcactgatcttcatcatcatcatcagctatgatgtcagctacagtgttgagccattgcaactttttttaaattgaggtgtagttgcttaacaatgttgtgttaattttggtttgatagcaaagtgactcagttatacacatacatatccttttttatattcttttccattatagtttatcctaggagattggatatagttccctgtgctatagcgtcgaactttgttgctatccattctaaatataattgtttgcatctactaaccccaaactcctagtccatatctccccatcatcttcccccttggcaaccacaagtctggtctattctctatgcttatgagtctgtttctctttggaagataggttaatttttgccatgttttagatttcaaatgtaagtgatatagtatttgtctttctctttctgacttatttcacttggtattgtactctctatttgaattcatgttgctgcaaatgacattatttcattctttttatgtctgaagaatattccattgcaccatatctcctttatccactcatctgttgatggacatttggggtgttttcatgtctttgctattgtgaatgcactgttatgaacataggggtgcatgtatctttttaaattatagttttgtcttgatatacacccagtagtgggattgctggatcatatgagccattgcaaatttttaaggaattttattacactctgcataggaatttttgaatttgttccagagaaactttacttgatttggttgtcctattatttgaacattttaaattagaaaatgaagctttgactgtttaagtaagtcacccacaatcagctagatagtagagaagccaacacttaaatctaggtaaatgtgataccaagaaaataattctggcaatatttaatttaaaagtttattttttatttaaatgcatttttattctttataagcataatattagctatcttgctaggttatcttttgctccttgattattcaatatattttcagaaaccattatcagtaaaaaattctattctttttacaaatattggattgcttaaacagcatgtcttcaacaattaaatcaatttaaaaccaccaatacaatataagttaaaatcataggcaagtgtctctgagatacagaaacaagtgatgactattcttttctggttttaatcagcagtgtcagtgacagtgttaaaaatgcaactgctaattcagtaaaacgttatcacagataccttgcatgcagcaaacaagagagaaagcaattaaagattactaaaaatagttttcaggagatttctctaattcacttcaggagaaaaataaatgtacttaatactgattttgtcttattttagaagcaatttattatagagggaagaattttttaaaaaatcaaggaagtatgtaatttcctcacaaataacaagtcaatttttcctaagttcttttggaatgtaggataatttttttgttcaatgtaatatccaataatgacatatttctaaaatatgaaatacagacatatgcgtgcccaaattactgaatttggtgattttcttggcaggaaaaaaagaaagcagtattatcttcgcaactcagaagaattttgctcgaatgtacagcaagctgggcaacgtggagagctgctgtagctcagattttaaaaataattagatgtttatatgtgctcagttaccatatcacctgtacatgactaagcatttatgcttcctatttaaaaatcatatatacagttcagttcacttcagttcagtcgctcagtcgtgtccacatctttgtgactccatgagctgcagcacaccaggcctccctgtccaacaacaactcctggagcccacaaaaactcatgtccactgaggcggtgatgccatccaaccatctcatgctcggtcgtccctgtctcctcctgccctcaatcgttctgattgagtgactgaactgaacttatatctcattaaaatgacttcatgtatattagcttatataaaattaatgaatgtattttaaaccagtgaatcaatgaataaatattttttgcattttaagctttatctgattacatggtctgagtatctgaagtcatctattttcctttgtgttataaatgtaaatgggactttgtttcataaatgcacatatacatcattttaaccattagtcctgacacaagtactttgctacaacagtggtgggaatgttttatttcagtataaaaatatatttcaatgtaaatgaattgaatgaataacattgcaacacattttcttctcctttgataacacagataacaagattaaacttagtttactttattgttacatgttcatcatgatgcttaccagaaatacataaaaatgaagcagtcattatccaaaccatcagaggtcaccttgaacgagggaattggagagagttgtaatccatcttaaagtttatggcagaacatgtcacagactattaacacttaaaagtcattgccagagtaagtaatgtggccatatctgacctcaggtggttggggaagtgtcatcctctcatgtgcccaaagggacaagaatcagactacttgatcagtgcttatgctacctacaaagtatattttcaaaattgagtggactaacctatttatattaaaaaaatgaaatcagagccatgtcattatttttacattattttttttctgattagtaacatttattgtgaaatgagatttttatcacatttcactacatcaattaaatgtattggttgtttctaaataagagtatttaagaaacaaaccactgcatcaacagtaaatatattttaaagattgtatcttactgtttttaaggtaattagaaataagtacaagggctggaatcacttgtttaagaaaggatcttctatgttagctgggtaaatgttagatatgaacatcatatagaataaatcaaaatgtacacagggaatagtccaattgtgtcatttttattgaattttggtatcaagttttacaataatagttcatagagtttatgaagtaaccactattaaatacttttgcttaaatattttaaaatattatacttgttttaagttttaaatgatatgaaaaataataataattgttttcaggagcattacttttctgaattataagaaaggcaacagaagttattatgtttctatagaaaacttcctcttatgtgtatttgaagtaatattacagaagttcagtttgacatattttgatgtactatggtagaatatatatatttttttttctgctgtgatatttctttatatattacaaataccatcatgttgattaataagtaattttaaggagaaaaatatatggcatctgatgaaagcccacttaaacaaatcattggtctataccttaaaatcatatacagagatgttttattagtcatttttaaaaagaatgaaaaaactgtgtgagaatagatggaaaaatctcttaggaaatgttttcaaatcaatctaggaataatataggaatgataatttaatctggtaagtcacaacatatttgcatatttactgtaattattttagcttctttttaaacaaatccattttattttcttttgtttgagtaagtagtgtgtgctaagtgtttgtgaatttttaacccaacaaatttaattttgtgtaaaaatataactcaatgtatttatttatctgtttaatatttactctgtgggctttttttccaaaaatagaaaaatgaaagaaataggccttgttttggagaatgctatggcaccccactccagtactcttgcctggaaaatcccatggatggaggagcctggtgggctgtagtccatggggtccctaagagtcagacacgactgagcgacttcactttcactttcatgcattggagaaggaaatggcaacccactccagtgttgttgcctggagaatcccagggacggaggagcctggtgggctgccatctatgggggtcgcatagagtcggacacgactgaagcgacttagcagcagcatggtgacttagaaatatttttcttctttcttacaagatatttttaaaaatatctttctgtagtgtctaacagaatgctttttatacttaaatgtatttgtttaacatcccattactattttcacatctttagactgtcacttttaaaaaataagttatgaatgcaaacgaaagacacgttccatacgaaccatgactacctgcaagaatataatcttgaaagaaaattgaaaacttgtaagtaataactggctgaaaaatatacacaccagataaaaagtccttgtcttgaggagctgacagggaccttgaggttccaggagaaccactagttttatggagctgagaggatccacatgactcctaaaataaatagaagataaattgtttatgttaatgcaaaattatttaaaaagttatacagctttaatttctaaacaggtcttgcttttggcttattataaacaaagaatcaagactaacacaaattatactttacaaaattaaacacatatatgaaataacaaaaagcaaggtgaacttgatttatcaggtcaattgggtgagtggggcaatagttaaatacactagaaatcattattttttcaatattttgtacataatctcacagactgtccagctgatgaaaaacttaacatctgtagctctgactacctaatattgattcagatcaaatgcctattctcaagcctcaggttccttcaacatggaggagcagaaattcatggaagaagtaatactgaacttagctccaatcccagctgtgtcatggaattactgcctaacctttgacaaggcatttaaataatctggttctcaggttctttctgtacacctatctaaaaacgtgcatgtatgggctcaaagatccaagagacagcatatgtaaagactacacactgtgttttatggttcattttgaaggtattattacatttctgaatctgtaaagagaacatattttatatgttgctaaaagaaatgattaatatgaaataattctgaataaatgctaccaaagaaatctatttgaatagccacataaatagcattttcctttatccagtcattgtaagaagttaagaacaaggcaggtagtg

SEQ ID NO: 47312 - DNA, 2136 bp, Bovine  19866880796192
  misc_feature (1)..(1): n is a, c, g, or t
ntttacacctgactgggtggaccctcaggtgtaatttataagtgcttcccttacattattcttactttttggtatgtcttttgttttaaagctttttaagctctaaaaggcagaaatgctatttctactgttgccaaccctcagagctaactactttgtatgagccaagcaggtgcttaatattttcagtgtgattgtttttcatatggaaaaaaaaaacatattagaaaattaagttttttcagagtttgggttacttataaaatttggaaattgaaactcatttcattactgcagttgtgttttaatttgtgagttactttaatagttcaaacatcagtcagttcatgacattgcatttgctactctgtcttataggatatagcctctattatgcagtcaaaacattttcacaccttgattctattttaatcacattcatcaaaattatccaatttcccggtcgttgccagatataacacggtctttgtaggcagataacattattctatgaaagactctatctttaatagattctgtactgacaagaggagctagggtgaacagatgtgttcaaactccagtgaccatctgctgagccctgagcagtcctcctgacagaggagcagtctgcagagtgcttactcataaaacacccattttgtgaatgaaatggttttagtggtctctgaggccattgctttgtcactctctgtcagtactaaaattaatgtggaaataaaagtaaacaaagcatctttccttcctgtgtttccaaaaatttatcaacttgtttaaacatctaactctactgcaagcaaacatggttttattataattgcatttaaatcttgatggaaaacagcaacttctcatcaaatagcttttcctttttcagattatatatacaggcttacaactgaactctagtctactcttcaagtagaagaccagtctttttttttttaattttatagaggtaattttctcctctagacatactaaccagtgaaggcaatggcaccccactccagtaatcttgcctggaaaatcccatggatggaggagcctggtaggctgcagtccatgggatcgcaaagagttggacacgactgagcgacttcgctttcacttttcactttgatgcattggagaaggaaatggcaacccactccagtattcttgcctggagaatcccagggataggggagcctagtgggctgccatctatgggatcgcacaaagtcagacacgactgaagcgacttagcagcagcaccatattgtttagcctcccatgtttgtggggtttttaaagtttgtttgtttttgtagttgatttctaatctcatagcatttcagtcagaaaagatgcttgatgtaaactttgatctccagtcacagattcagaagggactccagaatgtgctatgtgatctgaccaggttacacaattagacctattgaattttagagctcttataatatcatgcttagtaaaggaacatactctcacctcaaaatacattatctttcatctgtgacccacgattattatactggagcccatctctgcagagggtgtgctgtctgtttgcttgtacctcattctctaatgagtccaaggagtcactgaattgtagtttgttcaacttttttctcactttaaggaaaggagtgatgaattccaagctctttatgtgttggagctgaaactggaaatcagattattttttaaaaatcttttaagcccaatattttcaataggctatgtctgtgttgatcattttctatcgaactgtcctagaatagtacactatacttgcagatgccaaattcagttttttcattttactttgaaatatatttctgttctgttagttgtgtctaccacctcaagggaaccaatttatatattattgatccctttttgtctgttaatcatagcttctctttatttttttcatcatctctatttttgtctattttagctgcattctgtaatgttttctagagctcttcattaacttgatctttcactgtgaacattatttaattgctgtttatagataatcggttctaaaataattttgatgttctctctgactcgttctctagtgtcatttttaccttattt

SEQ ID NO: 47313 - DNA, 1404 bp, Bovine  19866880798080
  misc_feature (1)..(1): n is a, c, g, or t
naaaacaaagtgctcactgaaaaggataaaacttttaaacagatccttaacgcagtcagaaaacccacccaaatgggggcagaccagagtctgagaggagaatcaccaaaccaaaactagacaatggcacagatgcagtaagctccagggctttcatgggggtactgcacacaatttcaagggtcatatctcttgggggtcatctcctttgaatcccacttccaatgcaaaaaatatctacctaaataaaaagataaaatgaagcaaactcaatattgtcaaaaattgtctcttttgggagtagcagaagaattgcaattcaagatacacaaactgtagcaagtttcagagaagtctgttgacaatttgggataggctgtatttttggacagggaaggtaaagaagtgagagcttagagtcgattaaaaaaacaaaggaagattaactctgaaaatttcccaggagacaaaaccagaccagtcccataaacaaagctcaattcagtttttttacaagaccaacttatccagagtgacttattcatgcctctggaaaacataagcaaaatttcccaagattccttgatcaatttcccatcatttaagagcatcccaatactatcagttttctgtaaattaggtatttatgggaaatccatctctcagtcctcaagttttgtttccctgagggcatatgtataagattttctattttctattatctgcttccattttagactgaaattctttcacagagcatatgtaggatttgggggatttaaaaaatggagaataattttggaagattattaaaacttctttttaagaacaattggataaatgagtcaaattagaacacaccataaaaaatatttttaagttcatattttttcctgtggtattgttttgacattgtttcaaaagggtggaaaatattctctgaaattttttaaatggagatttttagtcagtaaagatattttaattgcaatcacataaaaaaaagaatatagacaaaatgaccttaccatgcattccagctttatgcttctttatggctatagaataaatatgttttgactattattcctttacaaatagcaagtgggagtatgagtattgacattccatgcatagtaatcaaaataatatctatttttatgagagtacagttcttaattaaggttagtccgagtgggtcaccttagtaaaataatgaaaagtcaaagtgccaatattcaaggttgcactgccttataaatagtttattattgcttcctactctctatgttactaggatggctatctttatatgataacattttaattttattctcattttcaagtgagtttttggttggttgttgctcaaccctaacccttctaaaaatatctaattattta

SEQ ID NO: 47314 - DNA, 1757 bp, Bovine  19866880925848
  misc_feature (1)..(1): n is a, c, g, or t
ntgctccttggtgatttatatttaacactgaggcatgaagaatcagcttagaacatccttcactacacactggccccactgccacattactgactaattgggtcagcactaacaataaagagaattttctggtcgtatttgctttctagaaaataataacatcatcatttgtttctctcataagtttgattgttatctttctaaatattgaactagagaatgggtgatggggatcaaagtactcagatcaaatcatcttagcttcttgcttttctttttaatggataggcaataaaggtaataaaaaggtgaacttacctattacatctagtctattacctattatgtctagtcaaagctatggttttcccagtagttacatatggatgtgagagttggaccacaaagaaagctgggcactgaagaaatgatgcttttgaactctggtgttggagaagactcttgagtcccttggactataagtagatccaaccaatccatcctaaaggaaatcagtcctgaacatgtattggaaggactgatgttgaagctgaaactccaatactttgaccacctggtgtaaagaactgactcactggaaaagaccctggtgctgggaaagattgaaggcaggaaaagaaggggatggcagaggatgagatggttggatcacctcacgaactcaatggacacgagtttgagcaagctccagaagttggtgacggacagggaatcatggcgtgctatagtccatggggttgcaaagagttggacaagactgagcgactgaactgaactgaacctattacatatttttttttttattactggtcaaaaaatgtttttcaggttttctctactttataaacctttaggtagtaagtcagttagttcagcataaattgtcacatggaataaaatatatactgcaaattcagggctaaaaagttcgaaataaaatgaatgaataaacatgtaaataaagggagatgagatatcttagtataacaataagaggtctaattattttttcctctttgtaaatttgtattttgggtagtagagttaagctacctcatttgtttcttttgataagcattcatttatattaagctgaaggactttgagactcaaaaatggatttctccaaaaagactcctccaatttacatcatgcactcatggttcagttcaggatcaatgccttcattagtggagaggctctatcattttctggaagtaacagttcctggaatggtaaaatatttcacattcgatattggtggtaaactagaatttatgacctatcctagttggcactgagagccccattttccctctccagcctgcccattgttctaatcagaaagaatacgttttcactgtttagccaagttacgtctgagatggttgccagggtttgggaagcacttatgtagccttcttcattttcacacacaaagaatgagcgggtaacatttactatgaataaatcaataagactgatgtactagaaatgcagtttgaaaagggcagcagccttctaaaagctttggaagctaacttttaactttagaaagagaggtgaaagttgaaactcacatagaagacttataaccattatctttttttgtgtgtataagagaactataactcactggggcttacagctacagtaagaacttttccaggagatgaagaaacatgataattgttcattcgtgctgcaaggcacttgttcagtctgtttttaaaaaa

SEQ ID NO: 47315 - DNA, 1509 bp, Bovine  19866880968476
  misc_feature (1)..(1): n is a, c, g, or t
ntgtggttaagccaatttagatttctattactttaccttaaagttatttaaattctaagtttaaattctaaagggcagaagaaaagaagtacatttatttcccttttcccccatctcttcttttatctataatcagaaactttaaataatacctaatagtttaataaaacttgcttcaaatgtcctattttttgaattctaaagaagagggttttttgatgattattgtaaaataggaaagtttggattgtatgattctacaagaagtctagaggaagaaatgtcatgtccttaaggttttatgtttgtgcttttattattttaatttgcttttaatttttaagattttaactttaaaccctttgcccaagggagaaattccagaactgctgtcgtggctctcatgtttttatacacattttagatgcatgaaggaagagcaggggataggatgaagaaacaagcaacttgttcacatgatccatagaaggcagatggaagcaggttatgaaaaatgtaaatgcattggatatagagatattaatcatcagcccagccagagatggctagcattttatgtatttttttcctggatagggtgaaatgtagttgccatagcattttatatacatatcacttatatgcatttaatacttatgcagataaaattaatttcgatctcctcacacactgattgataggtcagtatttctattttcttgctgtgaaaacaaaagttcagagaaattcagctatttacctgagaaaccatagctgggaaaatgtagagcttacctcattctagttatcttttttcctaattttgaaggctttcaaacatatcattgtctgttcaactgttcatgcatgtgtacctaaaaagctactgttttgtagaagaattttgttggaagagggaaaatgctgttgtataactttaagatctgtgaatagaagatattacgcgttacaaatattaacttcccaagggaaaaaaagtacaatattcctcaagtataagagtaaacacaagaaacagtctatttccaaaagaactctattttgtgccaaatgtgcttttacacttattagaaatagttcctcattcataatgtaaaaatgatgttattattttagtttatatataacatatgacataaggagtgattttgtgactaatttaggcctcaggttgtttttcccacccaaacaaagtcatacatttggccatttaatttttacaaatctaatgtttcaaatttcacagttcattttcaagttagaaaacatactgatgtgttccctttctatttcttcctgaatatatttgtgttatctttctgtgagataatgaatcattttttgacacattccaatatttttttctcacatgcctgtctttttttcagctccaaataatgaaatcatcactgaccccattggccttcatttctattctgatttgtgtgaagaactcttagatgaagttttacacggtcaacaactaga

SEQ ID NO: 47316 - DNA, 1218 bp, Bovine  19866881060445
  misc_feature (1)..(1): n is a, c, g, or t
natttcctatattgaatctaaagtttatgcagataagtaattatatgaatgaatcttcttaaaatacagctttttaaattttattaattcaagtagcagccttcagatagactttgctgtaataaaaattataatcatgtttcaccgaagattttgttatttttcatataaaaagttatatctaaattgaaccataatcatattgttccatatttctttaacatctacactaatttttctatttaatttcattcaacatgaaaataatacttagtaatgcatttcgcaggctttattaatgccttccagacattcatgtttgttaactgaacgcacttgattatccacgctgatggaagaccacagaagcatggataattgaaaatagtaggtaattcagaaaattgcggtgcagtcagatgcacgttcatagacacatattcacacgtttattcaaatatatcccctttgtcagttctgtaagtaaatgatccaaagtagttgatatggtttctgccaaagcacatgcagataataaattgcatgtgccaccgtctcactcaacacagaaagggaagaatgtctatatttctgcctctagaaccttatgtttccatgtaggcaacccagactctcctctaggttcgttctatctgagatggtccagttaatacgatggcactaccagtctagagggaaaagtataggttaaggttataaaccagtttgaccagtagatctgaccagtagatcagagtcagctcaatggactatagagcagaatcagaaataccccacattctgacattttaaaagtaaagttcattaataagtttatgtaactacctcaaaaaaatggcagtgttgtaaataagatagaagtttacttctcttttgtgttaggcatgatatgctaggaatggcaaggtgatgtttctttgctcagtcaggtgagctttgaggcttcctgtactttcttgctctggtgcctactgccagtcgcctcctgacatgaccagagatagtttaccacaaccatatccacttctcagcccacaaacaggagaaaaggaaatggaggacaagcaatttccattcagtgagggtgacctgggaggagccagtatcatattttccagaacttaagcaagtgctccaggcggctcaatggaggctgtgaatataatctccaacaaggggctcatttactcaactaaa

SEQ ID NO: 47317 - DNA, 2520 bp, Bovine  19866881063100
  misc_feature (1)..(1): n is a, c, g, or t
nttttttaaatatttgcacttatatcctcagggcatattttcttgtgtttttatctggctttggtatcagggtaatgctggcctaataaaatgagtataggagtattcctcctgcttcaagtttttggaagagtctaaggaggatcggcattaattctttaagtgtttagtagagttcaccatagaaaccattttgtcctgggtatttctttgtttagagatttttaattgctgattcagtttgcttacttgttaaaggactgttcatattttctctttattcatgatttttaatgtcttaaaatattagttagataataattctgatattttctttttttgatctgtgctggactgtgtagatattggccttttcactcatttatctgtagaaagttgaacgcttaattggtgtctggcctgtccatatggtaactttcacatgctggacaatggcaagtattctactgaagtgatggaggcaattggtcccactagggaccagttcacctatcagtagaagtataaggtgtgaaagcaaaaatctgcaagttctttggaattgtatgctctgaaatagaacattgtcatttatgctgtatctattgatcaaaacaagtaccaaagccagtcttgattcaaagggtgggaaaatattgcttctcgatgggaaagctgtaaaaactgccatctgttttgcaagctattacattttatctctatatttttctaatttctaattctcttcatcaactttaatattttctattgtcccctttattgtcacaaaacattagacacctctgacctatttgaacattatcatcactaagcctaactcagacattgttatagtcccctcctctgttgctagtaagaatctcctgctgccatcaccatggtctaaaagagcttcataagtttgattagatcagacatggaagagggatcattgaatttaagtgtgatttttcagacctttttacttgcagtatcatgaagaaggtgtgcaatgttcaaatctttctaaataatatgagaacaaacacatttcatggatttatttatttttatctccacttatgtagttgcaaaaattaaatagaaaacccttctcctgcttctagacattaaaacatgggaaccgaacttcatattcttactgaactcactagacaaaataactctaccagaagttggtcatttttcaaaatatactaggtataaaattggcacctgctttctgtcaaataaatttcttgttattttgttgttgttcttgggttttctgctattgttctgattttttagtatcattgcatttctgtattccgaagttaaggtaaaactgtgtttatctaagtcaactagtaactcctaggtcatttcccaaagagctttcttccccattattatatttccttaataaatgcaaattaagtaattatctagttatattttgactaggcattattcatttgagaaactgtggctttatagtgcaaaggaagcattttttccacctttggcactttacaataaactcattctgatctaaattgattgctgtgggattatcttggagtcattaaaatattgctgtattgacattcactaatgattttaattagcagtttcaaattccagtgtttggcattaaatatgagcagatatactttattatatccctatagatgtttatttggttttgtttatctgttgtgtatattaaatacttatttgacatgctttatgttatatgtaagcagtcaatgttttagtatattgagattagcctgtctttttaaaagaatgatatagttgagattcaaaacctctctgagcaaaattaaggtaaaatatatatttttgttttgttttattattttaaataattcaaaaaagtattcagtttgtcataaatttaaaagatctacactcccacataaataaaaaaaaagtcttactcttaaaaaattggtatatttcaaaagccagagaattctgctaaaagagttgaaacatttgaattttgaatccatatacacattgcaaagttattctcacctggcttgaccacttctctttttggtaactgttataatctttgtgttgcttctaaatttctgcaaaggaacagcttgaacaagaaaggaccagtcataaaagtataaaagcaatcagttcatcattatgaatgacaagagaagattattaagttgatgtaataacggtgacatttatcccaccaaatccttcatcttttataatgtaaattagagactttatactttggattagtgttgaatgtctatctcctctaatagttgttaactacatattccctatgcaatccaaattccttgatataaaattggtaaatcaatagggagaatggcattgaaacttgtataatatcatatattaaacgaatcaccagtccaggttcaatgaatgatactggatgcttggggctggtgcactgagacgacccagagggatggtacggggagggaggtg

SEQ ID NO: 47318 - DNA, 1358 bp, Bovine  19866881484258
  misc_feature (1)..(1): n is a, c, g, or t
naaatatatttaataaccaacagctcatccatctcactcaggaatcttgaaataacatattgacaattctattataaattatcctctgttaaaaggtattgctgcttgataatatatttccttttccctgtgaaacaagctatttaatagccattaggtttgtttttgtgttttagtgaaattccaagtgcctaacttcaggtgttataacttctctagtgtgttcaacctcctagattcaatcccagttaacttccccaaaatgttaaggttgatactgattttcatgacaccttgagagtttaaatgtttctccttcatttcatcaaaaggacatttgtggatacatgagctgtccctaaatgaaactgttagataaacacttaatataatacagcttcaaagatccatattcactgtataagttttcattgtctttaacttatcatttactccatggctttatagtctataaaaaatagtctaccaaggttggcagacaaagaagtgtatctgcaccactgttcatcttgaacttttcaaaaaatatgtttaatcccacaacatataagaatttatttaggtttaggtgaataaagttggcactgtgtcatcaaagtgaaagcaaatggtgcattagttgggaaggatcattagatttgttttcttgagttattttgatttcttaggagagttcatattctaaagcatgcaaaatatgtgttataggttttagagagaagtcacttgattaacccatagcccttgtatttgttaatgaattaggaaattctttcccagtgatttattttgaactaaagaaatcctccaaagatacctaacttagctagatttcttcatgtgtgaactttatgtaatcatgaaaatttatcctgaaatttatatataactatggattcttcaacaaaatgttgattatatgtcaggttttgttctaaacattgggggtacaattgtgagcaatgaaaagaagagctcttttctctccctttggcccttatcagttcagttcagttgttcagtcatgtctgactctttgtgaccccatggacttcagcatgccaggcttccctgtccattactaactcccagagctcactcaaactcatgtccaagtcagtgatgccatccaacccatctcataatttcaaaaataacaaatgatgaataaaagttaacaggtaataggacagacactggaggtgggttatcctttagagtgattgagtaagtcatttcagaggaaacattatttgagatcttaatggtgaaaaagaatgatccaatgagttctgtgggcaagtgttcagtagagggaaagagtaaacacccttagg

SEQ ID NO: 47319 - DNA, 2269 bp, Bovine  19866881534958
  misc_feature (1)..(1): n is a, c, g, or t
ncttttcttccaggagcagcatcttttaatttatggctgcagtcaccatctgcagtgattttggagcccaggaaaagaaaatctgtcactgtttccccatctatttgccatggagtgatgggacgggatgccatgggatgcccataattagcttttacatttaaagattacagaatgttttgtacaggatttaagcaatgtgggtctcacacacacacacaaatttgtttactgaacactttcatacagtcctttagtaagtatttactgaacactgggcatttcactttccagtccccaggaagaatatagacatactctcagtgtgctcatgacacaggtgaggggacagatgcagacatgtggcaacctaatagaatattctgacaagatggaacataagtcaaacattgtgagtgtgtgtgagtgaaagatgtaaacaatcatggttaaaactgttactgtacatacagggagatattaaattgactttgcaaaaacaacaatagcctgatacctattcaatggattctagagctagtgtgtaaaaatttgtaacttaacatttaatttataataattaaaactgtgtaataaatatagcaataaatttccaggaacctattcagagtaattctattaagcatatattgattattgttttactgaatagcatctaaaaatacaaaaagatttagctttgaggagactgttgtgtattttgttttacatacataggcttcttttgtacgttttgcttaggaatttttttcacatttagactatttataatattttttcatgctactacgtatatatctttctcattctctctaattgctgcatagtattttgtagtttactgtattaaatttatctaatcttttcaaatttgatgatcatttgcattgtcttcatatactaatatttacaagtaaaattaaatgaaagcttttgtctgactccttgtgtctgtctgcagctatttctctaggagggtaaccaaaatgtggaatttttactctaattgtaattttttacaatgtcctttgtttcccttcggagaaggcaatggcaccccactccagtactcttgcctggaaaatcccatggacagaggagcctggtggggctatagtccatggggttgctaagagtcggacacgagtgggcgacttcactttcacttttcactttcatgcattggagaaggcaatggcagcccactccagtgtccttgccttgagaatcccagggatggaggaggggcctggtgggctgccatctatggggtcgtacacagtcggacatgactgaagtgactttgtttcccttaaattttcagttttctttgggatttgtcttgatccttctcttcttggctattgttattggtgaacgttttttgcattgtcctttatactattaagtaaagaattataattttaggtaatagtgcatgagctttaagatgtgcatttttaagttacttggcccaaacaaatgattctctgaagtagaaggctggctgcagggtgatacaaatgaacgtaatttataaaatatcaggctttgattaaaagatgagcatatgagccagaatttaccttaattgcaggtttaaaatcagaccccagctgattacaagtctctgatttgttcaaatccatcacccactgataagatttaggacaagatgtgatgtagcttcatgataaacgtttggaggttgatggaggaaaagagaagagtcaataatgcctaaattttataattttctacagtgctcaaaacaggctcccctctgggacctcttctgattcagtcctttaggtaaaactcaggacccttaactcagcagtaatattgtatttcacacaatcttatgagctccgtttgctgagagctgcatggtgttgttcattatcactgagaaaggccactgtggtgtggtaataaacagaggaaggcatgtgctagatctaagtggcctcagatttatttctggagcttcagaagcatggtcagtgaaccaaataaaacaatctgtggtttatctttgggcagcacagctgtaccagcaaatatgaaacaaagttctctgaaaaaaattttttaaaagtctgaatagttactctgcaagtggttctcaatcttgggtgtaccttgaaatcatctgcaagacgatttcaaacgattgattgccaggcctctctgggactatttgattcagaatccctgatgataagtccaagtattggtgtatttt

SEQ ID NO: 47320 - DNA, 800 bp, Bovine  19866881621539
  misc_feature (1)..(1): n is a, c, g, or t
nagattagatgaattttgcatttttaaaaacactaaagaggagatacagcagttccgttttgaatgtccatgatttacccagtgaaaaaggctttgcataaattttgatggttctgacatattcctgcagtagcttcataacacaattgagagaaaattcttcattaaaaatggcttttatcttcctaaacttgtgaacaataccagcaactgtttaagtcagttaaataaaactatgctttcataatttactaaaataaatctcattttatgtgatattttacttttttccatgaattaacataaaagattgtatcaaatgacagatgtttttagagctgggagcaaattatattagaagacttgaatgatgtttgcaaagcttttgacttgcctataaatctcttctaaatatctgaaagttctttagaacaaaaactggaaaaaaaaaactatagagaatatgaaataagtaacaattttagtaatgtacaaaatctatcaaacttaaataccataaggctgcttaattatatgggtgcatgaatgaagaataatagttccaagtttcagactgaatagggtattatatcatgatattgtaaggcagcttaggaagaatttaaataaattagataaatataatctgtatacagtaaatacatacacacacacacaagcactgtgtcttatacttgtgttatgtgtgtctgggcatatgtgttctcaatcatccttcaatcagtcatgtacatatggcttggagccataaacactgggagatatgaagtgggtttaca

SEQ ID NO: 47321 - DNA, 726 bp, Bovine  19866881839364
  misc_feature (1)..(1): n is a, c, g, or t
nttattttatagcaataaattatgctagaaattaccaattatatatttaagtacattgccattaacttgcactagtttgaattatatattgaagagaacatgctaatttgagaatatagactctatttagcataatacattgtttcttgaggaatgatattctgtatattagagaactaggttataaacagataattaaatgtgagaattaattttgtttcatggggctcaattaccttatgtgaacaatgtaaatcatttacgtttgtttttaaatatagcatgcatattcaaaaagcccatgattataatctatgaataataagtagatatatttttagtcaaataagctactatgcagaggagtgctaacgttgcttatcttcacagtgaactttcagttccaggtcaagctgcagcaaagcatctgctgtggccatatgttatctcagtaaattgccaccaggtgaaattctttatgagacacaccaaattctaaaaactatcacaggagatgctatagtacataaggctttcctccgtttggcctcctggtcccaatgggggagataattccacatttcagctaatattattttggttcctgccatgaagttggaagatatttcttgcagtatagaatctcctaccagcatctggaaagtgagcataagattgaaagtcagagaaagaattttactcaccatgggaaaatatttttgaggg

SEQ ID NO: 47322 - DNA, 2726 bp, Bovine  19866880133888
  misc_feature (1)..(1): n is a, c, g, or t
ncccaaaaagataaagtctgacactgtttcccactgtttccctatctatttcccttgaagtgataggaccagatgccatgatcttagttttctgaatgttaagctttaagccaactttttcactctcctctttcactttcatcaagaggcttttgagttcctcttcactttctgccataagggtggtgtcatctgcatatctgaggttattgatatttctcctggcaatcttgattccagcttgtgtttcttccagtccagcatttctcatgatgtactctgcatagaagttgcataagcagcatgacaatatacagccttgacatactccttttcctatttggaaccagtctgttgttccatgtccagttctagctgtggcttcctgacctgcttataggtttctcaagaggcaggtcaggtggtctggtatttccatctctttcagaattttccacagtttattgtgatccacacagtcaaaggctttggcatagtcaataaagcagaaatagatgtttttctggaactctcttgctttttccatgatccagcggatgtttgcaatttgatctctggttcctctgcctcttctaaaaccagcttgaacaacagcttttgatcttagctgaactaaatcaccaatctcagtgagagtagacttaattcttaccttcttcatagtttttattcctctagaagtgcaataccttttgcaactctgtccataggttttactgtccagaacaaccgacctctcataaacagtctctgatcttccaggcattggagagcaaagagtagctcactttgcatatgtgagacagtgcagagatacttcttcagttaacatattcttccttgagatatcctagacttcttctttattgaattacaatgatattgacctatgacattgttatggttaagtacacaaggcttgggagtcagactgtccaggttaaagtctgacactgtttttctggtacatgcatacataaaatagaccaataataggaccctcttctgggatatgttatgatgactgaacgagatgatccatgtaaatgatcaatataagtatgaagtgtacagcactgagtgattaattcaaaccttaactcttattgtaaaaacccattttgtttctacattcagtaagcactgttgcccactcacagtgattaagagtagggttgagaagttactaaaccccaaatgaaggacacacccttattctactgaacaaccctcctgttcactgttactgtgaaattgaggaagagtctggaggaaagtggccacccttgtctcagggcaagttataaagtggatgtaaaagtaacaccctgaaaaaaattatgtcaaacatatgggactcaactctgacgactgggtttgtaaagcagaattaattaccacaaggcagaagagccagtcataccatgctagccacttacactatcaggtaaaatttcctatgaaattactgttgaaaagacactagaaaataatatacagagacaatctgtacatctacataactcacatacaacacacaaaattttctaggaatcgaagtcaacagaaagtatttgtacgcattatccacccagttttattcttttagtagccatgagctaatcagtttacccccaaagctgtaaacaacatactatttccatcccatcagcaagcttttcctttatctttcctgttttctccaaaacaggagaaactctctttcagtttagtcgctcagtcatgtttgactccttgtgaccccaatggactgcagcacaccaggcttccctgtctatcaccaactcccagagcttgctcaaactcatgtccatcgggtcaatgatgccatccaaccatctcatcctctgtcgtccccttctcccgccttcaatctttcccagcatcgagggtcttttctaatgagtagttcttcgcatcaagtggccaaagtattggagtttcagcttcagcatcagtgcttccagtgtatattcaggactgatttcctttaggatcaactggttggatctccttgcagtccaagggactctcaagagtcttctccaacaccacagttcaaaagcatcaattctttggctctcagctttctttatagtccaactctcacattcatacatgacgactggaaaaaacatagctttgactagatggacctttgtcagcaaagtaacgtctctgctttttaacatactgttgaggttgattatagcttttcttccaaggagcaagcatcttttaatttcatggctgtagccaccatctgcagtgattttggagcccaagaaaataaagtccaatgatacagctctaaatctagaacatacgattcttttgatttctgtcttagctggatatcttctccatgatataaagaagcaaattgaagatagttggataggtgggttagcctcttgatatcattcaggtttcaacccaattcttttaagaattaaaaataattgtacttgtcttacaaattgagtctttgtggctctagaagcaattaaagcctatctatcatttttcccaactcctaaatttgctctatttgtctcaaaaatgcttatagatattgtaaatgatcaggatagtaaaaacaaaactataattcaaaaagacacatgcactccaatgttcactgcagcattatttacaacagccaagacacggaaacaacctaa

SEQ ID NO: 47323 - DNA, 2307 bp, Bovine  19866880535357
  misc_feature (1)..(1): n is a, c, g, or t
ngtagcttttatgtttacacaaaagggattaactatgaacttcatggagcaggcaatggcaccccactccatactcttgcctggaaaatcccatggatggaggagcctggtaggctgcagtccatggggtcgctaggagttggacacgactgagcgacttcacgtttacttttcactttcctgcattggagaaggaaatggcaacccactccagtgttcttgcctggagaatcccagggacgggggagccttgtgggctgccgtctatggggtcgcacagagtcggacacgactgaagcgacttagcagcagcagcagcatgaacttcactgtccatgttttctttttttaaaaatagtctgtttattaatatccatttgactgtgccagcattcagttgcaggctgcaaactcttagttgcatcttgtgggatagagttctctgaccagagatctatctccagccccctgcattgggagcaaggagtctcagccattggaccacagggaagtgccggttgtctattttttttttctcacttgaggcctgaaggccacaaagtatagtatgtcatgaatggaggacccaggtgaagaaagactgatggagtgttaacactgtagggtgaaattataactcacctagtcctgtactgacagatagttgggttgtcccctcaccccactttttcccccctattacaaataatgttgcagtgaacattcttgtaacacaacttggtgaactcttgcaggtatatctgtagggtaaattcttagctctgaaactagtctttgttgctgttgttcaattgctcagtcatgtctgactctttgtgaccaaaataggttgcagcatgccaggctttcctgtccttcaccatctccctgaatttgctcaaactcatgtccattgagtcagtgatgccatccaaccatctcatcctctgtctcctgcttctcctcttgccctcaatctttcccagcattaaaattacttcagaacatttgtttttcttgacctcagttaaatgtttttttttttttaacaagttattgttgtgagttaagcagtttacacatctctgcctcttttaccacattctataaaggggaacaccatggtctactcataagtgaaccttatctgaagacataatcattgagatcatctcatttttgtcccagtcaagagcctggacatttacttctgttgtccagttccctaagtactgtattgatcagcagccgttttcaggcttttcttaaaaagtaacaaaagcagttaaagtaaagtcatttgaggatatctgaagggtcagagcatattcaagaccttgtgctttcaagcaaaactttcatacagtttatacagcatctagttttagttgtcatttatttgtatatacatatttgaatcaagtagttcattctgatttttgaatataatatggatgttatacttgacttatacctaactgggcttctgagtcaatgtttgcctgtggtctttccaaatcagctacataagcatttaacactagcgacgcagagcacctgctctgtgaggagccaagcaccaggtgctgggaaaagtcatctttaaaaaaaaaaaattccctgtctttgagcagaaagctaaatgctagcaatcactaggtttttctgaggttgagtatcttattctgctcattgggaatttaaaaatccactcacttacttcatagtatgttgttgcaagaatcacatgaactaacatgtaatactgataataggttaatacaaatactaatagcagctaaaatttatataggacttgctatgtggcatgatttaattcaagtatattgtgcatattgattgacttaataagaaaaatatctgtgaactttcaaataagaaaaatatctgtgaactttcaaatactatagtaaaattcaaaatgtgattactattcctgagtaagaaaatatgtcaagcagaaactaacctttcaaggtgaatgtgtttctgaaatgaattttgtggtggtacacattttcatgctggagagggtcagagataatggaggccaaagaagcctggagagactggccagacctcggtgctatatttggaatatagagctagaaggccccgagtctgcatcctgctgctgctgctgctaagtcgcttcagtcgtgtctgactctgtgcgaccccatagatggcagcccaccaggctcccctgtccctgggattctcaaggcaagaacactggagtgggttgccatttccttctccaagcataagagtaaaagcgaaagt

SEQ ID NO: 47324 - DNA, 2000 bp, Bovine  19866880596078
  misc_feature (1)..(1): n is a, c, g, or t
nacacacacaggaactgggataagctccaaactgattattttgttgacatatctgagtttgaaaactttgactgcaaaatattcattaaggcaaacaacttcccatctgttttgtaagtaatatttagaaaatacacttctgaaccaaggccatggtaggagtgccaatctaaggccccattttctgattcttgtaccaataaattcctgggcgatcagtgtagcctctttgattagaaaccttatttggaggaatagagagagaaggtgatggggcaggagtgaagagaaaacagaatccattttttctattttcatggagtgtcatcattattttttctgttattgtgcttatcatagtaagatacaaaaaaaaaaaaaaaaaaaacaaccaggcatcttacttggtaaaaggcaaaaagtacacaaagcaaaataatgaagagcctcttcctaatggtaggctgtctccttcagtgctctgcatggctgccaacaaagctctgccagtcactgagttattccatttcctgtaaaatgtatcctctctgctctgctttaaaatgctggacctgggactgcaaactccctttgtgcttcatcagataacttcctgttaaagtcccataagaaaaggcacaaaggaatcaagagggagaaggaattgctccttcctctggtgtttattgcctttatccacaataagctttcaccctatgacaggcagtgctaaaggatccagtttctcttattattctctgaaacatcctgctttcaaaggcagcagaatcacccagctaagttctctggaaatggtttggcggttacttggtactgaatgtgatgttgaatactttaataaaggaacaagggaaactggaaacctgcagcatacagtttcatcacaagtaagtgaattctcacctgtaggcaaatattctactagagcaaatgcccaaacgccctgagcacaaagtaatgactgcactcgacagtcgtggtggcaatgaggaccataagggctgtaagaggcccagtgccattacgcaccagaacactttctgaaggaagtaataaacttgactttaatctctgagatcaactcaatgtaaaagtaacagcttctagctccaaagatgactagaaattaatatttcttctagccataggaaaacatctctgaaaaataaatctaaattttattgtataggttgcatagttactaggcaatgagatttacagatacaaaccctgttatatgaatgttaggggattggaaagaagagcctgaatcttggaatagagacatctggatgaatttagaagctgaatatcttgaaaccttagaaactctgagtatctctcttgaaaatgaaaactgcctgccctcctatctccgaggaaactaacaatgcattgattgactctttgcaataacttcattaatcccctatgttaaattcatttttctaaatactagatttctgtttttctgagtggagtgtgactaatataatattcttctatacatttttactttccttaaaatatagtgaactttgataataatcattatccattatcactaagttttaactctatgtttttctaaaaaacataatagatgaaaatatcttttaaaatctccatgtttttcaatgcagaggtcatgttatgatataaatacagctcacagtatacaaatttctgacttctttcacatcttttctttctttcccccttcaatttgcagtgatagttgctattggccgggccaacaacttcaaacaaaacttaacagtttccacctaccctaaacctgcactttttcttgttctaccacgtttaacttcttgtttatcaaattagttgccaaattcattacagctcagcaaagattttaggtctactgggtgtcaagtatggtgcaagacacaaagctgaggaaacactaagcctatataaccctatatattccttctactccaccttaacaattt

SEQ ID NO: 47325 - DNA, 1235 bp, Bovine  19866880820252
  misc_feature (1)..(1): n is a, c, g, or t
ntctatatggattttttttttagtaagtaattaatataaatagttctgactggttttagaaaccatggatactgacaaaaatagaggagtagatgatgggaagcagatggatcatttaatttatttctcaattacagttgacatatcaggcacagaaaccctgcaagtcatctatttctttatggcccattctgcagctgtgtttattgtcataacaaataaatacattatctcattaatggaacgctgaatattttttattccaaaaagcacattcaaatacaatgcttcttctacaaaaggagcacaaaatggggggagggagagggtatttgcccaactgattgctgcagaggagtggggcctgtgtggagtgaaggtttcagaaaacaagatgtagtcacagcgaaagtgtaacctgttctcatttagatatgatctactagtcattctcagagagccatgctatcaaacagagtcacacttgtaaatctttatgcatttcctagttaatgcatattgtatctgagatgcagatggataataaactttattacagtacattttagagtgtcttttcaactagaagtgccagaaagacgggaggaaatatcagagcctacttctagtgctgtatttaatgttgtaaaaacaatatacgttggattaggaacaaataggtgctttattctcaagtgaacagatggactgttacagtctaacggtttccccactagaatagtacagtttctggtgggttttgtttggagtggttgctaaagattgactctaaggatcaaaaagcatacaatttttgattacttattgtttcttcactttggattaggaactcatctggtctataagtattcaatattggtaaggattataaaaaatgggaatgtaattattgaaaacgcaatccttggttttatttgaacctataacccatcaattaaccccattcattaattctcttgattatatatcctttgttatctgaccaaattggtcacctttattcaacagttgtatccactaaaaatacatgcaatccaaatcttgggaatattatatttaatatacatattcatagagatctatatacaaatctaagtttttcacattttacttttatgaccttagattattgatctattatgttgatgcaaaggtaagtgtgattttacattgctgaaatttgccatttgatatcggaatacattcttaaataa

SEQ ID NO: 47326 - DNA, 2640 bp, Bovine  19866880850661
  misc_feature (1)..(1): n is a, c, g, or t
nattccctttcacccaatatactgtctcatttcactatcggtgaatgtatttacatgcactgcaaagatagcaaaaagactatcagcattccaccctccaacaatgatggagtttccactgcctgctggtggtgtatctgttccaaaataccatttaagagtgttccctaggactacttatgactccctctacttcaagtatcaaagtcagaaactagggtttatgatgtagcctggcatgctggtactttgcttgggattgtgttttaacaagaacatctatatgggagtaaggggtacaggaagagaccggaagttgaactatgattcagttacaatagaagccacagctaattacacagaaagcactaagtttatagccagagataaccctaatggaagcaaggaccagacatttatttctctgcagcaacctgtcatttgatgaggggtgctctagaaaaggggtctaaacctgggtgaagcagtttcttttgcccaagagcatctggggagaaacttggctgagatatatcagccttcctgaagttgggatagagaatacctttgccctgaaggtgtgacctcagtaacacaccagcagtatgtaaaatagattgccttacattttccttccccacttctccagagatctcatgcttagcagagcatagcaaggatgtgaaatagaatgggaaaaaaggcaaaatgtggttaattcttaaacattatagttcctgaaatagatactccatacatggtaatgctaaagggaaaatagaatgtggtaatgctaaagggaaaattgagcctcagaatcttggaaacctagctttgacttttatgccagatatactgggcaagtaactgtatctctaggtctcagttgctccctctatacaagatggtgtttgtagtagtacttctcttaaagagttagaaaatttccctggggctgtggatctgaaaaatctctatctcaacatttcctgatactttggcaggaggaacttaatacactggatttctcactactccaaccaacaagcagtcaatgtgccaacagtgtgagtgggtttggactgaattatctatcctttacaaacaagtgtactcagaaagaatataaagaaactcttgctttgactagagatgcaagaattctgtcctggtaaaataagtttttctttttttatccatctatgaaaaggtattggcctgggaaaactccctctacaactgcagattcactatctggatgatcaactgatcacccaaatgatctttgttgaggtcaccaaaactttaatagtccagaacatgcagacatgtattacaattttagaatcatttatgagaaaattagtgagaaaaaaaaatcactagtgagaaaattatgaggaacaatggaagaaaaagagagctgactcagttttggatccctaccaggtgttccaggaaagccaactgttttctgagtaggtcacacctgtttaattagcaataatcagagcctttagatgatcacggagaaattaaatagctaaagataaatgacctaggagggttaacaatttaatcccaactaaagagcaaacagaatgcaatctaaaaacatgatggcaagcagaattgtaggttaatgaccttgcacttgataatttaatggagcacgcatagtggcaggctggaattaatggattataggaaataaatatatatactggcattttatgaataaattattctaacactaattgcaattaaattaccttgttttaatatgatatactaattaagccacaagtgatttgctgcctggttcttgcctggaaaggaaccaaacaaaagtatttgactcagctaaaatgtttgtgaatatatctccaaactttttctttcattagggtggaaattgataggaatattaattatttgctaaaaggattaccttgttcatttttccccctttaggatatgcatctgcatagagaaagcaccaatcaatcctaaaggaaatcaacccctgaatattcattggaaggacggatgctgaagctccaatactttggctacctgatgtgaagagccaactcattgtaaaagaccctaacgctggaaaagattgagtgcaacaggagagggggcaacagagaatgagatgcttggatggcatcatcgactcaatggacatgagtttgcacaaactctgggagatagtgaaggacagagaagactggcatgctctggtccatggggtcacaagcagttggacactactgagaaattgaacaacaaagagaaagcattattataacaagaaggtaaacctgtactggactctctttcatgaaagacacactgccagtgctgactcagcaatctctccaaaaggtgatggattcccccagtcattcaatttcatctaccatctatttcttaatactatataagtgtcacgctatagttaagaatcacataacaactgtccccatagttctagctatgcgtaaacctctcctggtttcatccaagtcagttgttccccttctgtacactaaaaattgtattgtgtttagctttatacactgttcttaccacatcccaatcatctgttcaagtgtctgctcatgtgggctc

SEQ ID NO: 47327 - DNA, 1531 bp, Bovine  19866880945375
  misc_feature (1)..(1): n is a, c, g, or t
ncagacaatatgatggtggggaggagaatgcagagatgttagtgaaatgttgaatacttttaggtattagttctagaggtctaatgtgcagcatggtgactacagttaataatactgtattatatacttggaatttgcgaagagagtacatcttaagtgttctcaccagacatagaagaaatggaactgtgtgacgtaatggatgtgttaattagcaagattgcactcaacattttacaatgaatacatatatcaaaatactatattgtacatcttaaataagtacaattttgtgtcaattatacttcaataaaaccagaggaaaataagctcaaggcatttgattcaaagttctgggaactaatcactgtgctattgggactcttcacctatagcacataatacataagggactgagagagcagttgtagaaagatgatacagaggatgcaatgacaatggtgaattgaaaaagtcatttaacgtcttgcttttcctgccagaatatgaaagattatctgccaaggtctctatcagatatgtaagtgaggatagagccctttgaccctgaatttttatgattctccagcagtttgccaattcctctcctctaaaacaatgttgcccccttaggaggaaaaaaacaaacaaacaagaaaatgtatttgtaacttgcattttgaatgaagggaaattggcaggtgatatcttaaaattccatttatttcaatttgccttctctgagagcagagacagtgtttcttaacactgtggtaattaatacgtgatgtgcaacgtctcattttattcagtgtatagttattaagctcctgccaagaggcaataaaagaaaattaaaatggccagggaggcataatatatagcattttttcctctgaagcatgcttttaaataacattcagtcagtacagtgtcatccaggccatttgaggattacacattgtgttattaataaattgtttgactgagatgaattgaactagcagggctaatgcaagttagatgtatctttcaaagactgtgaagaaactgttgcatatggaagggagtggcactcacatcacctgatgacaaattaacccaagtcaacatggcgggtgataagaattgggaaaaggtctatccttgttcactttctttcttcccaaactttgtaaatacaagcagcctgttgtaaggtgcatttcctgaaggctacacccaaagagagtgggtgtagtgtctagattatacagaagagccagtggtcataggcttctgcctccaccagtagcttagaagggttatgatctcaaagaatctatggtctttaaataggtctttgtccctatcaacaacccctgatcctaaatattcccttataaatacctgggtagggtacagagttatcattcttgtaaacccatgtcttcctgtgtggaaatatagaataagcaaaaataggaaaatatataaagaaacagagttacaagaatgttaggttttctgttaatatttgctaggatgagga

SEQ ID NO: 47328 - DNA, 895 bp, Bovine  19866881124762
  misc_feature (1)..(1): n is a, c, g, or t
naatccattatggcacactaaatgatcacctgaagtgataaaatcttactgggatccatatctctggagactgacaatttactaatagaacactgtaaatctctcttctccctttcttgcacattttgaatggaaaccaacgtgttctgtgtagggagagggagagaatcctgaatgtgtttagtagatacaggaacataggaagggcttatctgtgaacagtagctgtaacttcctgggctaagatgtgtttatctgttttcaaacctggcacaccttcttggtcactgtgaggtggggcaggaggataagacacgcaaacccacaggcttccttttctgatgagaaagtaaactctgtgctctagaggcagccgtggtgcctcccgatgtctcatgtctctgtactgcctcaaaaatccagagtttcttatatgcatgcagacattctgctgctcagagcaataacccagttctgccaaaagaggtggtaacaacagcatttctgtgtcttggtcttgcccttctaattgtgatggctcatgaagatactggccttcagtctatctttggaatcagcagaaaacaaccatttcccattctgaaacaggcatgatgactgattggagtaggtataaaaatcactctctgctttatgatgtgtggattaatgaaagtattaaaccattctaatgatagataaggaaattatttccactgtagttggaagaaataaaactgttcaatcttaaattaaagaggtctaaaactttgcaagctcatcaaaagtgcatgagcaacaaagaggtacaagtttataacccattctggagtaccttaggttcttaacatccatcatttttctgcttcattactgttggtgtgcttctcaaaag

SEQ ID NO: 47329 - DNA, 3692 bp, Bovine  19866881275936
  misc_feature (1)..(1): n is a, c, g, or t
ntgcagaagagccgaaaaagaaaaaggtaataagttttcatcattctgtatttactctaggaaataatatgtaaaatcattttgttcacaggtctcttgaagtaacattcataatattgcttataagtagtattcaatagttatcaacttaatctgtatgttttgcttatttttgcagaggactctttgggatactattaataagaagaaagcatcagcctcttcaagacataacaagaaggcttcaaatattcaaaatgtgaataaaacatttaatgtttcccccaaagctgacagagttaggagcccactacaagcctgtgagaatctggctacaaatggaaactgttccccaccagaaagcaatcctttaatccttgaagaaaataaactccccatatcacctatcagccccgcttcccaagagtgccacagggggacctgcttgccacttcctgttcgtcgatctacaacctacacatccctccctgcttctgaaaatgggggactggtgaaagcagacggtgccaacactgcagaagattttcattttaatgagaaaggcataactgaaacctcctttgactccatagacaacgttaatagtcaaattgaagagaatggtaaacttactcttaccccaaattattcttcaagtttgaacatcacacaaagccaaggacattttctaagtccggattcttttgtgaataatagccatgcatctaataatgaaccagaattcgtgaagtgcctctcaccagatatgtttgtgaaaggtaatacaaggcctgtgattttggaatcaaaaagggtacatgaaatctgtcggaaaattctaagtccagattctttcataaatgataattatggactaaatgaggatctagaaacagagtccatcaacccaattctctccccaaatcaatttttaaaagataatatggcatatatatgtgtatctcagcaaacatgtcaattgccattatcaactggacattttcaggactcacagcctcctcaagatgagagaaaaaatgcagctgtaccttgtatttctgaatgtcagcagttagaatctccaaaagctacttttgaagcatccaaagctttagaagtgatgtcaaactcttacacttttaaaaaacagaaccagcctaaattttcggcagttcaggatatttctagtcacagccgcaaaaaacctattaagagacgcccaatactttctgccactgtgactaaaagaaagcccacttgcgctgtagaaaaccaaatggagactgttaaaccaaaggcaaaaagatgtctcaatgtcgtagtgggtgactgcaaaaaggaaacagatgatcaaaaagagaaagatgattttcatccttttcttccaattagagatttaatacagagtagacctaagagctctaaaaacatagtaactcctccctgcaaggtagcttcagttgctcgtaaaagaaagagtgagggacacacaggagatgaaaatgtgaggataacagttacagaatgcatggaagcacaagaggtcaaaaggccccatttttctcctgtggagtctaaaacatcaactgttaaacacacaaaaaaagtggtaacctcctccttgaaacgtgttagccacagagagaaattaaacctgaagaagaaaacaggtgagtctcattcataaaatctttcatgaaagtatacctatatggggaatagtttctatttcttttggtttagtaaattgctattgagaagcttgaatcaacttgtacttttcattcaccggttggctttagtggaagatgagtcagacatagagtagggccgaattctgaaatcactgtgatctcattcttatttacatttttgatgtttcattcatcatggtttttctgcagtaatttttaaaaactattgtgttaaaatgctttctttatatatatatatttttttgtctttatattaaaaaaaattttttttaacatatttgtttatttggttgtatcttagttgcagcatgcgaactcttttttttccctgaaactttaagttttattttgtattggggtatagctgattaataatgtggtgatagtttcagatgaacagctgaagggacttagccgtacatttacatgtatccattctcccgcaaactcccccctcccatccaggctgccacataacgtgcagagttccatgtgctatacaataggtccttgttggtcatccattttaaatagagcagtgtgtacttaacttttccaaggtccctaactatgccttcccttccagcagccgtggttcattttctgtgagtctgtctctctgttttgtaagtgcattgatatgatttctttttagattccacatataaggcatgtcataagatatttctccctctctgtctgacttacttcactcagtatgacactctctaggcccacccatattactgcaaatgacattgcttcattctttttaatggttgagtaatattccattgtttgtgccacatcttctttatccattcctctgttgatttagactgtgtttccatgtcctggccactgtaaacagtgcttcagtgaacactggggtgagtatatccttttgaaccaattatttattagacccaaatacccttccctatttgtttaggatggtttcttttgtgaccaaaggaacctaatgtgtattctgcactctccacagcttttgagcagctgctagatatttaaatccatatctaatagactccaagatttggaactatttcttttcacatcccaaacagttttaatgatacataattccttagttgaaaataatattatgttaaatacttggtttgaagaataacactgatgcttttgttaatttattctttattggtttctgttgctttaaatcaagtatattcaattcatttttaatttaattaagttttaaatggaaagacattctaatcactaaagaattttttgtttcattttctccactgtctggttacccttaagcacataactaagcttaaagcagtttcttgagagtttgaagattgtatgcttttctttcctgagattttctagaaaaggtaaaattattcacacagttcaagtgagcaaatgttgtggtccctgccttccatatcattcagaatgcagctagttctcacacacgattggttacagtgtgcagggatttcacaaaagtgactgataacactggacttttttctttttaaagatcattttacttttggaattaaagtcactgatcccagctcaccagcacatacctgctgttcattgatagcagcatcaggcatgcctaattcagctgtgaaagctgctgtgtagtttcctcctgaaaaatgtttattctgaaatgacatgctgaaagtacagtcccaatagtctaggtttgctgaaatgaacgaacttatttgtcttctccctgttcttgaatggactgttctgatgccttcacctgtttgtggttgacttgtatttgtttattatatttgagaaaatacatattaataggcttgatgagcagcttgagaataaatgtgcttatcagcattttacctaaagctaatgggcatgtagtttataatctgaataatttatttagaaggatgattatgacaagggggggttgagccgcagctatcacatgac

SEQ ID NO: 47330 - DNA, 1440 bp, Bovine  19866881384479
  misc_feature (1)..(1): n is a, c, g, or t
naatgtttattctttttaagttttattttatttttaaactttaccccaattgtattagttttgcccaaatatcaaaatgaatccgccaccaggtatacatgtgttccccagagaatcttttttaacactaggttaatgccacagtgatggtgccctctaagctgatttgtggccttttaaagtttatcaagaagaaaatgcttggtattacagtttaataagctcaatagttctaatgatatatcttcttcctttagcaaacaaagctaatttccatggttgtagagtcaagtaaattttatgcttctttattgctttagctttaatctctgttgtttgagacatactgtcagttgaacacagacccaaattgtcccctactttcctcataggaatgaattatattttcttatactcagctttcagtctgtcactgaaggaccaaatgcaaaacaggctgataccatgctggtttagggccatttcacattacattgataaatcatgcaggcacaagtcatttgtcaaaaatacatttacttgaatcaaatttactttgcgtgcaggaggtgctggattcatatctagctgtcactaaataatttatcaaactctgatttgaaatataatacaaagtccttaataaaattaaacaaacttttctttacctaggaattgtatattgggtgaaacatacagctcatcactgtattacaatatcattttggtgatttcaatagttgagaggttggtgatgtattgcaaactagacaaaataaattcaatttaatatatgttacaaattactgttgatttcaaaatgcttgatattcttcacttcatgtgtttctacccattcatacctcttttcttctatgaaatggggaaaaattactaatctcatgtgctaaagacaagggattttcttttttatttggtctttgaacttcagtacttgaggcagtattaggtctagttcattaatgaaacactctcatgtacaaagggaaaagatagtacttagtatttataaaacttgaagctttttggggttttgagagaaaaaatatgtatacttgcctgttttgaaataatgggaagagggatgtctgtgccctttgagctggtgagcatgggatgtttccctgtcctcagccaaaggtatcctaggaagtagctgctaagtcgcctcagtcgtgtccaactctgcgcgaccccatagacggcagtccactaggctcccccatccctgggatcctccaggcaagaacactggagtgggttgccatttccttctccacctaggaagtagagaggtcactaaaatataatggctaactatattacctaactgtatataggctctagaatgtggcagtacatctttgaatcatcgttctgtcgttatcttagttatcaatcttaaatagcttacttaac

SEQ ID NO: 47331 - DNA, 1288 bp, Bovine  19866881392691
  misc_feature (1)..(1): n is a, c, g, or t
natgtatgatgcaaatgttatatatttatataatcatacattatataacatatatggattatatatacatatttgtatacacatatacaaatgtatgtatggtctataaatatacatagtatatatcatatcaagaaaaagaaacataataagatgtttagcacaattgagttcagcccaaatcaacagaatggacttcacttgctcctggcccataatgcctcttatacattatcccttaattagtataagaataaaggaagatttttgcatgtttgatttcattctgtagtatttcctatgggtacttcaacataaatctctaaaatataagataatatattcagatagcaatgccttaaaattggtgcagctcagatcagtaagtaggtacttgggatagtagagttaacttgagtctaatgattttttgtcacatcccgtgattcattggttttagatcttgggaaagtcatgaaataattgtaaaacacacatttttgtttgtagaaagctaacaattgtgcttacttatctgatagtaagtaaggggcttctctggtggctcagacagtaaagaatccccctgcattgcaggagacccgggttccatccctgggttgggaagataccctgggggagggcatggaaacccactccaggattcttgcctggagaatccccaaggacagggttaatctggcaggctccagtccttggggtcacaaagagttggagtcgacggagtgacaccacacagcacacatctaatagataggtcaggcaaggtttaaatgaaaaattgcttttgaattgcaaagcattacacataaaggaaccagtttgaggataaattaaataataatgttaaagtataaaagaatatgttgattaacttcagtgaaaaagctgttttccatcattctggaacattgcaccctaacaataaatatgctaataacaaatcttcaagagaagttcattaaacaaggtgctttctgtggaacattttcttataacattttgttaattagattctagttattgtaacttttaaatatgcctcaaaaattggcctttccagcaattcaatttattgtcattttaattaatctaaattagtgagctagtgttctaatcacttcagtgcctgatttgacaagcttcagatctagaaacctatgttgaaatacaaacccctctaccttctagaaacaataaaaggtactcctgtaagtttagtgaatttcttctttctctaagaaattactttaaggaaaagttagag

SEQ ID NO: 47332 - DNA, 906 bp, Bovine  19866881656724
  misc_feature (1)..(1): n is a, c, g, or t
nccccacactctgcacagctttggctaaaaggcactcttggtccagccttgacatttgcagctgtcacatccttttctgcatacttaacagctaagaaacgtggatgggggtattgctatttaaaataatgctgataatgctatctatgggaaagtccatattgtcatgagctcctgaaggtaatgtggctctccacaagtaagcatagaaaggcccctctagaatctgtatcatctggccctgctgagctctctagctacagctttcccacgtctgtccttaaattctattattctgccacactgagctacttaatgtttcctactgcgttataatcccttttgtctctgtgttttatacttctcactagaacactttctcctccttaccccttggtgccactcaatcttcaccattcttcttactaatctgagcttcaagttctccacttccccccagaattctccattttccttagatgaggtcacatccccacccagctttctcagtagcactacgtctttggcaattgtgcatttgttttcatctctggtctgtgagctgctgaaggagctagtattcctcagtttaggtgactgcataagatacaaaggcacaatggatatgaatttaaaaattatgcttttataatgctattgctcctataatttctaattaaccagggctctttgttccctgtattccatagtgctgttccttttcataggtgttaacagaaaataaattgctatcgatgtgattcttatatatagtgtaaaactggccattaagctcagctccatgccaacaaggtttaaatacagtgaactgtagggaagaatttccaagaagtaaactaattattactacatgctttgcctaacaatatttctgcttttctttgc

SEQ ID NO: 47333 - DNA, 783 bp, Bovine  19866881721577
  misc_feature (1)..(1): n is a, c, g, or t
nataatgctgggaatgtaaactactcctaaaaataaagtctattaaaaactggcatagagattatctttattttcttcatttgcctttgactagattataaccctaatatattccttaaatatattataagatgttttattttagaaacatcttccaaaatatctattgttcttactataggaaaatgcttctttaaaaatggcctttatttttttctagccaaaattgaagaaaagaaaggtgaatggttaggaaattttattcaagcttttaaaaattaattttccacttattattttatataaacccaataagaatacatttgttctaaatacaaaatgctaattgtgatttcacttatttggagcagaatgtcatattcagaatgctatttcaggaatacattgttatttcccaaagaagtaatatgtttcatttaattttcatgttgtatgcctttacatataattagaagaaatttaatcagctacaaataccatcacaaagaagcctgggaacttggctactggtaattggaattgcttttcaactgcaaattgctcactttgtgaaggtttcattcacagaccttttcttaatacatttcaaaacaacacttgaagttcaatttattttactgatgcatacaattttgggggatggaaatataggaaattggtggaaaatgatgaaagttatgcctattgggagtcaccgaagcatatctcaaaacaaaaaggaaacacacatgagtaaactaaatttattaggaagaactgggc

SEQ ID NO: 47334 - DNA, 1855 bp, Bovine  19866881745741
  misc_feature (1)..(1): n is a, c, g, or t
nttcttttcttagctatttgtaaggcctcctcaggcaaccattttacctttgcatttctttttctttgggatagttttgatcatgtctcctgtacaatgttataaaccctagagtaccagaactatggatggaggtccttaaaggcaaatatagttgtatattctattgggttaaccaaaaacatggataaccttgaacaaactttttgcccaacccaacagttacatacagtatgaaggtaaaatatgtgtcagtatggttttactattctgttaccttagttaagaaaacctttatttgtatgtctatgcagaatagcccaggtatatatgtgcataagtattttcatattttcttctatttcatagtgtttggcttaaatagcaggttaatttgtaaagacattactccaaatcaaataaattctcattccatttgttataaaatcattttgttaagtattattcaaaataattcaataaataattatgtgagaagacaaacataaaacaaaaatattatttaacaagaggttttagaaattgccatttaagaggtcttctttttctaaatggcttatcttttatagtgaaacagtacatgggaactcaaatgcaatagtcaaaagagtagaactattttgactatccagtcaagaagagtagtaccactcaaaattctcaattcctcaagctctgttgtattattattcctgtatagtccccaaaaatataccggagatgatgaaatattattccttctagaggaaaataaaggagtcagaagtgtttttgcaatagttaaatgttatatataaaccatgttctttggaataaagataaatagagaaagtgggttggactagaaaggttttaagagagataaataagaaggaaaggaaagcactagatttggaaaatcaaactataaattgacagacagaaattctggacttctctcaagtttctgtgtctacaaataattatattattaattgccagataacccagagcaaacaggaggaaaagtcacagaaataatttggactcaaaagcaaggatttaggaaaatgaaacttattaggctgaaaaatccagatagaaagtttggaagtgttttgttaaaagccagccctcttgtgcattccctgatcaatgagcaagtttaggggatttgaataagaaacaaaatatacggaaaaacaatctcctttgtgaattgtaaatactgtctcaaggtcaaatagcatattcttaataccaaaaatggtgatatttctagaaagaacaaagcagtcaaactaataaaggctgctttgaaagcccatgtgcttaaaataggaaatgggcctcattctcatgtttattgctcttggaaatttagaaaattggcagatttagcaaaatgtagatatcatatacggagaaggcgatggcacccgactccagtactcttgcctggaaaatcccatggacggaggagcctggtaggctgcagtccatggggtcgctaagagtcagacacgactgagcaacttcagtttcacttttcactttcattcgttggagaaggaaatggcaacccattccagtgttcttgcctggagaatcccagggatgggggagcctggtgggctgccatctatggggtcgcacagagtcggacatgactgaagtgacttagcagcagcagcagcagcagcagcaatcttttttccatcagatgttgatgatgataatttcccaacatcttgatttctcaattctgatatttttcatcataaatcaacctatgcatgattctttgactgtgggttgaaatcaattgaatgctttagaatcaaaaagtcaactg

SEQ ID NO: 47335 - DNA, 2955 bp, Bovine  19866880444479
  misc_feature (1)..(1): n is a, c, g, or t
nctggactgtaagggaagtctctcctatttttttaaggttgttctttacttttaaaaaatattactatttatctatttattttggctgcactgagtcttcattgctgcgcttgggctgtctctagttgcggtgaacgggcttcattgctacgcttgggcttctcgttgcaatggctgctcttgttttggagcgtgggttctaggggcgcagacttcaggagtggtagcatgcaggctcagtagctgtggtgcatggctttgttgccccgtggcatgtgaaatcttcccggactagggattgaacccttgttccctgctttggaaggggaattcgtaaccactggcctaccaggtaagtcccggaagtccctcttgatggggttttaacaaaggagatggaatcccaggatctgatgactgtaaaacacctactaaccttggggtcctctgattccgggactcagcaatggaatactgggaaagaatatcatataatgtgtttaacagtgatagaatcagaactcaaagaaggggagtgggaatctagcaaattttcactggagtgcacatcccaacctggagggagggtgctggtggagagcaacaggagtcctattttcggaatctatggatcatactttttaaaggcctaacacaaagctggcatggaggcaggatccaggagtgaaggaagacttaagccatctgggcatcagccggagtctcaggcagctaaaaacagataacgtcttgtcttgccttgctgacaatttcatctccaaagggagagaaagcaaagagaaaaactggtaattgggacaagaaggagtctatttggggtaggagaagacaagaaccttgaggactgtggccccagccttggggtccatctaggagggaagagaggctgagaagggagtggcatgttagtcatatgtgagcaggtcctggtgcaaaggtgtcagagagaagaggggtgattcttctccctaaactataaaaggtgatctggttgcaagggcaggagacactcgacggccattctgcttatgtagtcataagtgacctagaaagaaagaggagaaggctcgcaaagaagccagtacagccgcatggaaaaggaaagcaggagtgtcttagtcagagttctccaaataggatagacacgtgtgcacgcaaacctgctcacactcctatatacacacatccatgtaattcttttaaggaattgactcctgtgattgcgggattggaaagtccaaaatccatagaacaagccagattggaagttcagatgagagttgattttgcaggccggagtccaaattcttcagggcagcaggttggaaattcaggcaaagttcctacatggcagcctggggggagaattccttctactttagggaacctcagtctgtgcccttaaagccttcaacctattggatgaggcccatgtacaatattgggggggtggaatctcctttcctcaagtgtattgatttaaatgttactttcatctaaaaaccaggcaacatcaagattggtgtttgacccaaaaatggggcaccgtaccttagccctattgacaggtaagtaaccctcaccagaaacatgtagccaaggaccaattcaagaacactgcctggccacaggatgaaccccaggaaggctatggtgggatgtggctgaaaggacacggtggggacactgagaattagtgtgcagtggatagagggggcactgataacaagatgcagatcgctttcttcttggttgaggaggaatctctgtaacctggatagggaacgcgagagatcggataccacataagatggtgaaagttactgacctattcccgatgcgctgtcagagttgaaaaccatcagcttcagcttgtatgtaagaatgactgaaggatctgggaaacagagcgttttttgtttaaattacattttactaatattacacagtcctgaatttctcctgagggagtcatcatggatatgtccaaagattttgttgcaaagccttgtgcataacagtaagacaggcagagaacctaaacatctttaataaaaggatattacgtgaaataattatgggatattgtcacagtgcaatactatactgtgcaaccattaaacatgacaggaagatttcttaatggatgttgtctacagcatttggtcaaataaacaaagcaggttataaaaaatgagaaagatctgaggctgaagataagaagagagacctgcacaccttgaagtctaccagccccttggctaagacccattttgactcaggctgctgcaactttctggggatgtgcttggtgaactcctatcgagaattcagagagatcacagagagcccagaggggatgagagggatgcagggtagcattcagcttttcatgcagggaacataactggatataaatcgttagccaatttctaaaataaattacaagccaaattgctcagaaactaaattctgagcatttagaaatacaagttgcagagggaggaggtagcctggggtaacaggtttgagatggatcacccacttgtgcatagggactcctcaccccgtcctcccagccctgggcacggggctgcctttctttattctccttggtatcccttctgagagccaagcacagtcagagggcatggacccagtcagcctgagatcccgcagctggacatttaggacccaggacatcagtagggcttatgttcctttttcttactctccaccagggctggcaaactatggccatgggctgaatccaggcccctggctatttctgtatgttctgtgagctaagaatggatttaaaatggttgcgaaaaaaatattttgcgacatgtgaaaatgatatgaaattcaaattttggtgcccataaataaagttttgtggaacacagccatgccctttgtttatatatcgtc

SEQ ID NO: 47336 - DNA, 794 bp, Bovine  19866880553776
  misc_feature (1)..(1): n is a, c, g, or t
nttaaatgcaagtgatagtcttaataataagtaaactccagccaaccattagttagttgattgtgaagtgtgctttgttggaagatttgtgtgctgtatatgtgtctttgcagctctcactcactattactttttaagtatttatctcatttatgtacattggcaaattagtatgtttagaaaactttttgtattattttctaggtatcctcaattcctattatatcaactagaacaaaaggcctacttggtacgcctttgttgctggatggcattgaatcaggtaaggagagtaaaatgttctttattaaacaaaacctatcaattagtatattgaaatacagttttgacaaaagaattgtgaaagtgttgtagtatttgactggttttatttctagttgtgctactaaccaacagtgagactttaaatcatttatttttatttatggctgagtttctttgtttgtatgaaagtgtttttgtgattgacagtgtttaagattctaaataagctccttttttttggccctgatctctacttgagtcttttctttatctctggtctaactgatcttttttgatttagaactggaatgtaaacttgatgaaggcaaggataatgtctgtcctggtcactctagtatccttagtggctagaacagactgatatgtgatagatgatatccaataaatattttattgaaaagtgaatgaataagctgaagtgaaaagcaatcagaaatggttgaagaaggaaatagaaaggcaatttgattttatatatgattatctca

SEQ ID NO: 47337 - DNA, 1017 bp, Bovine  19866880607552
  misc_feature (1)..(1): n is a, c, g, or t
natcaagattgcattatcccacataatcagcattagttaataattatttatggttagtcctaaccaatcagttatttatattgttactttcaccatatccctaacagcaggatattagaagcagtgtagaaacttacagataacatatacacaagtgacaagatttactttactagaacttttatggttcccatttatgtttcttcagatgactctctaagaccaaatatgattttaaatgccaagatcacggatccagaagtggtttttgttgccaacctgacaaaggctgatgctcctgctctaacagcttcattccagtgtgacttctttctatcaacatccaaacttgaacagataatgacagcttctctgggagatcttaaagtgcttgcttgcccttttctcagagaaaagagaggaaaaaatattaccacagtaagaatgactttatatcctaagcttgaattgaaggatggcagaaatggttgattcatagaatcctaaaatatgagggctctatatttactccagcttgagatgatacagataaagatgttgaattccaaagatgttaaatgatttacccatgtttgtagtgacagaactatagactatttccagacttattttcattataccatcttttgctgaacagtatttgaattttagtacatacaaatcaatattccgtttcaactgttgctttttttcaccactatatatccaatgaatgactgagtggatgaatgaaccaaacattcagtggagtcacatgcccaaaagagattgtttttctttattacaaattaacttcaatggtgctttcacattactgtcaaaaaatgtgattttggttaaatgaattaactatcacaccatttggtttttaatattaaattgattattttatgttaaagagcatcattatataatgtgacttatttgcagtgttattttaagtttacaaaaaaatggatggataaagtgacttgtgtaaagaaatacagtgctgag

SEQ ID NO: 47338 - DNA, 1544 bp, Bovine  19866880661375
  misc_feature (1)..(1): n is a, c, g, or t
ntacccatatgggatgggccacaactgttctgaaggcccccagctacatcacctaagtagcattaagtcaacccaagattttttttaagcacacagttcagtgaatttaggcaagtctatttgttcatagaacaacatgagaacgttcccatcagctcggcatgttccctcgtgctgtttttcggtcaatctccccctctccactggccctaccattctgatatctatccccatggatgcattatgcccgttctagaacagtgacgtcaatagaatcatgccgcctgtgctcttggtgtctctgcttctctcaatcaacatgatgtctgcagattcaccgtgccttggtatctgtcagccattggctctggaccacttggtaaatgttgggagctcactagacaatcccacctgcccacagaggcacttgggttcctgagcaaacaaagccttgacatcccaggagctccgagcaccaaagcagcaattcttctagttgtggagttcatggggatgtgaaggaccttggctttctgtgagtcattaactccctgcctcttctccatccttccccacggcagctccccagttctgatgcagagcaggggtttcccaagcagcctcttgcggtccccaagtagttcaggatcttgatgcatgtgccatgagcaaggaggggaagaatgtggaggtgctgatggtgaaaggttttattagctgtgatgagaagccagtggtgggggccagggagggcactgctttcctgggcctgcagagtctgtgctaatttatccttcctctcaattgcctccaaacttcggtaataagcacgctggtagttcgctgatgaaatatattcttccaaagcaattttaataatcgtagtgtgtgctaaacccttaacaaaaaaaaaaaaaaaaaagtagaagaaagaaagagaaaaccctgcagccaagtcaccctagactgagcggcaacgacagaatttcataattaggaaatgcagtgtcatttcccaacgttattgcacctttgaaaaatggtatcaaactgaggcctgcatatttgatacccaattgatttcagattgcaagtcaactgcagcaaaataatgagctgcctctgccctggcggctgagctccagctcagagggcctgggagggaaggtaggaagggggaccaagccccagggctccaagacctctgaaacaaagctggggccactgggctggcaggcaggcaggaccgcacactgtcgtctgtgctaatttttttgcccaaggggctgattttgaactcttcaattgtgcttcaattttgctcaccagggctgatgttgggaatcagaggatcaaagccctagatgagaatggcctgcagttccccaccctcttatctaggctggccccagcccagggagcctgggggactgtgtgcacagcaccatctcacagacccccaacccttctccatcaccaccaggcccatcacccagtactgggtgctccaacatccattagggtttcattcataaaatagagct

SEQ ID NO: 47339 - DNA, 3335 bp, Bovine  19866880817418
  misc_feature (1)..(1): n is a, c, g, or t
ntccgtgtataccttcttatatgaacttcagaacagaatcgattgcatatttccacctgtaaaccaaattttgttaatgcacattggaatatgaaggtttaaaaagcaggaaaacagcactgacattttacagctacactgttacttattttgttcttattaactgtattcttacaaaggttcagccataatatttcagttccccaatacttcaattctctgacttaaatacattatgaaataagcaaaccattcgaggaagagggtgtgtcaaagcaaaataatagagacacaaaatgacatgctgtgtgaaattaataatatcccaatatatttgtgacactgagttcacatgcatgactgaagggcaatatgatcaaaaaaatgttgaaagtcttgaatgctgagttaagaatttaatctaggagcaagagtacaggagaatgtgtttataaaaaaagtaacaaggacataatataaaagccctctaatgtctattaaaaaaaaaagtggctttgttacatgtctttcaaggtctgttagctctgagagttcctaatcatatgattacataaaatatttttttaaaaattctaacttaccattgtcgaccattggtatgaagtggtaaataaggcttatattttctgtaaggagcatttctaaccatgtaatccactgactccaaaaggtcgatcatacttaagtactataaaaacaaaaaccaagttacatctgttacatcacaacatggataaataccaaattttattatattttctgcctagtgagatttcaaattatctgaacaatgaataccatagctgcttggtaattcaataatatatttcatcaaagttaagaaaccaccaattgtaagataatattaagcactgctgattaaacatcataccactaataataatatacatgccattttcagatatattaaagtgtgatataaatgtaaatcttagaaccaatgaaatacggtatctgttactactgacatgaaactcgcttagtgctaaaaccaaacatactttcctctggaccatcatttcaagtagtggcaacctataagctaagtttccaaattgctccagggaattattgcataactaaagcaagataaaattatttaaccaccaatacaaacaactcacatggaggaaaacacacacacacacaatgagaagataaagaaaggagaggtctaacctaagagtaaccagtacttatcatgtggatagcatgaacttaaaatgtatttgtaagtgtaaaacatactccaaattttgaagacttaaaaaataaaaggatataaaatattgtaacaatttctaattttgattacatgttgaaatgtaatcaccacttccctggtggctcagatggtaaagcctacaatgcagaagacacgggtttgattcatgggtcgggaagatcctatggagaaggaaatggcacccaactccagttctcttgcctggaaaatcccatggacagaggagcctggtagactacagtccgtggggatgcaaagagctggacacaactgagtgacttcacttttcacatgttgaaatgataatatttgggtaggttaagttaaataaaatgttattaattttagtaattaatttcctcttttcttactttgctaatgtagttactagaaaatttaaaattccacatataacttgcattatatgtgtactggactgcactgagccaaaagttcaattaactataaagccctcatcctcctttcacttccagttctccaaattagttattgaaactccttaggtacataaccaaacttgagaaacaagtaaaggaaaaaaaactgccaacacagctgttctaaaaattaagtaaacaatatttaatgtaagagtgtctgctattaaaatctgaggaaggaaaataaaaccattaaaatttttcatcaagaactgggaattaaatggaaccatgccatgtactataatttggtaggattctctaccaataagatgaaaatcataaaaaatgaaagaaaactatttcttatatttggtatttattttaaaataatacatataatctattttgaggaatcaaaactcaacaataacaaaccaaaagaaccaccagagcagtgaagaaggaacagtcacagaggacaaaagctgttgagattcaaggctactcaaagctggaagtccttaaatgaatcttacctgaggtttggtcagttcaattgcaatattttgtacttctatgttccaatcaagtttaggtgttttgagctctgtttctgcataaggattcatgtaaagttttgcagaggctgatattggctgaaaaacttacacaagatgggaagacataagatatgtttatatgcccttacctatgaaaaactgtaaataattatgagaacactgttaccttgaaagtaaagaaaaatcatcaaaaatatatttttaaaaatattaaaaaaaaatcatcaccaaaaactacttaagcacctatttatctacataatcggagaaggcagtggcaccccactccagtactcttacctggaaaatcccatggatggaggagcctggtaggctgcagtccatggggtcgctaagagtcggacgtgactgagcgacttccctttcacttttcactttcatgcattgaagaaggaaatggcaacccaccccagtgttcttgcctagagaatcccagggacaggggagcctggtaggctgctgtctatggagtcacacagagtcggacacgactgaagtgacttagcatagcatagcatatctacataataagaattcccaactcaatggtaaaagtagaatctccaaggaggaagattgtgttctatgcctctaagtaagaaatgcacaaaatatacacaatctaatcttgattatttacagtctatgtaaaactatgtttctcttccttgctgcaagatatttaatgattttattattcattaaaagtactaatacaggggtatggataaattgggacattgggactgacatatacacattactataatatataaaacagataactaataaggacctactgtatagcacagggagctctgctcaatactctgtaatggcttatatgggaaaagaatctaaaaaaagtggatatatatatatatatagatagatagatagatagataactgatttactttggtgcacacatgaaactaacaaaacactgtaaatcaactatactccaataaaattttttttttaaatagtcattattgcctgagatgcccccacaaaaaataacaatacaagacaggaaat

SEQ ID NO: 47340 - DNA, 982 bp, Bovine  19866880822782
  misc_feature (1)..(1): n is a, c, g, or t
ntcatgtggatgggtcaaacaattctttcatgatcagatatttataaattttgacataataatcagagttgccatgtgtattctgaatataactttggctgcatttcaagattattttctgaccgaattcctacccaaaataattactgagtgaaagactacaaaaacgtttaagactcttgagatatatccctctccactcgtacatatgataaaaacaaagtccatttcttagatgcacttctctctagtactaggatttctcatattttgaaaatctttgataatttgctttaatttgcatatattctttgataaataataaagctaaacatttctaatatctattagccactgtatcttcccttttatgaattagttaacattgttctctagtacctacagcattcgaatttttaggttaaaaattaaattattaatcttttgctatacttgtcatatcatcccagttctttgttttttaattattttcattgattttgttttaagagtctaatttttatgtagtcaaattaatttttatttttccatcaggatttttgccattgcttttaaacataggaaggtttccttttatttagagatttgatagcaattaacttgtttttccttagtctttctcttttcatttgaatttaatatttaagcctttgagtcctataaaatttgatagtgtacaaggtaaaaatagtattaatgaattttttctctaataccactgttgaacattcaattctataaatattcattgaatttatatgtatctggcacacacaaatattcttatattaaaggtagcaaggagctattatctatactttgccacaaattatactgaaatctaatcctactgctatatatttctaaatataatttcacttaaaacatggtccatttataacatactactaaaataattcaatgtttatactatattcaggtattatctagatgctgataa

SEQ ID NO: 47341 - DNA, 875 bp, Bovine  19866881066696
  misc_feature (1)..(1): n is a, c, g, or t
natttctttaaaagttttagtagatcactctacttaaatttaaagaaaagactctacaggattaaaaaaagttttagcagaaatggaatccctaattttcacatttatcaactcatttttgaaagagtaattcatatcaccctattggaaagtgagagacacgcaactttagtggcctaataatatttttattcctttcacaaataatgagatacataatatttttgttcttgattatttttggagaaaaactgttctgctgcttgagccctttgtctttctaagagatgaataaatgagggaagagtgctttcatgcatccagcttttctagtttgcaaactttgtgtcttggcaagggtgcctagcctagcagtctaggcgagggtgataaagaccatgcttctgtttcatagcctgctttttgcagcatgcttgaggctgtgtggaaactgtcattgcagacccttgatgaacactgccagatttgaattacatggactaacttgggagtcagttgtatcgaatgatctttggagataattccttcaaggaggttttattttataaaataaagaggttgtcttttaaattttgtggggctacaataatgtgttttgccaaacttcctttcagtggtcattgatttgtttttctagtattgcgttataattataaaatgctcttatgattacttattaccatgaaccttggctgtggaggttaggagaccctgtcttggttgctgattagctaattagattgcagttaacactgatctgttttctatacaggttggaaactgaaaggtgaaagaaaagctattacaagacacttagaaaatttttcatctttttaagtgttttagcaggaata

SEQ ID NO: 47342 - DNA, 745 bp, Bovine  19866881297991
  misc_feature (1)..(1): n is a, c, g, or t
nttcctcaggtctgctgatgccggaccactgcttatctctgttgatgagctttacttagcacttcctgtgttctcccatgctgggctggtgctgggggaacctgcagtgagcaaggccatttccccatggagtttctggtctagaagaaacccaaaacaacataaatattcatcagagtgggggcagctccatcatcgttatatttgcttctgtcccgtggccccgctgcttcttgggaaagtctgggtctgtgcgtggatgagccccttttgcttacttgaatggtctcgtgtagcccctctccactgggtccctcctgggaaccacagaacacagataataatctgagggacacttttctcagctctgcccgggatggcccctaacgaggactgtccgggtgcacaggagagcagtgaattccccacatgcagctgatgccttagggcactaggctttttctttttttcttcttctttgctcctttgtgacacattcttccgttttctaaactctgaacgttggtttcccttgtttcctgcctcttctgaaccttttcttttttaatctccctgcttggattatttcttctatcctttattcccctgagcacagagggagaaagcagaaacacagggctgaggtggggtactttcattagtgatgggtgatgattctgcttgatttgaaagtctgcacatggagggggtgggatctaagacaaacacacgttgccatctgtaa

SEQ ID NO: 47343 - DNA, 776 bp, Bovine  19866881596445
  misc_feature (1)..(1): n is a, c, g, or t
ngggactgggacagggtagagagaggaaccagacataaacatgtttatatgagggaaagcgtcacacagagggacttggaagaaaaaaatttcccctaaaaatcccttcatcgttaaatagttgtgtagaggttatattctgtctctgagttaagcataataaatttttaaacaattgaatgctacttttaaaatctgaaatatatgctttgaaacaaacttccttaatgttaaacctctgctgtttttctggtgatattaagagttattgaagatttttaagctttgataattgaaacgttgatagatgaatcattctatttgcacatgggcttcattaacatatgtacatagaaaaacccataagtcctttttaatatcatttgtgatacatgtaattacagttgtctttgtgaggacagtgattagggtgggaggaagcagtttgctgataataggcatcatctggagagagttttggtttttgccatccagagagaggggtctactggcagccaatgggtagaggccggtgatgccactgaacagcctgtagtgcttgggactgctcctccctggaaaggatgacccagccccagatgtcattggtgccaaggttgagaaaccttgccttaagtgtagtttaaaaattgattgtatatctcagactttgagatttagtctgacaccatccgtcagactaggacttttgggaattaggtagaaccactttttttttttttccctagctgtctgaaatccactagaatatatgg

SEQ ID NO: 47344 - DNA, 1579 bp, Bovine  19866880141820
  misc_feature (1)..(1): n is a, c, g, or t
ntggcatgttgagtgcagaactctccccagcatcatcttttaggatttgaaatagctccactggaattccatcacctccactagctttgttcgtagtgatgctttgtaaggcccacttgacttcacattccaggatgtctggctctagatgagtgatcacaccatcgtgattatctgggtcgtgaagctcttttttgtacagtttttctgtgtattcttgccacctcttcttaatatcttctgcttctgttaggtccataccatttctgtcctttatcgagcccatctttgcatgaaatattcccttggtatctctaattttcttgaagatatctctggtcttttccattctgttgtttttctctatttctttgcattgatcgctgagtaaggctttcttatctctccttgctattctttggaactcttcatttagatacttagggcccacttaatgaccttactttaacttaattatcctagtaaagaccatgtctctaaacaaggtcactttcagagacattaaggattaggacttaaagatataagtttcaggcttcccaggtggcactagtggtaacaaacctgcccaccaattcaggagacataagaaatgcaggtttgatctctgggtcaggaagatgccctggaggagggcttggcagcctactctagtattcttgcctggagaatcccatggacagaggagcctgatgggctacagtccttagggtcacaaacagttagatacaactgaagtgacttgacaagcatatgatttcaggggacacgcaattcaaccaataacacctctctacccaggagtattgaaagtttgatgtgtttttcatacatttcaatccactctttaatgaacctgtaatattttagcagcaacaatacatcttgtgtatgaaaaaattctctgaaaaccaagttatacctgtttgtttaattcattttcatgtgtgaaattaaaatatgtatttggggacaacagccaattaatgttatcaactttatatgtctctaaaggacaatgaaaattattttgaagatcataaatttatacatatatgtatcattattttattcgtcataatatcaatgctatattaccagcaaaataaattttaaaatagataaatttgctgtttatttctagattcatagtttacagtcagggaaaatgagattgctggatgggtttaagcagatggtaaaagaaggaggaattctttctctttggcgaggaaatggtgtaaatgttttaaaaattgcacctgagacagcactcaaggttgggacctatgaacaggtaaaatattactgtctgtggaattttagaagacatattttaaattttaaaaattttagacttttatgagagaaaacataaaacattgctggagtgtgctcaagcaatagatatgaatttaaatataagtgactttatttattcttatttatttttgatattttcatattgcttttgtttcaagaggtaatccagggaccatattataactgtaatataatctattctattgtctattagtagttcttgatttcagttttc

SEQ ID NO: 47345 - DNA, 1610 bp, Bovine  19866880548033
  misc_feature (1)..(1): n is a, c, g, or t
nacaaaaaaaaaagatgtcatctagtattggctttaagaaatctatcctcttggtatcgagcagtcaaatcaacttttgttatggtttatttagaatttaaaattccagtaaactagatctaatatagaagatgtcagtgaaaaaaaaaaaaatgaaagtgaaatcagtaataaaagttagattttttttggtgatgtgttgttaatactcaaagagaagcatttttttaaaaggggaagataatgttttttggtaaatgtttaatggtaaatgataatgttttttggtaatgtttaatggtaaacattttaccagataatgtttaatttatttcttctagttatagtcaggtaagactgcctccatgttttattttgtttaaagttgaatcacttttggttggataacttgttttaatgacattactatggaaagatttttaagaattgagaccaatcatttttaattgaaatgagaggtcatgatatttagaagcatgtttatttgtttaaactggattatttaatgaatattcagttgagttcagttcagtcgtgtccaccaggcttatgcatcttttaatacctttccctagtgtatgtcagtgtcatactgaatgtccaagagtagtagattattaaatctgattaatgaattagattttaaatagtggtcagttattgttttccttaaagagagtaatgctgtttttgcttattatgaatacttaatctttttttttttgcccttaaatgctgacccaaggctgcattacaggtaaaaaaaggataagacctaatcaaactaaaaagcaaggaaaagtatgtctaatgtaattatttagactttttggaattgaaatcaatcagttgaagaaacagtggtgcagtgcacattcatgtacatgccttttggatatgtgcacgaatttctgatagatttagacctaggaataaaattgctggatcatagcgtatgtgcatgtgtgtgtatatgttccatgttagtagataatgctgttatttttcaaaatgttataccgttcctggtaagcagaactgtgtgagagttcccattgctccttgccacctcatcatattgcgagagttttcaattttttgcctattttggtgggtagatatggacatcttgtggttttaatttatgctttagtcactaatgaccttctctgatgtttattggtcatttggatatcttccttgttaaatgtctgttagtctttctcccatttttccaccaggttgtctaactaactgttgatcgtatcctcaaatattctagacattagtcccactttggggtatacacattttaaattttcacatagttttaaaaatatcttttctgttaggtgccttttgtgtccttcccaacccaagatcacaacagtgtatctcctgtaaaatcttgtgtttgtgcatgcatgctaggtcacttcagttgtgtctgactctttgagactctatggactgtaacctgccaggcttctgtccatgggaatctccaggcaagaatactgcagtgggttttcatgctctcttcacaatccagggtttgagtctgcgtcttggcaggaggattcttcttc

SEQ ID NO: 47346 - DNA, 722 bp, Bovine  19866880742365
  misc_feature (1)..(1): n is a, c, g, or t
ncagtagtttttttttttttttaattatttggaggcttttcttgattggtgctatacttttaagtatttgcatcgaatagaaacaatttaaaattaaacttcaaagatgacaacagagccataaatatattgatactctggttagtagcattatgttctctaccttgtttcctgcttaaaaaattatagttcaagtattaatttatagtgtgtttgtcatcttagtatggtagctgatgatgaagatgcattgagtgattcagaaaccactgaagccctgaccccagatatcttagctcggaagtaagtattggtaactataaagcatattccacaactgtaaagctgtgtttaattttgcagagttaaagacattttactttacttgtacaagtgtaaataaaaagcatgtgctaaatgaattaagtttcatctagatttttcatagcaacctgtatagtcttatttctaggttaaaatcaaagtatgtagatgagtaccagaagctggtatacagattccctatgttgattgcctgcatagagatttttttttttttttttaatatcctgctacctgggtattaaagatacaagtgagataggtaaaaataagttgaattcctaaaaaagttctgttcctttgctgttcatagatttgtctccacttttcttgtttattgttttctatacctattaccattctctggcttttttttcccc

SEQ ID NO: 47347 - DNA, 1725 bp, Bovine  19866881114336
  misc_feature (1)..(1): n is a, c, g, or t
nctggtaggtttgtaataggttgctctggtggtttggtttgtctttatgagggtcggtataggggaaaagcaaagcaagagaaggaacatggagtgaatgcagctccctttagagcctggttacatggactcgggacagttcacctgatctgtgatcgtcattttctcaacttcaatgttattagaggtcaggatatctttgagataggtcactgtttctggagggagataagggtttcttcccaagatccaaacatgatccatgtgaaaaagccagatgattgtggtacaggagtacacgagggcgtagttctcatagtcggtggccaggacccagtacggagctgacggcatgactgagaaccagaggaaggcagtattaggagggaccagggcaagagaaaccttcatctccagggtcctggaagccaggctctgggattctagttcttctacatcagtgggtcttcattctggcttcatgtgggaatcatatgggacctctgaaaaacaccaggcgcatctctccccaccccaactcccaaaggccgaactggagcttgttggtactttggaaagcttcccagtaattccaatgtgcagccagagttcagagccaccattctggatccccattccctgactgcaggctggtacctggaagcccgtaatatctggaagttgggccggatcccctggactgacaggtgcactgagcacaagtgcctatggagccgttactcagtaagtgcagttaggaatgcacagtcaggggccccaggctttccaggtttgtaccatccagcttcctctataatccacctacaggaggaggtagaggctaatgttggcttgcttgtttttcttcttgtgtgaactttgaaaaccccactattcttaagaatatggtaaatcaggtgatggctgttgtttagtcactcggtcatgtctgactctttgtgaccctatggactgtagcccatcaggctcctctgtccatgtgatttctcaagcaagaatactggagtgagttgccatttcctgctccaaaggatcttccaaagccaagggtcgaacccgcatctccttcatctcctgcattagcaggtgagtttttcaccactgagccgctggggaagcccaaataaggtggtaacaggttacaaattcttcctaaagagcctatagagattcactgattgacatctgagtagtgttgaaagttcagtattaaaagggtctttaagaagacagatggagggtttacttttccatttgaatccagaaatttcctttgtgaacttgacctccacagccaagccaagtgtgtggctcaatggcactggctccattgtgtcagctccatcttaggcctgcactcctagccctcccctttttcgccctactgggctttagcttactcacaaggaaagcacccaagccaaataagttccctacagtctttatctcacacgaaaactgaaagaatgtcttttgctgacacaggtggttaatggtcatgagacccctggggtgagggtaggaggaggcaaatccctcagtttccgtcagtgtggacatgcttcctctagtagtcagattctatttttagctgtggccccattaagcatccctgtcccccttttggcagaacgcagtgcagctgggaatgcctctgatggtcgtctacatgattctgtctggatgtaagttacccataataaa

SEQ ID NO: 47348 - DNA, 1214 bp, Bovine  19866880158032
  misc_feature (1)..(1): n is a, c, g, or t
natgttggaaatttggtctctggttcttctgccttttctaaaaccgcttgaatatcaggaagttcactgttcacatattgctgaagcctggcttggagaattttgagcattactttactagcgtgtgagatgagtgcaattgtgcgatactttgagctttctttggcattgcctttctttgggattgaaatgaaaactgacgttttccagtcctgtggccactgctgagttttccaaatttgctggcatattgagtgcagcactttcacagcatcatctttcaggatttgaaatagctcaactggaattccattacctccactagctttgttcgtagtgatggtttctaaggcccatttgacttcacattccaggatatctggctctagttgagtgatcacaccatcgtgattatctgggtcatgaagatcttttttgtacagttcttctgtttattcttgccatctcttcttaatattttctgcttctgttaagtccataccttttctgtcctttatcgagaccatctttgcatgaaatgttcccttggtatctactagaaggatttaagggataaaaagcactttcttttaaaagcaataagggaattttaattggagtaagtgtatgaataatacatcaaatatattctatcatttttattatacagaaactgctgaggtcttagagatgatgactgttaattaagtttattaagtcaaagccttaacagataaagaaaatgttaggatgaattaaaaataatatgaaatgagcttttttatcagtaaaaggagatttttgtagtaaaatgtctataagtaactggtactttagttgttcagcaggtacagtatacatagatcattggattaaaaaataattctatacttaatttaatgaggtgttcagaagttacaagtagttactttcagtctcattattcttcatacagtttagcaccgtcataccttttaggatgtttctgtcattgaaaatgacaaacatgttaaatataaaactacacatgatgacatggtttagaaaattatggatgtatttcagataggttccatatttttctgtatttattttttaataattcaacaaagtccagtttaataacatctcaattgctatgcttttgcttttttatactgcttagggggttctcacagcaagaatacggagtaattttccatttcctccttcat

SEQ ID NO: 47349 - DNA, 1359 bp, Bovine  19866881006478
  misc_feature (1)..(1): n is a, c, g, or t
ntattagttatatattcttctctgtctctattttgaagcagttatttggaactcttcttttatagaaaattacaaaaattactgaattctaaaaattaatacatacacaatccttctatgtattttcattgattaagagtagatatcttcatgagtacacattatggctagtgctacagttatattagttttataataaaattattttactaaatgtcagctttgtctccacagaaaatgccacttaaaatactaaataagtaattatagtaattaaaaaaacaacagcaaatgcatatataatgcttaccattacaagcactatatactttaagtcactcttctttacaaaaattttgtgaagattattataatattaatctaaattgacaaataactaatcctaaaaaggaaagtaataacttatctaagggaacacagttataagtggcaaaatcatgatataagctcattcatctagtttcaaggtctggtctcttaaacttgtaaccataaatgtaatctaaatcttcaccttgcccttgccctcactgctgacaattaagccacctacctttgtgcccagctttgagtctccaatgtccagagcactgcagagtcacaacatgaccttaatatgcctagtgctgagttgctgcagagcaaaacaacaaaaaacactaatgaactaatgttacttgaagaaaagtggaaatcaataaagtaaaaatggaccattgattttaaggttcattgtttgatggaggtggcttcatctactttgttattaattttattggttcttaatcaggtttagagtgctttgggtatacaagatgtatatagtatgtctataccacgcttagaaacgttgttattttgcatccacagttaacctttaaaatatgttgcccctttcttagcttattaacattcaatcttgtattaatttccacctagttaggttaccaggtgtagcccaaattaaccaagcaaagggaaaaaacagaatgctcaattaaattttcattccagaaaaggaaaacacatacacacacacatactccatgcagtcttcaaaacatacttatactaaaaaatgacttgttaatatgaattccaaatttaactagatgtatattttacctgtcatatatttatctaacataaattggggatatgggatataatcaaggaaaagttgctctgaatctaaatgtggaattgtctctggtttaatgtggaaattctcatttacttatccagcacccttggatcatggtacctgtttgaacctttgtcttggtaaaaatggaatcatgagatgctcccccaatcatggaaattgaagggaataaa

SEQ ID NO: 47350 - DNA, 1590 bp, Bovine  19866880821671
  misc_feature (1)..(1): n is a, c, g, or t
ngctactatttagtgctagaatgtcactaatgttatagaccacttctatactcagtcactgtcttatacctctttccttttcacacaaaaaacagctgcaaaaccacgtttttctaaaaccagtcaggagtaaacttttttctcatttgtcttctagacacgaagatcgattgagaagttattagaatgggaaaacaataggttataccacaaggtgagtaccatggggagcagcttcatactgttgaggtctgaactgcacagtatggaaacagatgcttttgttgaactaaaaatatgaaagatggacaaatgggttagtctgtgtgctgcaataaaatagagctcatttttcttcttttactctcctacttgtctagctgtgcttgcactggagactgagcaaaaggaaatgtgaaacgaataacatgatggaatatgtaagttaaagggctgttttgtgagtttctctattaaatgatcatttattttgcttctgatcttattctttccatgattattaatcagcaaaggtgtcagaagcttaatctcctgagtgcaaggattttctacggttcacagatgcatggtttcatgtgcaagactgatttataaagttatgaatgacttgaaaacaaggcttcactgtgttctgaaaaataataaattaattgccaagataaaataggctgaacatgtgttgatggagtgtgaaattttagatgctgtataaagaataaccacaactttggttacgcagcaagtcagatatggcttttttatataatgctaatcaggtttccaagtatggaagaaaacctttcagccaagccgctggagcttaagaaacctttagcctttatagattttaactgccgatacctcagtggcctttaaagaatctttcaaagtgttgttgggatattattctgtaaaaattatcttaaaagtaaacaggagataagatgttgctcaccctgtgtttattctttaaaagatatctaatgggtatgtgtatacagtcagttttagagcttagaataggatttaatttaccaactacttgatttacttgaaaattttttctcagtttgaaaagttcagaataatatagaaaaagtgtcaatttttattctcccttgagcctgggtgttttatgttaaatatgaagattaatatatgaaaagaagaactgagcacggggttgagtatctagcacatcatttctgacaaattttgtctattctttgacacagcatagccatcataggtagcgtgtgtgtgtgtgtgtgtgtgtgtgtgtataaaagattaatgaaaacagtgcctggatactggaaatagttggaaattatcataaaatcatttttctctgtagcattttctctttctttcattatcacacaatcaaatcccatttctagccttgaacataaaagatgtctttaaaatgtctcttttttcatagaatagctctattcagtgaactaaataatgtagattttatcattatctattatatcaaacatgttaatttatgatggtaaaaaggcacttgatacttttgtataatgataaaagcacattcaa

SEQ ID NO: 47351 - DNA, 1712 bp, Bovine  19866880831652
  misc_feature (1)..(1): n is a, c, g, or t
ntgcggggcctctgggctgggggaggctgcactgagaggcctttcagttcttttctgtgagaaatgtgtgtctgggatgccgagctcaggattgtggcatttaagagcccagggagccttgaatggtggggagggaagcttcctttttgtcccatgaatttcaatgcaaagaaaagaaattaaccacaacttaactgaaagagaaatgcaaagagactctgtgtcaccttgaaatgcctttccttccgggaaagcagatttcagctaacatttgagctccggaaatcctcagtgtatttaaacaactttggaaggtgaattacctggtatcattgcttaaaaacacacacgggcttcttgtcttaggctctgtgccctagggattaggacgcgtaagcagcttctatatttgcagcgggatccaggtgtcctttgaattgattctagaatgtcatctggcttccattccaatcaggataattctgggttagaagggtcagaaacagtcagactaagtgccaaatagagatgtccctctcttgatgattgaatcagaccccctaccctctgctagagggggagtaaggagcccttgtaaacctctatccacctgtctctgtcctggacccagctttctacttagaatttcatgtggaatctatgtgaacttattgatgaaattattgaaattgttagtgaaaaattagtgaaattattgatcactgaggagtctctctcaagagttttacactcacatcaagaatctgttggggacttcccttggtggctcagtggataagaatccacctgtcagtacagggacatggattcgatccctggttcaggaagattctacatgctgccaagcaactctaatcttgtgcaccacaacaactgagtccatgtgctctagggcccatgaagcacaactgttgaagcatgagagccctagagtctgtgctctacaacaagaaaagccgctacaatgagaggccagtacaccgcaactatagagtagcccccactgtccacaattagagaaagcccaagtgcagcaacgaagacccagtgcggtcataaataaataaataattaaaacaaaacagaaaactctgttgagggaggaggacccctcaaagctgtaggacagtttaaaaaaaaaaagaaaatacaagcagaattattgcagcatgtctttttatgtcagtttctgtaacagtgcatccaatcctgaacaggccattgtattcctgacttgtcaatgagacttataggtcatgcctgtgaaaaggttaagatcttggaaaatatttccaaatattttctttttttttgcagcagttgtgcagaaggtccctggtaatgctgacaggatgaagaagtgcttggagatagaccaagtatagcccattctcattatttgcagtaattatgctccagaaagtcactgtgaaccacaaattagcaaattctgaactgttgttcttggagaaatacagagttagcttctttggagtctctgctcacaacaaggctttcatccatcaagcaatatataactttgctttatgtatgtttccatgtaaagacaacttatttaatatatacatagatagagctgattcattcattttgaactcatggccaacagcaccataaagcatgcctgaaggaagcttgtctaacttttctccttaaggcagtctcagcct

SEQ ID NO: 47352 - DNA, 1501 bp, Bovine  19866881004655
  misc_feature (1)..(1): n is a, c, g, or t
nttagaattatgtatgtatatacacacacatacacacttttttccgtatatacggaactttttaaaggtttgcactggaacctgggtcaatctagtaaaatgaaaaaaatagcttatatgacaaaaagtcacttgatacagtataacaaactttacctaagtgctaaatatgtatatttacaggagtagtgattagaattatatgtttccccccaaaacttcaatatcaatgctaaactttaatagctatattggcttttaaaacttaaggacaacttaaataagatctttggagggaaaaaaagctaatataaaaactgtacttttgttttccaactataaagcaagtttccaactataaagaacacaataatatacaattttctttaataaagtttgttgctcacagttcctaaactcatatttgtaatgtctaatattttattcccaaaaacatgtgtgtgtgtattcactcacacagtcatttcaacagacatgactacctttggtcaatttcttttaaagtgatttgctctctaaattccagactcccttttccaacttcacctaaattgacttaaatttttatttaacacgttatatagtctttagggaccaaatgctgtgaattagcccatatttcagttttgagcatagaatcatgttttgaagtcatgtgctacaacagattcacttaagaataataaaaactcaactaggcaaagtaagcaagtaaaaaacaaacaaacaaaaaacgcctagctcaaattaggtctccatttgtttactagaaaaaaatcaatgtcaatgaagacttaattttacacgactaaatattctgcagccaagactggaacaaagaccaagccaccttaaatacagatttttttcacaattataaaaaccaacaaatttttatcaaaagaaaaatctcatcaacaaaaacagatgatactcatttgacaatggctttaatttctcaataaagaaaaatatctatctttaaaattcaactgcatatttaccaatttaccaataattttcattactagacttagctgggggtaattagaataaactgaaggtataactcatagggaccttgatcatgggtctgcataactgctcactcatcaaaaatttttaatgaattagtttatttgaaaactattccatgctcattaaggacataggaacaaattcctaaaatcctttatttggtactcttcaaactgtttgtcacacttaaattataaaagataaacagaagaatactgtattcaaggtagcctccaatcttctcataaaacattatatagcaagaggaaaactttagaacaatatttttcttaaaaaaaaaaaaaaaaatacttcccagtgccctgtaatacataaagcatatataaaaggaagtataaagctgtgtgcaattcctggccattgcgtaactttcccctttgtaaaccaaattgtagaataacaatgcagttatttctctcca

SEQ ID NO: 47353 - DNA, 935 bp, Bovine  19866881309391
  misc_feature (1)..(1): n is a, c, g, or t
nattacatagcctatttctattaatatcttccctattttttggttgtatactccatatgatcatctcttcaaatgacaattctgtaatatcattttcaaggaaagaaggtaaagcaattcaaatgctttttgaaataccattatattggattgagatacataattgcttaatcaaattacctttaaactacctacaataacttataggtgaatatgcatagcagtttagtcatgggaacacataggttgctttgctgtgattttagggcttttgaatgtcattttttttctctctctgaaattgccaggcttcatcaggacaaggcatctcagatatgctaagattggccccatgggaattggttgggttcctcctcagtttttatgttgggaggcataaaaattcaatttggcatgcacaaaactcctactttgcagtttgtagtagtgttactgttttgtgccctactaacacaagaaagtgaaaggaatgctagtcgctcagttgtgtctgattcttgtgaccccacggactgtaacctgccaggctcctctgtccatggaattctccaggcaagaatactgatgcaattggagaaaggtgggaggggggttcaggatgggggacacatgtatatctgtggctgattcatgtgtggcaatgtatggcaaaaccaccacaatattgtaaagtaattagcctcctattaaaaatatatattaattttttaaaaaagaaaaaaaaagaatgtttgtgtctatgttcatcagggatataattttattttttatctggtcttttatctgtgtctttatctggtttaggcatcatgatatgtccaggtgtgagtttataggggttcatttgtttgaatctttctgtaatccctgtaccggatttctgtttcctgcttcagactcaggaaattttcagc

SEQ ID NO: 47354 - DNA, 1015 bp, Bovine  19866881489865
  misc_feature (1)..(1): n is a, c, g, or t
natagcttacatatacgcatataatggaagaaatctttactaaggatgtcttccaagtgctttacctagctgtagtaattaattctcacaaaactctgtgagatagataacattaccactattttgctgatgaggaaactaaggttgagaaggttaattaacttgccacagctattaagcagctgagcaaagacctgactgagttcaagtctcacaccaactcatgagtccttgtgcaacaccacaaagcaccacggaacttaacccacagatacaggctcagttgacctgcagaataaaccattttctctgccagtccctgtcacaaccccacccagctggctcaccaagaacctggaagggcggcttcactacagaggtcacaaaaacatgggaaatcttgactggcagtagccaccttctccttcagtcctccaggctaagtgatcaagctctggggggattaggtaatctttggcgaaagtgagatcctggttgccaggattcattggagcctctcaatttctggtgtttattgtacacttaccctgttggagttcctgttttctagccagcaataagactgaatttggggctaattcatccatttaccatttaccaagtgatacagattcatctgtctgcgaggtagacaaaagaaccatccgaattcttttccttccgttagatgctcagcaatgggcgagcgtttgcagtcttgtccatcctggctcggcaggtctcattctccagggccttccagagagctctgggaaaaagggatgctgagtggccttctgcagctcactcgtagccagatttggataacatccaagacctcataactgatccctttctcttcttttttggatgccatcaaccaaggggtgtttaggaatgtgttaataattcccaggagaaattggccaggattacctagtcatgactaatgaagctgtcatctgccattccttcctgctgtttcataatgctgtccaaggagtgctttatgaag

SEQ ID NO: 47355 - DNA, 1813 bp, Bovine  19866880166937
  misc_feature (1)..(1): n is a, c, g, or t
ntgcttttgaactgtggtgttggagaagactcttgagagtcccttggactgcaaggagatccaaccagtccattctgaaggagatcagtcctgggtgttctttggaaggaatgatgctaaagctgacactccagtactttggccacctcatgggaagagttgactcattggaaaagactctgatgctgggagggattgggggcaggaggagcaggggacaacagaggatgagatggctggatggcatcactgactcgatggacgtgagtctgagtgaactctgggagttggtgatggacagggaggcctggcgtctgtgattcatgaggttgcagagttggacacgactgactgaactaaactgaactgaatatgtcacctaagagatgaacactactcgtccctcaaaataatagttctcttttgtgcttagaggagataatgaatggaaagtgagtaattttctggtctttttggataatctggatttaaaacttacagattctccaaaggcaggattatttaatcagttggcataatggatagtaactctttcttcttttttttctccagaaagaaatgtctccaggtagaaaaagcgatttaaatagagtcagaggcaggactccagactctgcccaagtcactgcctactcttcttagctgtcttccaggtcaatacactgataatgtgcctagagagtcagggcagtgaaatagttgagactgggctgttctctgttggaatcctagtgtttcctttcaccagctgtgaggccaccagcaagttctgacatcaagcatcagtttcttcatccattaaatgaggaatttatgataggtttggacacaagagtgtccagtattgggtctggcacgatgcttgagtaggcagtcaaccaatgccaggtgttcctgtttcactggattatttgttcctatttaaagaatctttcatcaaggtttactgccaatagatgtagtatttctatgtgacagagttaaatagacccagatttgacttgatgtcttaaatcaccggggagatggaattgtgagatatttgttatgcaactgtatatttgttgtaagttcaattttgagtcctttatcatagaaggtagtttgactaataagtgtagttgacctgaagtcaaaatcaactctctgggtgcgtctaagtatatataaattatcaaattatgctgaaaataacctctgacaggctcactagaagttgaaaaatgaactgtttcaaatcaatggagatagtatagacaccatgggatgacgagcaggatttttgttggtatttatatacatgtgggctgactggtcaacccacagtactcaagctccctggttgaggatgggagcttgcgctctaatcagaaaagatccaggcatctttgttacatcatttaaccttatcctaaattgcacaaaaggtggaaaagtccagcagagggggagctgtacagagctccagattccacaaaccagggctcaagctctgcccctctcactcaacctcttaccttgagcaactgacttatatcttttgactttgtctattcatctccaaaaataatagtacctatctcaacagaccaatataaggcttaaatgaaataaaaagtttggtgcagtgggtggcatagagtacatactagctattatattgtcataatcatcattattattagattcagggactctttccagagcagaggaaggtcaggggaaaggaaattaaaacttattcagaaagaagaaaaccgagctgtatgtgtatgagaacatactctaccag

SEQ ID NO: 47356 - DNA, 1563 bp, Bovine  19866880358547
  misc_feature (1)..(1): n is a, c, g, or t
ncggagggcatcttatctgcagtcctacccacgtcctgcactgaaggacagcagcatcttttctaagtgtagtaactacagagagataaaatgtttaccgatcccagaatcaaaacaaaatttaagaaaagaaaaaaagtcaaatatgcaagtttgtgtatcacagaagagttcaaacatatggcacactgtgtgaggaccccccagctcaaaactaaattcttcaggttcttttcatactgggttagaaatgcatatactagtaagtcttgagactcaaggacatgttaaaatgactgtgaaagtgaaagtgaagtttctcagtcgcgtccgactctttgcgaccccatggactgtagcctatcaggcccctccgttcatgggattttccaggcaagactgctggagtggattgccatttccttctccaggggatcttcccgacccaggaatcgaacccaggtctcccgcattgcaggcagacgctttaccatctgagccacaactcattaacatcaggatctccgtcctccatttagtaaaatcttattctggaggtttctgggaaggtaatttttttaaatagtattgaactagagatgtatttgtcgctcccttcattcttattatcctctctggaaaagctatttgcaactcagagccccaggaatgaaaaaaggagtcagtaaaatttatctttgttagcaaactaacatttgcttcgtcatcacaggttttgagctctgcctaaatgttattttatctaatttaaccgttaaaaaacccttgattaatttctccagtgtagtgttaaggaaagctaactatactgaggttctctagcaaggaattaataaaggaatcaagcacttggctctcaataagacaagactacccagatttctagcgggaatattccagagcacaaacatgttttctttggggagtttaactcaccaaaattattaaaaattgagatcaaacactagtgcaaagccccaaaggaaatcatactagagtggagagatttttatcaaatgaaaacctgaaaaggtaaagtttttatagtgagaaataaaaggctttctgccttacaagaaaaaaatcctgctgccctatatctatgtttagggttcaaatagcaaaacatatacagatatttaataagtgtgtaaagattgtcactgtgaaatgaatgcaaatttcacaaagccaagcttaaacagacaggcagccattaccatcctttcccaaccactaaaagccattctcattcttgtacctaacaaatgcctccactgagatgtaatagcaaccaggtccttgaaatggctaacactgggaggtaaaaaagaaaagaacaggaggggagagcaagaaagccaaaatcatactgtgtattctgcagttccctaaggggacactgagctctctagattgcagtacataggatattattattgtgactgaaatgaagtttaataaaacccagcatacagactggggaaactcaggtccccactgatggaatacttcccacacaacgtattttaagcatatatg

SEQ ID NO: 47357 - DNA, 5029 bp, Bovine  19866880421328
  misc_feature (1)..(1): n is a, c, g, or t
ncttaaactgaatggccatgctttcggcactgtgttatagttccagataggaattaaaattttatagtaatctgttctgggtctatctatttactgctttaaagtagggtcactgatttgctaggtttattgttttaatagttggaattagctttctacttctcattcttcatggggttgttccagtgtttttgctgagcagaattcgccctatgagtgactaaaactttacaacacaccacctcccaaattaaacatctagggttagctactggttggaagtgaaatgtcaggcagctgggttccacttctcccagacttttcctgtcccggggagcacaaagaaccctgttttcctgagtaacttgctcttccataattgttatgttccttaaataatagtctaattgcattttcaagaaagcagtacaatctcttcaggtcctgctgtgggttactggtagaccccttgtttttcagctcctaaaactgagtagaaggcactttgcccaatgctactctgtggatgaagggaagaagcaggattagctctgttacttacatcaggaccagtacttctcactgatggaagcttctgcactgctcagtgctcggaaaccactaacatcactaatataaattacatttctttaggcctgtttttaaaggtttagggacagcagggtactcctcatgtacattgtcatattcttttccttctgctgaaattaaataaagataggaacattataaaacctttagcaccttggccttttcttgatgttctgataggaaaatgatactaaacataatatttttgaacataaagcttagttgtctttaaaaaaatggatcaatttattgctatggaattgttagtgtatcttcttgccattgttctattggccaactcagtgtggctattttcttcctccttctctactttcttctttccttccttctttccactcttctttttttcagtaatctgaaacactttcttttttaagctgaaagaatttagggcattagctaataaattttgtgtcggggaaaactaattaaatatgagcaacgtggagcattgagggaagcaaaatagacttaagttgatgccttccacatgcatcatgccttctctctcatccataaaaaacagcaataaacttaaatgaagacacttgtggacattgaggtgtcattgttttaatgaagttccttatcatatttcatctgtgagaagggaatacctttctttatacttttataggcatctagcaaagtctggctttaggtaaagatgattcaaattgactgataaaactgggacttccctgtggtccaggggttaaagctatatgcttccactgcaggggtgctacttatttattcaacaaatattggttgggctccctcagtgtgccaggtattggtctaggcactatgtatataatagtaaataaaacagaatttcatacatatatagagcagctttccattttactcacatagattgcattttaaaacagacttcattttccctttgccttgccttaatctagaattcagactacggtttagtagaatccataagccttactattcagtcttcttgggtggcactagtaaagaacccgcctcgcagtgtaggagatgtgaatttgatccctgggtcaggaagatcccttggaggaaggcatggcaacccactctagtattcttgcctggagaatcccatggacagaggagcctggagggctacagtctatagggtcaccaggggtcagacacaactgaagcgacttagcatgcacacacacaagcctttctattcactgtttcaggaataagaggatcttgtaaagaaagaaaccaccttctatttctattttcaatgaacctttgaccaaatgggaaaaaagatgatagagtaaagaaaagggcctggaagtgaccttgactccagttaccaggctgatcatgtgactttggacaggagttttatcctttagagtttccttttactattttgtaaactgttagattatggattaggtgatctccatctgaaacactgattctgtaaattggttcatctatttctgatcctcacttgaggattttaatgcaaatgaaaaaaacaaaaaataaaacacattacccctggaaggtttaagtgcatttcggaaaaacaaattagcaacaaaataacaaattatgaacaccttatatgggctcagagagatatagttgattttcttatgattgatagttatgacaattacaagagaaagccagccactgagttttaaactatcatagccaaacctacctactgtggcttctcagatgtttctggttagtgtggaaatctaatgtagctgaaaactactgctgatttttattaagttgaagtctggaacttccccttgtaatgatagacaaacttactttcaatgaaaggaaaactgccaaagttctgaaattcatttattttattattactcggtttaaccctagaaatgggagatcaagaaaactagatagatttgacagttctgaggtcacaagttcaatttcctcacaagttgtttctagatcgaattcactgcaaatcatataacccttcacctcttgacatggaatcttttagggaattgtgtatcacatcaaggtcatcctgatcagtctggggctgggaaaatgacaggtaagttggatcaggtgaaggaattccagtgaccaagtctggaaagcctaggaggtatgagtatcactttctataacagatcagggtatactggagtaagcttacacagtgagcagaaattgatgtttttaggacttttggaagctggtttttacattgttagtagaatggaactggccttggtcaaattattcacactacaagaactggcaaatgattcatttgggactttttttctctagagagccagttgttaaatatttaccagcataacactgaatagactccagttagatttttttttaaagccttgtggatatccatgtacttatttttcataagtaagatatgctaaaacccattgtatgaaagaaaggttaggtgtttccagaactgaatggctgattggtattacagctcacttgttcactcaggtgtcaaaggaagtgttagtacctcagctgtgttcgattctgtgatccccatggattgtagcctctgtccatggaattctccaggcaaggatactggagtgggtagccgttcccttctccatggcatcttctcgacccagggatcacacctaggtctcccacattgcagattctttactgtctgaatcatcaaaaatagttatatatttaagcagtagttgtttctactcattccccttcatgctttcctttagtttaaatccgtttcttcatgttcatggcatttgtctttgtattgccttctgtatgtggtataaaaggctaacttgagtatctggttagattcattttgcagaatcagaaccatgtacataatgagttcatagtctgggattccctggtgccaaacacccaacagatttgggtgaaaacaggggaagttattttaacagagtactttcttagatttgatgaagtgaaccctcacagtgcacttcaaaatgaggagtcaattatttttttaaagtactctaaacttagggagctaaaaatctatgatatgaatgcttaaatatgtgtggatatggaaaggccttcctatttctattacgatctgaatgaacagaatgtgccaaagtgagcatatactgtttaagtacaatatatacatgcaaatggtttcttaaatatagtttttctcatttcagctcttttgacaattcatgtcaacagtgtactcataagtgtggtgctagaagagcaaacagggaattgtggtcgacaaatgtcaagcatttccatgtaggtgtaattttaggagtacttttgagagaaatccttctttgagtttgtgcttcatgtgaaatgaaagcctcccaaagagatagagctaaagtagtcaaacagtgtgtgtagtactttaatacagttatttccttaggaatgaaaggagagaaccaaattgacagattcttttgcttgtaaaacataatctggatcaaatgcatcagtatgttctatcagttgacgattctttgatatatctgtattttagaactactgatgtaccaagggagaagttttcttgtcactttacttgcaagatatcaaccagtttatttgcagctcctagaaacagatatactagggatggcactctgtactccagtagtctcttgtatttgcatatttgaagcagcgttgtccagtacactctatgaacatgtaacgtcctctgtgttgccattactcacatgtagaacgtgtctgtaatcagttgttattttatgtcacattcatctgcatttgcagcatttcaaagactagtctgcaacatcttggcacagatggggaaagcagagttggttataagttccagaactacaaagacacagatcaaacatacgatattaataaatagcttggatggggggtggggagaggggaaggattaaaaattaggttatttatttagaaagttgaaagtctccatttgtgatcattactctgttcttgaaaggaaataggtgctggattttatgttttgttttttgctccagtcctcatgtttccctccttccccttcctcctgttttaaattaaaatctaaagacagcccgaaagagtatatataactgcaaaaaggatgtggtaaatcatggcagaggtttgtgatctcacagacgtggtggtgtcagggatgaagaccaaaggcgaatccttagcttccagtggatttacttgaaatccctcacccttgtagcctatcatggataatagcatatcatggataattacatttttacaaacggtagagaaaatcattttgacacacacatagtgttttccagccagacaggcttttcaatcttttacagctttcatg

SEQ ID NO: 47358 - DNA, 760 bp, Bovine  19866880642107
  misc_feature (1)..(1): n is a, c, g, or t
ncataatataaataaaattgtttatatctagaccaaatctttcactaaaatgcagaggaccaatcccattcttcatatgacgcctttagaccaaataacaaaatacaattgcaggtaaatttcccattagtgacataaaattaggttgcgaatggaagcgatttttgtctaaaattaaaaacatgcaatcatggaaaccagttttttactctctcaatgcagtgtttctgccaaagagtgaatatatcacaaaagaaatatcaatacttgcttgtgttcatttgtatttgttatttttatcagtttataacctgtcttaaagacaccaaatactcttctcagtaaatgcataattcatatcactagtattatttaactatgtgaaaacaagcgtggagataatacacattagagttaatcaatatttgactcaaatttttagaaagttgatcacttctgaggataatacaatataatcaataaaacatcaaaagggtttatgttaagcactagttattcgttcatttaacaaatttttcttttgtgtctccagcataagtcactaagatgaaaacataacccaatacacattatccctgtaattatggagctcacagttgagtagagtagcttattattgctaaacacatacctaagtgaaaccattcttaaaataaaccaaaatgacagttttaccccctgtacctcaaatataagaaatgtttatttcatgaacacctgcagcagatcgcctataaag

SEQ ID NO: 47359 - DNA, 2357 bp, Bovine  19866880658587
  misc_feature (1)..(1): n is a, c, g, or t
nctagttgactagtgtaaaaatgtgaaggcttaaatttccttaaaggtagtcttcatctaagttttccaaaaggcttttccactgtcactagtcatttcaaactaaataattcacagaagtataatttttttaaagtaagaaattaggcaaatgaaaacttgaaccatacactcagaatgacccataagaaaattcagattaaaagcaaatttcatgattaatatttaattttaaagtaaatgaaaactctgtcttcatccaaatgttcttgtactattctttgcatgactatgaaaataaatcattttttaaaaatattaaccatacattttctcagtaagagaatagctatttcatttaaaaccaagttcactggaactaaccctcatgtaacaattttaggagttcttgggggagctaatattctataaagtcagtttgtaattggctaaataaagaaaatattttctttaatgacaaccagatccttaagacggaaataatagatggatttaagagttaagttttctttgtattcctaagtacttttctcatggttggagccatgggaatgcttgcttgtgcccatggcgcagtttaaaacagaatgggccagcacctcaacaggtgttaaaattattgtttccaaaattttcatactagaaccagaaatctgagaaacgaccattgtgaagaaaaattttcagtcaatggaactcattgggcaaatgaatattttaagtctcctgtgttttgagtgatcacacactataggccaaagacaaacctgttcggattaaatgcaaggtctagtgaaaagctgccccaggtaattcaaatgtgacctaacaaaatttggtggtgtatggtaacttcaacagcacatctgaactagagaaatcagcacaaacaacgtggcaaatatgtatttagaccaacagcaacaaccaccaccaaaagaataccaccagctttatgaggcatgggacattaaatttaataagtaataaaccatgattaagctacaaacatatttttattacacagtaacgatgaagagccatgcttgttaggtttagttgcaagagccaacatgcacctataaacctgcagtggaaacagcagaatctccatgtgaaagaacaaccacgggttcaggagcctgaagcagccttgcttgcagtgcaagggagaacctatgcatcagccttattccaccctctcagaactctctgaccacagttgctaaaagcaatccgattttccctccggtgtgactgaatgtggaaaatcactttgttttacaaatccccaataggaaactatctgatggaatataagacactgattcatcttcctaagatgtttaggggagaaaaatgagcaacatttttagcctggaatagtttaaaggaacattcttgcacactttaacacttagagagcaaaagatttcatttgttggattaagtctgaaatcatagtttgaaagctggtgtcctatagtcgggatctgactaatagacatagtattttttttaattgtatttgttacagcaaaagctgtaagtatacagtcttaatctgacaatagtcttctagagtcaggcactgctgagctgccactgttgatcaggtgggatccaccagttcactgggggctttcctggttctcttctttcatacgtactccctgcccggatacatctgaatttttaagaaaatttcattctattatttcatgtcttttcctacctcacgaactcagagttttacttgcaacttctgccaacacacagtccattcctttttccaaacctcacctctttgaaaaagtaaaatctcctttaaacaaggaagtagtagcctaaattattcttgtaaaaatttaagatataaagaaaatagatgaactatgaatatatgtataatttgaatctcagggtgtaaagatactttttaattcacctgctcttgccaacaaaccataaaaagaattattacaaccacatctctgatagatggttatttggcttcttttcagtgccaagaagtttttactcacagggaaaaaaaatggcttctgctattggaaatatactaaaataatgcttcttaaagtgtatttataaactgtatttataaatatattaaacaaattcagcatgggaaacaaatctggtagcatagaatgatatgtcttgctgacactggactgagtatcgaactgattataggacctttctgataaaagtgagttatcggtatgaaatgaactttgattgcatattacatgtttgtctaagtgcttttctttatatgtcctttcatcttatctatgatacaattaattgtt

SEQ ID NO: 47360 - DNA, 1857 bp, Bovine  19866880670787
  misc_feature (1)..(1): n is a, c, g, or t
nattttggaggtgttcttttttctaaatatttgatgctttctggttgtataccaatatttttaattgagatcccctactgactctgagtttgactgctgtaaatgttatcaaagagtgctcttaatgatttttagggaaagagtggttgtactaatgataggtttgccagttacttgtctattgggatttgagagatccaaattatttggggtaattccagtcactcagggcacaaaactccgttaacctaaaccacaatttctattccaaattgctacatgttcctctgcaaaaaagtctgattcatttggctactcttactatgatcccccaataaatcatcctggtatcacccgagagtcacttttgcttagcatgtgtcatctctaactctacagcacctttgcacatgctgttacctattgtaaaagcctacacagattggggtctgtgaatttatgttcaatctgacaccagttacttcctctcattccagaacagttcatgatttctgcttcaaggaaggtatttttcttgttattcaacactaatatgtctgtgtgtgtgtgtgcatgtgaaaggtggatagagcttgtatatatgatgttactaaaattttagactgtcacattaatgtgtgtgtttgtgtgtatagatacatatatatacacacacatatacatgtaatataaaatataaatgtaaacaaataatgttttctaatttaagattttaagactaataaggaaagatgtctgcagtattttaatatcccacatgatgtcttcagtgttttaataatctaatcctaattttttaataaaaattgagttttagagcagttttaggtcacagcaaaattgggtggtggatccagagatttcccatacacccttggcttccacctatgcacagcctctgccattgttaacacaccccagagtggcacatttgttacacttgatgaacccacattggcttatcattatcacctgaagtctatagtttacattagggttcactgttgtacattctatggcttttgataaatacataatacatctatccaccattattgtattatacagactagtttcactgccttaaaagtcttctgtgctccatgtattcattcctcccttcctctgacccttgaaaaccaactcttctttttagtttctccatcattttgctttttccaaatgacatatagttggaatcatactgtatgcagccttttcagattgccttctttcccctggtaagaatttttaaatgtttagcctttaaaagtatcaagtaatgtacaaataagctttcctctttgagctgtactcccactttatttcagcctccattctctcactgaacatccgtagaattttttgagaaactagcaaaagtctttgacatttattttatctgtcactgtcaaatagattgcctgactcagacctaatctgacccagcatgctttgtttgacctactgatatttccatcttctaaagttatgtcagtttttttgacatatcaaggaaaagaacttcaagagtttcctgcttggccaactgacagtctttttatataaaaatacataagagctcttatttattacattaatagagaacagaagaaaaatttgcattttgagtgctgtggaaaaagatcccaaagtcatcagttgctctgagtaacatattgtacatgttaccacatgacaattgagatacacactcatttgttaatctctagagtggcagctcttaccattctggatggagcaaaccttattccaagagggtcatctgaaataagttaagggtaatagcattattagtgcttcccaggtgatgca

SEQ ID NO: 47361 - DNA, 906 bp, Bovine  19866880694084
  misc_feature (1)..(1): n is a, c, g, or t
naaaattatgccagtaaagctcatgtgcttccctaaattaagacagtaagggcaggcaactgaaggaaatagatgaaatggagtagtctgtgatgtttcattgggaaaataaattttaaaaaattttttaaagtttgttaggaaaaaatggactattaaatgtcaaggatttttattctatataatattcagaagtcaatcttatattgaattaataataccaaccagtgaaatattaatagatctaagaatgatcttgctttgtaataattattatttgctagattacaaaaaataagtccttgcactatacttggatggagaagatagtaaatgaatatatatatttggaattttctttttatgatagctttctaagtattgcttactgtctgtactgaatagatctaattttactttttcttttcaaacactaaatattaaatgacatgtttatagtagaagtaaaatgtcatttttggagaagacaaactcttatgcacaaactcctacatagtacaaaagataattaatgatcagtatactgtgaatatgcaataaattatgtaaaaaaaaatctaattgaaaatagtgatgagatccctgattttggattcttgagcccacactcccttaaatagtagtgccagttttcacgagaggaagtttagaattatcagaataaaattaattttaattcactttaattaaaaattcacgtatttgaatatatacaaatgtatctcctcaagatcatttttaggaagagggagaacataaagaaaggaaatagacttctatcgaatgtctagtgtaaggttaccttttagtctcctggccatcctgtaatgctggctttattatctctgcttttacagaaggaatacggccttctggagagtttaa

SEQ ID NO: 47362 - DNA, 2217 bp, Bovine  19866880727411
  misc_feature (1)..(1): n is a, c, g, or t
ntttcttactgcgattaaatttgtaagatggctacactcagaaacaaacattcactttcaatcaacatgagcttgagttcatgggcctgccttgaggatttcaagtggaaaatgcataggaatgtatgagtatttcattttaaatttctgcttttaatttgggaaagctttttatccctctgggatcataacctgttgtgtataaagcccagcctaatcaaggtagatggtattgacagaatgacatagtttgaacctaagctggaggtcaacaggcagattgtttctgctgtatatgctgtagtcactacagcaaaggttggacagctgggtttcaccagcaacattgttaaatggaagatatggtctactatgccccatgaaaccaaccatggattttccaaataataggctctcttgaatggaatcagaaatatgtgagtgataaaataacttgttaaaaaataaaaattaactttgtagataataacataaatgagttgttaatctgtggacagtaatgaatctcaacatttttttttttttcttcaaagcaaacagaatcagaaccatttatttttgatggacacctaagacgagttctagtcttgtactcagttgttttactgatatgtagtatatgcttgggctttttcagtggctcggtgggtaaaaaatccacttgcagtgcaggagatgcactgatcccctggagcatattctcagtttactgagtacttttcataaatagttcatgatatctattattcacttattatcaaattcagtaaaaagcattttgatttgttacactatagtttgtgttcctggatttgttcttgatgattggaccaagaataaatctagtaattaatttctctgttttgtatgtgtgtatgtgtacatgtagaacaaaaatcacatgcacagcgttcacaaatgaattgagttgttaaaaaaaaaagcctagttcttcatgtttaagacttccagatgaaagactgaaattcataataaatagcgtttgaaaaagcagttcttcaaggaagaacttaattactttgtatgtctgatccattgtcactatatcatttgttgatgtaaaataacaaaattaagggggaaggaaccgtatttccaagaacttgctttttaatacattttaattcttatcagcttgtcttttaaaaacagaaaatacatttgtttgataaaatgatctcctacccatacttcttgacaaggtcctgacttctgccagagtcagagatcgacaaccttttgccattctgattttatttactattatttcttacacttctctgttagtttgttaatactgtctaaactaagaacataaattaagtcacatgttccaggcaagggaaacagcacatttgagatcatgcagtaccaggatattgaatcttcagcgtgagcatgagactaatataattccagatacagggagtggcagtgtggtgcatcatgtctgtgccatacgcatgatttgttgttgttgttcagctgctgagttgtgtctgactctttgctaccccctggactgtagcccaccaggcttctctgtccatgagatttcccaggcaataatactggagtgggttaccatttcctccttcaggggatcttccccatccagggatcaaacccacatcttctgcattgcaggcagattctttactactgagccagcagagaagctccatcttacacggtggaagcctatttttgccattctgaccttatataaaatatactctgagcacatcactttttcctttgctagtcttctgaaagaaaaggttagccctacttctggagacttttatgacaaatgggagcctatgagaatagtaggagaaaagtgatattttctgacttggtcattaatattctggcaatcctatgacacattactaagcatttctgttacctgtggtcacaaagtgctatgatacacaggaggaggctgaggcagatcacaagcctcctctggtttccatccttcactcctccagcaccgcctcctatcctacttctaagtcatggtgtctgctggtgggctcttcattcaaaggactttcctcagcctactggattttcctttgcttgcagtgacagagagctggaagcgcttaataggtgtctgataggtgcaggaggatgaaagcccagcttcttgcctcctgtcgcaag

SEQ ID NO: 47363 - DNA, 2667 bp, Bovine  19866880733013
  misc_feature (1)..(1): n is a, c, g, or t
nccgtagcacccccaagttataataatcaaaatgtctccgacactgcccatatccatgagggaaaagtcagcactggttgacattagcacaaggattcaatagctgagaaaatactgagaatcccctgagtgggcagcaacccagacgagccgaggtatgaggctagagtcagctgtcctccaccaggtctcacattcttactcagcgtatggcatggaattttaaaacaaggacttgtcaggaaaccacatagcagcaaactcagaattcctgaacttacaaaataacccctggaaacactgtggtggaaatataataaaacaataaagcacaaactacacagacacgaacaatttggcaaatgctctccaatcagccccactcagtgacctagtcataacatgagcaatgtcctttcttctctgctgcattaagggagaagtgtggtcagagggaagactggatgccacaagcgcctgtgttttcattcagctggcgattctggctgcaggcaaggccctccgtctttgctccagtttttccaattgtaaaatagagttggtaataatgaataccctggcctaactagtttttgattctaaggtgaggatatccattccctatagggcctcgggttgtaataaccactagggggaatatcactacaaccacaagaaataattttgtctccaatctttttggtgtgaaaaaaaaatttattgggtctttttcatggaatgttttcgtttgtcataccatctcatttcatctattttggtctttgtgctatcaatacatgaactataagcattatgtatgttagcatttcacaacatttttcattattattccccataggaccctttttaggcattttttcctaatcatctccccaccgtgtcatgaaattttaataccaggtatacagaacatctctttatgtactatgtccctttggagagcaataaacaattgtaaactgaagatttttatgcaccccaagaatcaatttttactccccggggcaatactgcctccactgaagggccataagtgtaggtgaatctagtttataaagtgtattcagagactggaaggtcaccttctagatagcaggatcttaaatgggggtttcaaaaaagaataccaacaagaaaactggagaaattagataactccatatgacatcaaatctatatcacctggagagatctgaatttctaaagaaaaaaatcttgacctcccaggacccccaagtctctggggctgactatacccctcaatggccccaagcccaactataacctaggttcatcccaaaagggaagttccatcaaatatgcatttcaaggactctgaggtgttagaattagaaaaataaatggcgcacaagggctactatggaagaaccgcagggcaaggcacgtgtggctttaggactcttggggcaggctggcctcacagggacgcggtgatgggacaggagcagcctaaatgaacaaagtgaattggatgtgtgtgcatggcagacagagtgtgagtggtggggcctgtgcagtaggatagactgctatcctgtgtgtgcccagaatggagaccaccagctccagccatgtggcccactgggtcagatctcctaaatttctggattgtgaaatctggatttctaagtgaaatttctcaatttctaaatgggggcttgaatctttaaaaatctttcatgggcttaaaaaaagaaacacatctgcatgcaatataagactaccaattagtaaactatttgcaaacaaaaggcaagaaaaatttcctcccttctgggaggaaagaggctctgactctaagggacttcacagaattcactgaaggggaggggcttattccaagcttcttcttttatccaatacatctgtggagccctaattcgacagattcctctggtgggtaattatgtacaaaggtcactacttcatatctttataatttaagaaaaactggggaatagtgtcccctaactacttaaagaaatttaaatggcactcttccataaccacaagtagggtggatttctgtgtgcattttaatgtgctgcataatcagagactcttaataatccctgatttcactcatacttaacaatttaatagcagtgcattttctgcctaattagacaaaatgcaacatcacctaatactactaatgtacaaattttttaatccctaaaatgtgtaagcaattatgtttctctaaaattttaattgatacaagggcaccagtgaatctcaatcctgagtccaatgacttaacttttggacaatcacagacactttttagtagtctggaatctttctgaatacaatctgtccaaagccatagaagctgtgctaactttattctccagtttcaagagttctgttgtctagttcaagttctcttcatttttcctatcatgactgtaataaattacaatttattacaattgtaataaatcaaattaatcaaatgctttctattttgccacaaaacatgaatgcagcattgaaagcagtgtcactgagagagaaatcacacacacacacacacaccaatgatatattgaagagttctacagttatgagatcaaggtcaatggctgagaaaaagtcaatgtagaaaaaattaccttattt

SEQ ID NO: 47364 - DNA, 1365 bp, Bovine  19866880750608
  misc_feature (1)..(1): n is a, c, g, or t
nggacccaccccctccttctatccctctccctgccttggatcccccagccagtgattgactgctacaggattatgaaaacctggttcccttgctttagatggagacagacatggggacaaaaactggggattctcagcaggatcaggctgaagctgggccttttcttgaattgcattcttacttggtttcattccctttgcttcctcccctccctcactggattttcctgggttcacctaattaataagtcccttgcacacgtatccttgtctcagggtctgattctccccaatgacatatatatatacgacacacacacacacacacacacacgtatatatatatatatatctgtgcatttttcttgaatacatctcaattttaaatacaattcaagaatgtaaaatgcatgctataaaggaaaggagaaacgtgtgtgtatataatactggagtgggttgccatttccttctccagggtatcttcccaacccagggattgaacccgggtctcctgcattgcaggaagacgctttatcctctgagccaccagggaagccccatatatatgtatacacacacacaatagagtagcaggaattagaattatagatccaggaaagctaaaatccttcaggatctcagacttgctaaaacaacaacaacaacaataacaacaaaaaacaaacaaacactcaagctgtgtttgcaaaaggaaaagaaacaatgaaaaactaggaaagtttacaatgtaaaaagtgacacagtgaacccctcaactcttgtgttgactccatctggtgtattaaagaaaataatttcctcaaactagaaagagtagagcaaggttgtttaagaaaatagggaaggtagtgtgtcgtaaagtagaatatatcattttgggtgtgtcttcatcacaaggctcaggcaaggcacagcccagaatttttaatattttaggtgtgaattcataaacacctgtggatttttaagaaatcataaaggaataggggcagggattgcttaaagaatggagttggaaaaatacatccttcattttcagaaatgggaaaaatgtacaatggaaaatttgattgttaattgcttccaagttcaagagtgtgtaatcaaagagacaaatacttagaaaagaatggagtgattactaggtgctaacataggatcactaagaaccttcatgattaggaatttgtcatttttttattcactcaatgtgaaatgttctcaacatagtgaacatcatcaataacgtgtctgataaagtcacacataattgccttgtggagaagataaggaaatgtcattttatgattgtaaagtgcagttagagcaggcatcaattaa

SEQ ID NO: 47365 - DNA, 1947 bp, Bovine  19866880800477
  misc_feature (1)..(1): n is a, c, g, or t
naactgaggctatcagaggtcacataatttgcccaaggtcacatatgtagtgaacgatatagccaagattttaacccaagcagttttctccagaatcaatcatcttaattactgcattaacctataacctgtaatcttacactctggagggggcaaagtagcagaaaaagagagtaaacaaattcttcacttaaggagtgagaagaaggcagattttctgtacaatgtctagtgagtctaattattactaaattattgatccattcccctaaaagaatataggacattaataaggcaatttcattttatatttaaagcaatcaaatgcagtttgatcttcaaagaaattactaaaagagactgttttgttttgctatttaccaagttagtagagcatcaacctctaattccaccctcaacctctaacacactcatgcctatacacatgtgcacacacacacacacatttctggtctatctaggtaatttgatgtttctggaaacagaaggctgctgagaagaacaatgtccctactgtataatgtgctttccagttctgtgctttcctcataaaaaccataggcaggtgatacagtttttagtaattgactgatgtggttctgtgagatttgggaggcaaaaagaccagggtgagaaggcagctcttccacttactcactgagttacctcaagcaatttatttaatttccctgagctttaggtcccttgtctaaaagatgagaatgataatatctacctcataaagttatcatatgtaggcccgcccaggacaagaatacaaatagagacccacataccatatgtctaaatatttaaaagttataaatcaagccaacagttaaataaaatatgttctgtcctcctaccttgacaaatacacctttataatgacaaaatccaaaacaatatgtgttaagctatgatttttataggaccaaaagttggcaaatatcaaggaccaggccttctgttgatgggccaacagtttggggatgagtaataaaataaaaacttatatgatgcaaattttgattcatttattccataacactattttgggcttcatttcagccacatgattaggttgtttttaaaaaattaagatttttttacacattttctattgactatgatgatctaaagtctctttaaaattacatataattaaattcaaaatatctacaagacatatactttaacagactatataacttaaatataaaaatcaaaataaatgttgaagttatctctttcaaacgcttatcaatattaagtatcaaacttacaaatcaaaattatttaaaacaataaacacttttgttttaaaatataaataaatataaagtcttattaactattttaataaacttatttataaattcaaatattcagtccctctaattgctaatataaaaaatgaatatcatatttattatatgttacatatatatacacacaaatttaagagtaatatagattgtttttatagcaaaattcttccatatacaagtgctatacaatctatgttaattaatgagtactactgtaaccactaatcagaacacataaagaaagaaaaaaaatgaagctcaaaacttctgggaaacaatgtttgttatgcaagaatcttgcacttccgacattagagaaagaatctgactctcacaagaatcttttcattctcgaatcctcaccatactccaaagcagtattcatctctgaggtcagcaacagcacttcacagcatttggaaactttatccttcatttcagagacacagagcaaggagatgtggaaaagtattgctctaggatcggggaacagatgtttaaggctaagagccatattttgtccatgctgcgtgcctgtcctcaaggaattcagtctccaacctaacactgaaaatgccaatgaatctttaaaaat

SEQ ID NO: 47366 - DNA, 1116 bp, Bovine  19866880808839
  misc_feature (1)..(1): n is a, c, g, or t
ngggatgcgaactcaaactggggaggctgatttcataaaggggacaggactgtgtgtgtggtcagagaggaggaaaagtgtgcatgactcctctgctttgggagaacagcctcccttagaagtggagtccagggaccagaaagttaaacaaaaccgtacaaattgctaaaaagaaaaaaaaagtcaacaacctaaatggatctgattaataatcaaagatgtaattattttcctgttacaaagtctctcgttatccacaggcctcacaaaagtgaccaaagagcaagaagcaaagagcaaatcattccttaggaactttacactgaagggtttacacggagtttttttttttttttttttttccggaagagtggttgttatagaaccgcgggagagagtgagaaaactgaacatatagcagggtccctctccaagaggaagaggctgagaaaatttaataaaacaaaatatacccactcccccaaacatcgagccacactgtttttcggaggaaagagaaagagaacgacgattcttatcaaaaccaatatggtgctgcatttgaggggtacaatggggaaagttaccgctgtgctacgggtgggtttcttttctctctttctaggtggcaaaggcagcagtcatttgaatgccgtcgaacggcttttcagctaacacaaaagagcagacggttccacttatttctgaaattagatgcaatcatatctgtgaatcacgcagcagcaaaccaccgtaatctgcattataatacattatccggcaagctccctaactgcagcctaccgcggcaacagaaaacactttgcggtgacctgaaccgcgtctgccaaaagcgcggagccgcgtgaaggcaggaaggcgacagaaaagaaccgctttctgctgcgaaaaaagagcaaattataacaggagtcaagtctcagctaatgcaagactagcatcttcttgttcacagtttgcataattagatatcatgaataggggtttctttctttttttttattgttctaaaaatactccagctttgtttaaatcagctatttccttaacagcatgactttgctaccagaattagtgaggtagttaggggcagag

SEQ ID NO: 47367 - DNA, 2323 bp, Bovine  19866880839476
  misc_feature (1)..(1): n is a, c, g, or t
natttttcaagtagtcatgtatgggtgtgaaagttgatccataaagaaatctcagtgccaaagaaccaatgatttctaaatgtggtgttggagaagactcttgagagtcccttgaccagcaaagagatcaaaccagtcaatcctaaaggaaatcagtcctgaatatgcattggaagaactgatactgaagatgatgctccaacactttggctacctgatacaaagagccgactcatgagaaagaccttgaggctggagaaagattaagggcagaggagaagggggaaacaggggatgagatggttggatggcatcaccaccccaaggacatgagactgagcaaactgcaggagatagtgaaggacggggaaggctggcatactctagtccatggggttgcaaagagtcagatacaactgagcaactaaacaacagcaacatgtatatttggtggtacatagatgatatgaacacttaaaaacctaacattttgttctcaataatgggtacttagagacaactgagataacagcatcacacttcacatcctgtaacatgtggattttgattaaatagtatacattcttgattttatggtcacatatttagggggcatacaggaaattatatacctatgtaaaataaatgactaaaggatggaaaagacctttccaataacaatctctagccaacccacaccactgaagatgtatttctagttggcaagtcgtacattgaagaattaaagttcttttataatagcattatggtagctatagttttgtggcactgcatggagtctggaataaaattagtcattgtttctgtacagtcaataaaatgagttgagctcattgtattcacaaagcaggcatgtgtaaccagcacatctggcagtgtctgaaatgtaggtgaatccccaaagatggaaatttaattttcttctgacttgtagagagacaaactatacccactacagccaacagaccagagaaatttcaaaaattttaactgagaaaggggcacactgatttgagttataggactccaaagaagaaataacatatagcttaaaccgggtacttctatgttcaaactctgttgagaaaataccatttgggctcttgactaggcaatgaggagaagagtaagacccctcatcccaatcaaggggattatatttttactgggaagtgagagatttaaagactcaatcagtgtatgtctacatcagctgaatatcaaataaaaacaaatatctaatacaaactatggtcacttcatggacattcaataaacatttgttaaatagattgataaacaaacaaataaatagtgaagtgatttgactgagctgtcccagggcaccagaaatattcaggaaagatctcatgggtcaacagagaagattcttggtgttttattttactcattaactcctaatcgatatggctgccatatgatgaatgaaattgttttgcttggataggatagatttcactctttcagagacttcagtaggagaaaagattgactcaatgccttgggaatgaaatagatggaggaaatgaaggaataaatcagatgaagatgaaaaccctcagcttgggagctgtcttttatattcagaaataaaatcactgcagagtccttccaactctaattttcaggttaatttgacaaacacagttcataagtgggaatggaggtagagtattgtttattttttaatgttgaagaattttaaaaatcatttcagtacacaggtgggtagatttggccagaagctgcaaattgaaggtgcttttttcatgttttgaagaagagcagagctgtcctaacaaatttattgtaagaagtttttcctaaatgaaattcagattttgagaaaggcaattgaaaagaatgagaagtgggagaggggtggagcaggtttgatttaaccagtgcagaggtccactgcttaagggaagtatatctcaggctttccagaagtgaggcaagaaaatacttcattcaaacaggaaaaataccatgaagaagtactgactagctgcatcattaccatcatacagcaaaagctacataaatttttggctttttggtttcctctgctgtgaactttattgctgattttccatcctaaatgtattccccaatttttaagtatctatgggcggtggtggtgggtttagtcattaagtcatgtctagctcttagactgtagagccccaggctcctttctccttgggatctatgggtagagtgcttctaaatgtcaaaacctgaaagtaaacccttggatttttgcttctatattata

SEQ ID NO: 47368 - DNA, 772 bp, Bovine  19866880861697
  misc_feature (1)..(1): n is a, c, g, or t
naatacaatgtgagctttgaaaatgtgtgtgcatcagagataaatgtgaaatgttgtaacaaatatgttacaacacacaatggttagaacaactgagctacagcagcgcataatccaatagcagatgacagggaaatagatgaccttatttcagcttagtgagagcaggaattacgtccgtttggctcatccctataaccccaggatagagctaagagcatcacataatatttcaattaatatttttttaaattttgagttaattgagaaaaactttgaagacttgatataagtcaaagaggccttaaaataataaacagaaagaagaaaaactcgacaaatttaagatagtcaccttgcagatatggagtggacaggaagaagtctgagaagggtgtaagagtcctacagaggtccacttactgcttttattttgaagagctctgcaggttaaagaggaaaccaggccctcatgaaaagctgtaggaagcaaacacgaaaaccatggatttttcaaacttctttcatgctcatttcttcccatcgtatttacacttcgtaatttcaggtgctgcctgttcctgggaaaatgcttctcagatgccagcttcaggcaaacagtggttggacaagggtttttgtttatttgggtgttttggggtttgacgtttctttttttttttttttttttagtggattcagatatcacaatctgccacaaatgtgacgtttctttttttttttttttaggggattcagatatcacaatctg

SEQ ID NO: 47369 - DNA, 1086 bp, Bovine  19866880886936
  misc_feature (1)..(1): n is a, c, g, or t
naaccgcactggtacatatcggggcaagtgacaccctgggttcctctccctacccccaccctgtaggactgaggtttttattctgccagctgttaagagcgttgcctctgatggctcacagtgtgtcactccccaggaactgccatttgctgaaaggagccgcctcacacgtttgtctttacttcaaggactgccatgtccaaagacattgtggtcaataagggagcaacaaagttcctgccccctcattttacttcatcagctctgaaaggccattctggacccataggggatcagctggggcctctgttgcaacttcactgtagttcagtttttccctctgctcagtcctattccctatctttcccccatacatattgctcccaagaatacttccatcagaatccttgtatgcaaatctccatctcagagtcagctgccttggtaattcaacttgagaccttggtgccaggaagtcatcagtccccgatgacagtcccagaaagtcatctgtaaaatgggatttagaaactatgtcatctgccagctggctggcagtgaggtctccgtccctgataactgatggaatgtgggcagtccttagcttgtcgcagaagtgcaattgttaaaaccttcactgactgtgaactgggatgaggtacacaaggaaaggaatacactggcaggcacaacatctcagagatctaggaaaagaagtaattataaagacaacggaattaggttgcttttgctgagtgtaatcaatgctgtggagaaagataatgaaaaatgtgtgtgtgttcagtcgctcagctgtgtgtgactctttgtgcccctgtggactgtagcccaccaaactcctctgtccatgggattttctagacaaaaatgttggagagggttgccatttccgcctccagggaatcttcccaatctaggagcaaacctgagtttcctgcatgggcaggcggattctttaccactgagccacctgggaagcccaatgaaaagggtagggtgattaattaccaatttaaggcaaattgtaagttcagagggctttctcagaagcacataaagaacaat

SEQ ID NO: 47370 - DNA, 862 bp, Bovine  19866880906097
  misc_feature (1)..(1): n is a, c, g, or t
nctgttaaacatgtgtttacagttctaatggcagatttataaagtactgtgtttaacaacggtttctctatcatggttttttttcttttgacagaatcgaaaaccctctttcttttttgagcttaatgttgaggttcccatggtaactgcctttttatttggtttcctttcttagcctttgttgttctattgctgcgcttttaagttggaaaaatattttgcttaaaaatacagtataagaaaatcaacaagctattattcagtgtatatagtaattatgaagacttctcatttcaagaaaaaaacagacttcttttaaagttttgtgttaggtcacaatactaaaaagcattacactggaatcataggagtggagcaagtggctgaaatactagattgaacaattcagtgttccatttccttacattgttctacattttttattttcttaatgtttataatctatcaatagtttgtaaaaattaattatagagaagcactgaacattgtgagaatcttcaaacatttgcaactacaaatacatgcttaagtagtccatggtcaaagggaaatagctataaaaatacggagaattaaatgaaagtgaaaatacagcatgtaagtcttaagatacccctaaagcagcactgagagggaaggtcatagtgctaaatacttacagacaaagaaatgcttcagatcaataatttaagtttctatctgaataggaaaaagaagagcaaactatatccaaagaaagtagaaaaataaataataaatgtaagaacagaaatcaatgaaatttaaaacagtaaaataaacaaaattaataaagcaaatccttgttcttaaaaaaaaaaaa

SEQ ID NO: 47371 - DNA, 1054 bp, Bovine  19866880909469
  misc_feature (1)..(1): n is a, c, g, or t
ncatgtataggcccagatttttattttatgttcattttaacttgatcagcagtatattatcaggtcttccctgacagtccagtggttaagactctttgttcccaatgcagggggcatggatctgatccctggtcagggaactaagatccactcccccccatcccaaaaaaaggaaaaacagtgtattgtcatattcactttataatgattcaccaataaactggacatttatttcatgtttatcatgatattgctaggctgctatactggaagaaggcagttaaccaagttatccaatattacattaaaattaatttgcatcagcaacaagaataactttatgttctgataaaacacttatctatatcattcatagttcattaaatttacttaagttaaaacacccatggacatttatcaatttgtggtttttacacacttggaaacatttcagaactagctgcaatcaatcagtgattatatatctcatttatctgaatgcctcacctgatgactggcactcactacagcctcaaaaaaaaaaaaaaaaagctcacacaatattactatattactgacatatcattatatctaagaactatgactccaaaaatgattgcaaatttcttccccaatcacatctatgtgactattaattttagcattcaattttcattattccatgtaaaataaagaaattagaaataagaactttgtaattcttgttcctgccactaaattacttgacggtaatcacttaattactcaaaatactgggttcagtggtacacgtaatgatgcttacaataaaccagaatgagaccttaaaaacaaaatttttattcatccatgcatgtgtgcatgctaagttgcttcagttgtgtctgactttttgtgattctatggactgtagcctgccaggctcctctgtccatgggcttctccaggcaataatactggagtggatcaccaggccctgcttcaggggatcttcctgactcagggattgaacctgcaactcctaaggctcccgcattgcaggtggattctttac

SEQ ID NO: 47372 - DNA, 2192 bp, Bovine  19866880925180
  misc_feature (1)..(1): n is a, c, g, or t
ncttttggacattcatgggccaagtctgggtcagtctcttcttggtcactgctccttcccttcctgggtgtggggtgcacaaggttctgtttgtgccctccaagccctctctatccccagtcttgtgtaagttctggcagctctatggtggggttaatggcaacctcctccaagagggcttatgatatgcccaggtctattgcatccagggcccctgcccctgcagcagtccactgctgacccgtaactgtgcaggagacacagttctgtctcagtctctgtggggtctctgggtcctggtgtgcacaatgtttgtttgagcccttcaagcatctctggtgggtatggggtttgattctaaacgtgatttcacccctcctaccatcttattgggacttctcccttgctgttggatatggggtatcatttttgtaggatccaacattctcctgccaatgttcgttcagcagcaagttgtaattttggagttcttgcagaagaagatgagcacaggtctttctactccaccatcttggagtcaaaaatttcactattgcaactagtcctacgaccggtattctggcacccacataggtaagtactcctgtaggatgtcttgtcagaaatagggctctgagttcaaggctgcttacatgtctggtactctccctgcctttcaacaacaatttagagattttaaaagatgcatccttctcaccctcttgtcattggctcttctccagatttgctgaccctaaatggcaccctactccagtactcttgcctgaaaaatcccatggacagaggagcctggtaggctgcagtccatggggtcgctgagggtcagacacgactgagcgacttcagtttcacttttcactttcctgcattggagaaggaaatggcaacccactccagtgttcttgcctggagaatcccagggacgggggagcctggtgggctgccgtctatggggtcgcaccgagtcggacacgactgaagcgacttagcagcagcagagattcttaaccctgctgcacatcatcatcttcatcatggggcttttgaaaataccagtctcagaggattctgttctaatgggtgattctaacatgtaaccgatgaggtctatattctcagtcttactactcctttttagggcacccttcagtttgtcctaggcagaaagtaacactaaatgatgaagaaagcactgttgaattgtggattatttatatgataaatatataaattatttatattccttcagacagaatagaggttcctctttctttctccttgctcttagctccctcttttgccttttaactggttcaccttgaatagccctagagatatttccaagtcttctgctgccttattaaatatgagccaaagatcagttttagttgaaatgaggagcaaatcaagagtggaggacaagagtccattaatctgaactccttgctacataactgttagagatccttggtttttctcctttttacacatacacacacacacacatttttcattctatcttgccttccttctcttcttatcctttttttttttttttttcttgcttctgtttgtcaccaatatagaagcttattgctatgaagatcagattgtggccgatagtacccagtctcaataattccctaatgtttgtgtctaatggggtgaagtcattatgtaaacttccctgtgcttaatgttgcaaagcacctttcgttattctttgacagtcattcatggttagaaactcgttggctccagaggaaagctggtgaaatacgtaaccctttgctttagctgttcatttacagatgctggaagctccggtcggggtgcctttataaagctgctctataacaattaagctagctgtggtaggaaattagttccagcgtgttttatgggtagctacagttttggttcaaaggaaggagtgggtaatctcagcaattccaaaagagtaatattataggcaaattccgacacatttccatctcatggctgtttctgaggccactgactcctcacatccctgtgcttcttcgtatgtactaagttaataggttgacaataatggatgaactgggtaagggatgggggcggaagctgttctctgctgggagtggaacaatgtgcccttagtatgataagctgattccattccattaaat

SEQ ID NO: 47373 - DNA, 750 bp, Bovine  19866880969997
  misc_feature (1)..(1): n is a, c, g, or t
nacttattaaggaaaaaaaatctcactagtaattctttatattcattacatattgaaatttaaaaatggatatactggctaaataaaacctattattaaaattgatgctacttgttttaaaaaatttttaactatggctactagaaaattttaagttctgtatatggcattgtatctctgtttcctggaggagatcatgacaacccactccagtattcttgcctggagaatcccacgaacagaggaacctgaggggctacagtccatagtgttgcaaagagccagacaggactgaagtgacttagcaggcatgcacatatcttattggacagcattgctgtagtggtaggaagaaagatcccaccctagagggcgctgaaatccagtgcataggcagaggtgccagtggaatgaggctgcaaaggcagaaatgtcactgggggtaaagggtggcctcaaggtaggagtgtgggtctgtttggcagcctggctaagtacacagggactcgcatcatcctttcctatctcagtgtctttaaatcagttggctgatttcccttatgctgactcctgtggcagaggaagagagtagggaagagggacagatccttatggttctaagatttggcttgggattagtttctggggtgatcccttgcgttttctggtcccaggttctacactgtaggttactgacgttagtaatgagctcaatattcctagtcaagcttgggaagaccaataattcta

SEQ ID NO: 47374 - DNA, 719 bp, Bovine  19866880971111
  misc_feature (1)..(1): n is a, c, g, or t
ngagctgctccgtcgatcatagactcgctgcagagatcagctcatcctgcctttgttaatttcttgacattggatgaaatgaaaagagaaaaaaaagaagaggaggggaagggggcccttcaccaggcatctttatagtccacattccaactgttttatgttttgttttcagaagcagtgaagtggtaacttaggggaagcttgataaatcattaaaaatctgcagcccataaaggggcactttccaaagcccctaatttaatgagtcctctggttaaatgcttagtacataatacttgaagaatcaacacctctgctgtttcaggcttgtgtttgaggggtgggttgggtgcctgagtagcctgcttacccagagggcgctggcactggactttgctttcctctttggtagcctgcagaagttctgggaatggttcctttttttcagatacagcactcaagacaaaacataccgttaaagaatctagaggttctctgccataccttgtgttgtaaagtgcctgcaagttatatcccttatattgtcctttcctctataggttttgaatttaccccctttcagagaatttgcactttaatagggacctaccattcctgtccttgtctaggaatactttaatgtctttagttattttttggttaggtaagtaacatctctagattgttctgtgagggttaaggggaaagtaaagtaggcc

SEQ ID NO: 47375 - DNA, 1607 bp, Bovine  19866880971462
  misc_feature (1)..(1): n is a, c, g, or t
ntataactgaaaagttttccctgtgtgtctggctcctggccctgcaaccactgagcccactttagagggtgcagagaagcgtcccaagaacagggcacaaggccccatttctcctggacttcggcaggtcgtgtgttttccctgaaaacctgggcccaactctcagtttgctcctctgaggattccatgccctaagttttctctgtaatgctagaagttggcctggatttccaacatttcagcattcctaattaaaggaggattgtctttatcgggctggcagatggtgttcggcagtctgctaaaacagaaacgtgtttatgaggccttctctgtcgagttttatcaggagaagcaaatgcaccaggcgtaccttgcctgtgagtaactgggtgagtagacgggtcctgaaagtgggagagagagagagagagagggagaggaacaaggtgcagacagagagatggggataaacataggactggtattacaacttcaaggtctttccaacctggatccctcttaccattccctgcaggagccagttgaaggtaggagctaatatcagagacctgaaatccaacagactctaccttgaatccttggtcggccacttacagaagggcaaggtctttaacttctccacacgtccgttttctgatgcatacaatggggacaacgcaactcccccagagggatgtggtcaggatcacgcgaggtactgtatatgaggaggttattttacaactgatgttgatactatgaaaaactttataccgttaaatgtaagttaattgagtttacctctatctcagatattgggggtgtaaattaacttatttttatagagttttggcccaaatattgattttgttagaaacagagatgtggcttaccagaatgtgctgttaacatagcataaaaatactggattaattgctttctgtctggggtatagccttaattttttcccttgcagttttattgaaataaaattgactacagtactatataaggttatagtatacagaataatgatttgatttacctacatgagatgtgattaccacaagtttggtgaacatttatcatctcatagaaatataaaattaaatagaaaaactttttcttgtgatgagaactttagaattttctcttaacaactttcatatataacatcccgctgctgctgctgttgctaagtcgcttcagtcgtgtctgactctgtgtgaccccatagacggcaagccccaggctcccccacccctgggattctccaggcaagaacactggaatgggttgccatttccttctccaacgcatgaaagtgaaaagtgaaagtgaagtcactgagtcttgtccgactcttagcgaccccatggactgcgacccaccaggctcctccgtccatgggatttttcaggcaagagtactggagtggggtgccattgccttctccataacatcctgcagtgttaattatatttatcatgttgtacattacattcctagtactcatttatcttataactgaaagtttataccttttgatcaccttcctccactttcctcctttggtaaccaaaaatctgatctctttttctacg

SEQ ID NO: 47376 - DNA, 2046 bp, Bovine  19866880995816
  misc_feature (1)..(1): n is a, c, g, or t
ntttttttatgttttcctgtttcttaaattacttagaaaacctacggacacttccttcccccaaagtcttatttcacagtctaacttaagactgatgctaaatataccgaactgctgatttcatagacaaaaaaaaaaaaaaaaaagcaagtcttaagtaaatataagattcagttttgaattgtacaagaaaattcctgtgtgtgggctcagcacacacacagtcacatcctggttgtggtgcgaaccccagtgtgaatagcatttggagctgaagaagcaatgagaattcacttctaaattcacatttcaccaggcggagggcttgtgttccatagcacaatgactgaccacagatcagaaacagcagagatgccttcaacttcctttttttacccctttgatagttcctcagccttttttacagtgacagtggtacccttcccctgtgctacatatggtaaacactcgtgacaatggagagaataaaaatcctggtcagacctggacagattcacaggacagcttcagcaaggcatgatgaaaatgctaggctattcaccagatggaccttatctggagcacagggcacccatacactgataacaaaatataaagagaaacccatttcacaaacaacacagagaaacaaacattttatttgtatgctacaaaaaaatccaaaggtccccttagatgtcaaaaactgccacacatcccacacagccatgcttcagtgatagacgaggaacagcatttttatttttattattggcaacacagggtgagttccagctacattgttctttcaaaaaatatattttatcatcaaagagagataacacctgtatacccaagtaaacctttaaaagcttcacaagatgctgctttatagctatggggcaaaattccaatcataggaaatgaactttctggtcagggcatgtcctgtccaagatgaaatcaatgaatgcgcaatgcttgacataatgcttgaaaacagggaataaacagaacaaaaatattaaaatgatgcactgtttcagtattaagatttaacaatctggtgctgaatatgctgcagtataaatagtgcctggactcagatccaataaagtaacacagctctcattcatagtaccgtatgtctccagttctggctccttaagtcatatttcacttgccaagaaaagctgttttcttgtggggatagttttcctaacattctctctcatgacaatgaaaagtgcacagcacacagcatggagtagtcatgaaatgaacatccagcacccactggacagccatccacagaggccaggtctgcttccttgcttcctttactgcttctgacttttgaaagtactaaaaagataccatgggacatgtctaacatatttcctttaaaaaaaaaaaaaaaaccacttccacagttttaaattccctttaaaaatccattatcgtgatagcccataagttgagtataacctgtgtgtgcatgctaagtcgcttcagttgtgtctgactctttgcaaccctaaggactggagcctgccaggttcctctgtccatgggattctccaggcaagaatactgaagtggttgctgagccctcctccagggaatcttcctgagccagggattgaacccactctcttgcgtatttcccgcactggccggtgggttctttaccactaacaccacctgggaagcctgagtataacctgaccatctcctaaaggtggtattctattataagagattagagggagaaaaaacaaagccagcaactcctaaacaaatagaagacaactgtgtgggtcatttggttactaagaatacaaaggtaacatgaagccatcgaattctgtaaactttaacacacacctctagaggtgattcatgcatgctattgtgtgctgttgttcatttctttttattgttgtggagtgttctgctgcaagtttataccacaatgcagccagacacaacagaatatctcctaatgctctcatttatataaaatacaagaacaagcaagactca

SEQ ID NO: 47377 - DNA, 1594 bp, Bovine  19866881015571
  misc_feature (1)..(1): n is a, c, g, or t
nttgtgagtactttgttttctgccccagtttaaggggaactctacatgtgcttataaatctttactactttctggttttgaattctctgaagctgaaaagttactaaaattattttgaaggattatataaaacctgaacatatgcaatgtacaatacttcaaaaattgtaatgaagaacatattaacatttagtataaaaatcgtttggtgtcaatgggaaaataaacagtatattatactccacatttattatattgaagatcttgttcctcaaactgaacaatatatagcaggaaataaagtaatatgacatccagttattgtatgcttgttaagtatttgcaagcaatgctttgtttttcttcagtgcttagacttatattggattagttgatatgctcaccatatctgcacacttgtggagattgtaaaatcagaaaactggttgatagtatttttagggctttctgcatttcataaatgcatcactgtgggcttaaatcttctagcaagagagagtaaaatagttatataccagtattgccttgagcattctgacacaggttcagagaagagaagcaattatgttagatcttaagttaagatttgacaatattatgttaatggtgctttacctttaaaatgtggtgctttcctaagaagcccctgcgactgttgtatactgaactgcaataccatttttctaggcaggttgcacttgataggggcttagaaaagctgatctacgtttgggggatttttctgaaatctattgagaggtaggaggattattctttccctattaccccctggctaggatagataatgtggtgaattatcacccatgtaaatactccaccagacttcttactctagaggaactctgtgtacctagaaaatattactttgcccagcattctgcatttatctatgctatgcaaaccctgtaggaaaaaattttataaaactaataaccaaatagctgtcataagtctaccacatttacacctttttaaagacttgagcagtcttgtttggaaactttgttgatcttgtccattcagtatgcaacaaagcaaaaacctatatgttattcaggaacttgataagattgtaataccgatcatcagttctcaaacagaatggtcttgtttcggatattctgataaacagaggtgccatttagtttttaaagaactagaatataataaaatatagttcataatcactttatgaaactggtaatgtgaaaattaattctggtttgtgtgagatttctgatcatttgaattctatatacattagaattcacaattaccacttcttaaacattagttaaccctttacaaaaggaatgggatagactaggcaaaactaggatttataaaaagggaaatccactcaaatttatataggagattataatagacaaacaagtagactgaatggaagatataaatttgattatatacataattatgcactcacagatgtgtgggtgtatctggttggggaggtgttcaattggatctagaaggttggtttatagatttattcttatatatatacaaggtttaggttcaacgaaggcat

SEQ ID NO: 47378 - DNA, 2696 bp, Bovine  19866881095359
  misc_feature (1)..(1): n is a, c, g, or t
ntacctttataataaacttaattttgtatcctttaagtgtgtttttcttagtagtcaaattttgttgcaatgagtagtctacataagactatagaactacattgaaatgattgtggactgattatgaacagaactgacactcatatgtttcccattgaactgctgaataaaaattatactccaagaaggttaagagagaagggtcagggacacatcttcaagcccatctcttctctctgctgaataggtaggtctttggtagagtctgccagttaaagtacggcatttcattgggagaataaaattatgttgtaaatacttcattcaaatgatctcttatgttatatgaaaaccatgtttgtaatatgaaaacattacctcatattttgaaagatttgattcaaatagcatcttttcttaaaagggagacattcttctgaaaaaataaaaggcaaagatttcagcctactagcttgaatgagactttgggtgtaaataagtcattagagctaatgagaagtatgcttacactatatattactatttctctgaattaaattatttgaccatctcattgctcctggcctagagcaagtacaaataaagtggacaatcatggtaatggtgatggttagatgtcaatttgcacagaccccatctttctcatccttttctacttttatatttaagtaggcattggtataggaattccaaacatcatattttcatcctggataaaagaggttttcattctgagctggtgcagtaaattgtctcttgggttaaaacaaaaccatctgctccttgttttgattttcaatcaaatgtataccttgttacataaatataatctatgcatgtattcttaataaaataacaccctatttatttaatggaaatttagaaggtgatagataaatggccagtcacatgatcaaaagaatgcttttcatttggtttaaagctcttttttcatgtctagaacttagcttttcaatttacctatgaagaaatgtaatgaaattgttttttttgctaatccagaaatagaaaatggaaggcttcagtaattagtttttgaaagagtagttatctaatgttatttaactttattttacttcctgtttaaggaatttcacaaagatgcactcacacaataaactacaggaaaaaaaaaacacatggaaaatttattctattggaaagcacaccttttccttatcagactaaaagttttgtcagtgttttacaggtagtaagcatattattgacaaaaaatattttaaatagttatataattttttgttatgtttaacacagctatttgaaattgtgattttatccatatagtaatttaatacattattttatgagatcatatacttaaccaatacattctcttaggttatttctatattaaatgattagatttcaattacttatataaatgactgctactgctaagtcgcttcagtcgtgtctgactctgtgcgaccccagagacggcagcccaccaggcttccccgtccctgggattctccaggcaagaacactggagtgggttgccatttccttctccaatgcatgaaagtgaaaagtcaaagtgaagatataaatgactaggatatttaacttaaactttgttgtctctcctcaggttttctagttccatggcactatttagatccttagtttaactctacatgggaaaaccaaccctttctaaatattcttctcactctattctcggttttttcctagcccttcccagtggttctttctgatgtttctcagaaattctcctgtgccaagtaaacatgaggttattcttagtatattaacagttattatcatgggagaagaattattttaatattaataaaaataatttccacttactgctggaagaaattagcttatttttaaaagttggttcaatgattgatatttttagaatgttcatttaaaaaaacagcaactctgtgtggagtcagtcagtttttagcatctttgcctactcttcacaataagaacccagaaatcattatgcacatcaaatggaaacccaatcttataaagctaaataataaccccctagtactgacggcctattattcttttcggagtcaaatcacttaaaaagaattaacaaataaaattttcaggactcctctgaggcaggtaaatgttttcttgcttattttttcagagactacatttcggtttacttgctaaatctaaatggtccttgttgctgattccagcagtgccaagaatcttccggttgttagttcagtccttagaaaattataattagagattgatataaatgacacctagttatgcatttggttcaaattaacattgaagtttcttgacccatttaagttactttagagttaatagaattggaaagttggaaaagtccttggagatgatctagtccaatcttttattttacaaatgctgaaactgaagctcagagatgtaaaatcctgttcaggtctcagtcttcccttcaacagactggactggtgtgcaaagatcagataaccacggctcgatattgaaatttcttggtagttcaacagattttccaagtgacgccattagatctacagagaaatgggtcatggaaaaaaaaatggcagggggtggggggcattttagaaagagagaggatttgggggaggggg

SEQ ID NO: 47379 - DNA, 1105 bp, Bovine  19866881110011
  misc_feature (1)..(1): n is a, c, g, or t
ngaataaaagaaattcttccttttttaagttaatcattaacatttctccaggaaacaaacaactgagactattgtcttatttccaaaggttgcccaggggtgagcaaaaaagctaatttcattagatgcaaaacataatccaagggtggtcatacaatcactgcctgcatctgtgcctgcccataaaaataccccaaggactaggaagtttcaaagtaaatgtaaaaataggatacacgaggacattttcacacagtggttaaatatgtatatatttaaataaaatgcacaactagtgtattcatcatttatgaaagccgattggctattattcagtgcatgtcagatgtcaagagggtagaaacctacttccttttaaatgctgtttttgcattcttaaaacaagaagtagagaaactttgggaataatacattatacaaaataatcaagtaaagcagcaagagtgggggggggaatcagaataagtaaatcaggatttaaaaggagagatctttctatattttttctcaaagttacacagtcagtaaagttatgggttaaatgtttctcattgctaaatgttattaaattccaataaattttataactatcaatatagcaccttataatataaggaaagcccttagcacagtgcctagttcatgtaagaacctgtgatttttattaactgttatttccttttcctgaaattgattttaacaatgggaatatgtcacagattttcctggtctgaatgtttctttgctggaaagcaaataataaaggaatatagttgcctccttgggataaatcctcaaaaaagagattcaaatcatgttaaaccatgaagacacacaactcatactcagaagccttggctacttttatttgttgaggctcccaatgaaatagaaatgccataacaagattgcaaaatttacacagtgaattctacatgtttatcttttgcaaatttacaattttaacacacacacacacaaatacaatgcagtgtattcgcaacataatggcaaagtttacttttaagagattgaaatgtatggcactgtagttggaaagacattcacatttgtctgacgtctg

SEQ ID NO: 47380 - DNA, 801 bp, Bovine  19866881122153
  misc_feature (1)..(1): n is a, c, g, or t
nctctttatacagatatgatttaagattaaagtgaatgttctaaagagtaaaaacctaccttgtttgtttttgtcaataatatttgaattgttacaggcagagctttctctgtgagtatgtttgtgtgtgtatgtatttttagatgaactcatttaaccagtgcagcctcagtatttattctcaattgccaaaatatttatttttgtcctatattttcttttgtattgttataaattcaggattaagtgtattgtaggttcccagacaagtatgttctgagatttcattaatttgtgtaagttgtaatggtacttgaaaaatgtaagaaatgctggaagaatgctatttcatttaccatttacttttacctcaatgcaagacatctgaaatatggatagtctttaaaatcaaagctgaaagtgtaggagagtttcactaagttttactggggtactgctaagctatgtattcaaaaggaaaatgtgtgcatttcaaaaaccatttttgttttgcctttttttctccttcctcattgaaaagtcattcttaccacaggtttaacaataataactacaatttatgcctttatgctgctacaatttgatgatataccacagtcaggccacaggttagaaacacaggctgagttattatatgctgctgggtagtgatttcctgtgaactgatttatggataaataattctatgttcttattatataggatagacagtttttaatttctttaacaaagcttagcgaacaacagaaaattacatgctatagcacagggacacaacca

SEQ ID NO: 47381 - DNA, 811 bp, Bovine  19866881176150
  misc_feature (1)..(1): n is a, c, g, or t
ncttttcttttttttttgtgttaaagatggtaagatggaggctcaaggaaattaagtgacttgcctcagtcaccgagaggacagtttccaagcccaggcgctgttgactatatcaggtgacttgccatattggccggtgacattttaggagattcacgtttttacttaagtaaaaacattctaaaaaaatgtaatgcttacctcttttatggtaactcacaattcatgaatgccagcatatgtttatacagcactttataattttcagtgccatttagctcatgttattataattaccattttgtgagtcaggcaagggatttttcattggtggtgattttattctggttttgcttttaaatccccattttatagaagaaaaaaagaggtgtccagagaggttaagtgagttgttcatagatgcagagctacagccaacaaatggcagctcaggaccagacctggatatcctgcttcccagtttgccctctctcagaaaagtgtctttcttgtttgtcatgcacaccctgtattttaggcatcctcgtgcttacagggctgtagttggggttgtatgaaacagttaaactggcactgcccttgccttctggcagcacataatcaaagtaaagtaaaaagtttttggagtttatgcctatacaggaaactgttttcttctgttaatattacctcttcatcccaggggtgggggagcctggtgggctgccgtctatggggtcgcacagagttggacatgactgaagtgacttagcagcagcagcccatgccaaatcctgcaaacttaaggaga

SEQ ID NO: 47382 - DNA, 1162 bp, Bovine  19866881199424
  misc_feature (1)..(1): n is a, c, g, or t
ntcaactaggacttggatccttcccactgagtgtgtgaaagtgctagtcgctcagttgtgtccaattctttgggaccccatggactgtagtctgccaggctcctctgtccatggaatcctccaggcaagaaaatggtgtgggtggtgtggatagccattctcttccccaggggatcttgccaacctgtctgtcctgcactgcaggcagattctttaccatctgagccatcagacactatagaaagagggtgatgaaagacagaagctccccagctatagcagaaagagagagaaaggcaaggctgtgctaggaatccatctcttgctttttcttcatataaagactgtcatggtgatggacgattggtggcgtgaccactgtgcttccttatgaagatgctggaaggagcacagaggaaacactggtgggaaatcttcactttaggatgcaacacacctctgttcctcacagaagagttgagaaacatcagaaacactccctgacccagggtctctcaaaccttagtcacttaccactgtcatcatttttgttctatgcaagtaacagctgtatttgttcttctttgatatttttctataaatacatctacatgttttgacctaatactagagcttaacaccaagtgttcagtatataagcaattatttttctggatacaacaaaatagcctcagttttgtgctgtattttgtggcctgaaagtgcattttttcactatgatatttctttgaatacttaggttcttggggaatgacatcactctgaacagaaactggggaaacgctttgtacaaaattttttaatgtggttaaaatttggggaaaaaacagattcttccaattaatgatagctttggaagaaagtggtatacccgaaacctctcctctcccccaagcctggctgagcaagcagggaaagaggtgactttcattcagaaaatgaagtacagcaagaataatgtgaatttgctcaaaataataaggaaaggaaaacatttcttaaaggcaaaaataatacaagtcaatttgtatgtctctaaaaaaaaaacttggccaaggtaaaacattgtagctatttcagattcttgctgaagattcttcattcctagcaaggtgagtcacaggaagggaatttacaggta

SEQ ID NO: 47383 - DNA, 1547 bp, Bovine  19866881222375
  misc_feature (1)..(1): n is a, c, g, or t
natgttattatggaaatagtatagaggtttttatggtccccctttggtttaaaaatattatcagtgttgagcctggtaggctgtagtccatggggtcgctaggagtcggacacaaattgagcgacttcactttcacttttcactttcatgcattggagaaggaaatggcaacccactccagtgttcttgcctggagaatcccagggacagggtagcctggtgggctgccatctctggggtcgcagagagttggacacgactgaagcgacttagcagcagcagcatagaattatataggttttttttttttttctttactgtactactttctcttaaatacattataactattgtgatttttaactgagtcccctgaattcaatgggctggtgtggatattagccagatttacttatagatgttgaatgtggagggattggttagagggaggggagagaaagagaaggaatgagacagaaacagacattggatatgaggccctatgagatctttcagacttgacataaaaccatccttactgaatctcaaaggtgcattatgtgatttacttgagtttcaaagtagctttgcttctctgtcctgccctatctccagtgctctgtcaatgatgcaaatgggttctgttagactgataattttgagaagaggacctctgtagggttttatttttttttgcatattcattttcccttgcttctatcccaaatttattttagcattggcacacttagcagccctatggacatgaaataagttgcctggctattttctgtgtttacctctttgcattttgacatttggttatgaatcctaacctatagcattcttttgccccttgtcactttatggacttaagaaaatcagtaagaggcttttgaagatatgaaaaggtttgtgactattttacaacttaatattacccaggaatggttgtgggatgtccactgacctataataagaatggtttcatgaaatatgtacaatgaatcttccttaatagataaactattctctaatttatttaaaatccaatgacctacatattcatgtgttcagaaatcccccatttactagcatcgtttctcctttgagaccttccatttgagcaaatctgttaaatgaagtagagaggaagctttgatccaaactaggctaaatccattggaacaaatgccctgccacatgtgaatgggagcattagaatgccagcaaagggaaatgaagggttattctctgtccctctctgcacctctatccccttacccctctatccccttcaaaggtggggttcaggaaacagccatgcacatggaattggcaataaaaagtttgtatcatttgaacgaaacttttgccacattcacttttggcgaagtgcagttatttttcttttttctctagcagattatatgccataactgggaaagttcagactcattttgtgtccaggtagctcttctgagtcagttcttagaagcatgttttcattagaagtctatgtgtattttgcaaaatgtgttagtctt

SEQ ID NO: 47384 - DNA, 1323 bp, Bovine  19866881262486
  misc_feature (1)..(1): n is a, c, g, or t
ntactaattagtttaatttgcaataacacaaagcacttaactctccaaataatctaagttagtgagtcagtttttatattatgacaatgacatgtttaagagactccagagcactgcttttttgacctttgacacacatttctgataaaggagcacatcaaaagatgtttcgttttccttctgcatgattctttcatctgtttcggtgccaattatttgatcagtgagacggtttggtagccttccataacagaaaagcatctgagactgatatcttaagaggcatacattagccaaaggattatatttgcaaaaagaaactattactattccaagcggtgactcttcttagatcactaaatcccttagaattcgtgtgttcacatttaattttatccatttcctcccctttgccctcttttggggcttgtctgcttgggagaggtgagctcagctggtgagttccactttcttctcttattccatctcttctctgttcccaggctctgcggctactaccatttctgccccttcccctgacagacaaatgtttaatgtctctctctcctttccctttcccctacatttggtagcaacatccctttcagaagcctgagagggaaaggctctcaaaaacattctcctccctgttaaattatcttcatctggggtgtccccggtccctccagcttgggagttggacatcctttcgtgtttctctggagttgttccttcctttgtgtcctattcattttcatttcacacaagaccaggggtttgtgaagcacaggaacaattccggacctgaatggaatcctcgcctgattatctgtttagatcaggagaggcaatctcgatgaactgaaattcctgctcttgggcccctgggctacaaatggctttatataagggcttgctattttcatcagagcctcaatttctcagtcatgttctttttttaaaaaatttcattataaagcttaaccctggtctgtgaagtctgttaagacttcagaaagaaaagtactaggaatttctgctgttattcaaatgggagaaaacttgtctggcctcttggagaaattttattcatagccacccaggtttgaactcaagatagcgattttcaaaggaagggttagattttaagttcccctttcccccccaattgtggttctgaggtaaaagcaaaatgttactctcttctggaagatttaatcctagtcaatgagagctaaatttaagatcaaacatcaaatggctgctaagtcttgttttttaaatcaattactggagaaataagcacacgttttacaagtttaa

SEQ ID NO: 47385 - DNA, 1277 bp, Bovine  19866881262834
  misc_feature (1)..(1): n is a, c, g, or t
ntgtttcaggtttaaaatttactcaaacacagcaaaatattttgagtgtatacatatttccttgtagggtagaaattgccatgctaaatatcaaatcttgaaatatcaattattgaaattgttcacaatggttaagggcaagcaaccgttcaatggtgtgtccttttactaaaatgattgttaagtaactgtccagcctttaagacccttatagtgaaaatatagaactatttatggaattcatgtttgaaatttccaagagtatttggacttatttggagctcaagtttatataataaaaacacattcttaacaatttatttaactaaatttggagctccaagctttcaatggatgtatgaatcataggagccttgccagatgttttggagtgtggaattcaaaacgcattagcagcatggcacgtcatgaagtttgatgcaaaacatttcttctctctttccaaaaagccttgtttggcttctattgtaaggcatgaactatggtgacagttcatagctctagggagacatctaaaatccttaagtagtatctacccagacagtggaagcatgaggcaattatctacacaatcagtgtcataaaaaagcttgcccacctggccatatccagaaaactaagtccaaaatgtatttacctgttaaagtttatttcgtttttttatacctaatattcagtagacaatcttttgttccttcctccattttcatccgctcacatcaatggatgaccttctctattatttacaaagaaaacacaattaactagaaaaatcttctggagagtcccatagttctaccaacacagctgtcagaatctctatttctctggatactgctataccatttataccttcttttacttatcctttgcctttgaatcttttctctcagcttgtaattttgtcccagtattcaagatcgagggcaagaagagaaggggtgacagaggatgagatgttggatggcatcactgattcagtggacatgagtttgagcaaactcagggagatagtgaaggacagggaagcctggtgtgttgcagttcatgcagtcacaaagagtcaaacacaatttagtgattgaacaacaacagcaacagtatttaatagcatcaaatttgatatgaaatagtgggcttttaataaaagtataagatgaaggctttattctcaagcattttagaaaaacaaatataacacattcaagtatcttcttttgatactgtgatcccttgaagatgtcatttgttttccc

SEQ ID NO: 47386 - DNA, 1299 bp, Bovine  19866881266418
  misc_feature (1)..(1): n is a, c, g, or t
ncccttcttgttagagaatagtgacattgtaaaaccatcatcgaaaggcatgttttttttttttttgtaaaaataaaaggccctgaattttatttatttaggccatacccatagcttatgggatcttagttccccaaccagggattgaacccttgcccttggcaatgagcatgcagagaattcagggaattccccttgaattctctgtaactcagatggtaaagagtctgcctgcaatgcgggagatctgggttcaatctctgggtttggaagatcccctggggaagggaacagataccctactccagtattctggcctgcagaattggggtcccagagctgctgctgctgctaagtcacttcagtcgtgtctgactctgtgcaacctcatagacagcagcccaccaggctcctctgttcctgggattctccaggcaagaacactggagtatgttgccatttccttctccaatgcatgaaagtgaaaagtaaaagtgaagtcgttcagtcgtgtctgactcttagcgaccccatggacttcagcctaccaggctcctccatccatgggattttccaggcaagagtactggagtggggtgccatcgccttctctgggggtcccagagagttggacacaattgagcggttctcactttctttcactttgtaacagttcagtaactattttttaaggatttttcacactgatcagggatgaaaggaatagaacactgtactatcatatctgtatcctctgattctttggtacaagttttgtgaaggaggtggataaaaggagcctttatattttcttttacatgaaatgttctgtttcaactagatttaggagtgggaatacgctagtatactgaatcaaatttctctttacccagagcacaaacagacccagcttatcccccatgctttttgcccaaaattgcctaaaaggtgctaattaacgatagtctttatatgtaaggagggactaaattgagaccactatcctgagggccatccttaagtcactgaataactttgagacactgctgtcttgggagatattaatattattataatctttaaatctatgaattcaagccagtgattctgaaatgaaagagtacctattttatgaagcttgcaggaccctcttttcctactttattaatttaatgttgaaatcaaaagagggcatattatttgcttcaaaactcaataacatgttcatgcctgatctgtggcatttcatatttacagcccatctttcagtggctggatttcctttttctcacaggttcc

SEQ ID NO: 47387 - DNA, 2128 bp, Bovine  19866881278763
  misc_feature (1)..(1): n is a, c, g, or t
natttaatataaataaataaataaataaaaaccctgtacattcaaaaagtctttttaaatattttgcctccatctttttttttcctgcaaagtcaatttctacttatttttgctgtagtgcagagacagaaaatataatctgcacattagcacttgatgcacttgaaaccttactatattaggaaaatctgaaattttatctgcctaaagtaaatagttcttactaaaataccatttttctctttttctgcttttctttattggcaattctatcaaaataatgaataaggggaaaaaactgtaccaccagaggtaattaaataaagaacaataagcagctttgggtttataactagcaagggtatgtgtcaggctgttcggtcaaatgttgctgggaaacattatctgggaagactttatgggaagaagatgacttccaaagaaggctcaagtttataatggaaaagttaaatatgagctttttaatagttggcaaaaatacttcaacacaacacaatactatttcaagcttctcatgaattatgttatgttacagggataatgaaagacatgcttacttacggcttttattgacaagttccatgatctatttccatgtgccaaagactcagcacagtttcacctcacagatgaccatggttcctctaatgcagggtctgtatcttcaaatagatttacaaaatgaaccaaccctcccaaattttttctaagggttggagaactggttcctggaccttcctttaggtctgccacaactcatgttacacggagaaagctctttttgtatttttcacctatagctctttttgtgttgttaaagtcagtttctacttactttggccttggtaaagatactgaaaatttgatctgtgcattagcactttatgcattactatattaggacaatctgaaattttatttggctaaaataaatcatcctaattccatttacttacttctcctcaaataccctattacacaagcctcgaattatctttttttttaatttttttatttttcgaattatctttattataaccttttaggcctctttacggagaaggcaatggcaccccactccaatactcttgcctggaaaatcccatggacagaggagcccggtaggctcccgtccgtggggtcgctaagagtcagacatgactgagcgacttcactttcacttttcactttcatgcattggagaaggaaatgggcaacccactccagtgttcttgcctggagaatcccagggacagaggagcctggtgggctgtcatctatggggtcgcacagagtcggacacgactgaagagacttagcagcagcagcagcagcagtcctctttaaccttttcatgtccttctcagttgtgtttctaaaatttaagtacaattatttgttaaggtcccagaaggagacagttaatattcttaaggctcctatagactgccttttcacgtaaataactcagacttgatacagtttgttttcttatgacaaacccttgtttatgatggttcctcctctggagccttgagaaggagtctggcctgcccacaccttggtctaggcccaatgaaacgcctccagaaccatgagagaataaatttctgttgtttaaaaacagaaatgaacaaacattttgtttaaaaagtggggatttaccttctagttaaaaatggcagactgagcacagacatctacctcccctttcttccaaagatccctttgaaatgacagtaaaggctttttgttttgttttgtttttttaataaaagtggaacaatgctgggaaccatctgtcagtcaaaaatgttgaggaattcctagaatactgaaaacatatgtgatcggaatagacagagaaagagcagaggaaaccacagcccaagatatcagaagtaaataaaggccatccacaggaatcccagaaatctccaagttcaaagtcactgaacgcaaagggtatggcaggccagttaccaggttaattctttaaaagagcatccctctcccactcccactgtaaagtagttggcaatgaaagctttcgcccttaagctaaagccagaatattccattccaaagatgtgatttgtgcccaaag

SEQ ID NO: 47388 - DNA, 1895 bp, Bovine  19866881286704
  misc_feature (1)..(1): n is a, c, g, or t
nataacaacagttcgtgtgtgtgtgtgtgtgtaggtgtgtgtgcgtgcatgcgtgtgcgtgctcagtcatgcccatctctttgcgaccccgtggactgttgcccaccagacttctctgtccatgggattttccaggcaaggatactggactgggttgccttttcccactgtagataacaacagtatttttacctatttactgtttctagaatctgctcccaaaccatattgtccaccttctgaaaatctgaaagctttgttacttcagtctcctgacatatcttagggtctccttgattcagtgatgacctccaagtcacccacaatcatgcctacaagttcccttagaatcctggggtgcaagtcctctggggatggaatgtaggattcatttaagcatcccattctttctggaaatttgtgtatcctttcaacccatgctggacttaagttttgaagataattttccttgattgaaacacttctcttatctactagcattataccatcatctccagtattattcattttactttcttgttcacatctgtgatctgaacagaattgaaatgataggttttattgcctttgtcacttttgtaagctttggcttatcagtgcattaacgattctgacaattttcttatacatttcacaattcgcgtccttggttatatgaccttcctttccattatatatgtattcttccaaaacctaaactcatcggaaagtttctgggcagtcttactgacgtctttatctccacatttattcatcataatgtagtcagaatttcatttttagaactctcgtctctcttatgccatattctctttccgagtttctctttataaaaccatatttgaactttctctaagctgcttttcaaacttttttttactcctaaagcattgggtacatgcctgactttgatcaaaaatctacgtcttagatattagcagttccaagatggcatgatcacgttcctgcagtccctactgcttttctgtttcctgaaaatgaaagatttaaaggaatagtatacattgtcaagataattaggctcagtaatttatatcagtgagtagctttgtagaaagggtttgcttggtcctgattgcttagttttattctgtaacacaaagtgagagctgtcaatttggggttttgcccttagagaaatgcaacatgactggtccggcaacttcagccatagcttcatttgaaaagctttagagtctacatgcgcattgtataagagcatacatactacacacatagctcattgaaatcaagactccaaagtacctcaacatgcttctccagggccctgtaattcatgaccacaatgagcagaacagcagtgttccttgtttattccatctgagtaacccaatagtagtaaaattgaaacttcataaacaagaagacattgaattctttaacaaattcaactatgttgtgaaaaagcccaaatgagtttttcaatgcagacgttttgtcgagacgcttaatttgtttgtcagacccaaaatgtgggagtttcaacaattgttatttattttccatgtggaacatgacaacataacaacttacactgttagcattttgtcctagtcttctctgttagaggttttgtttgaattctcaattgaaacgatgatatgtgtgatagctaaagagtgtaagtcagtcaagatatttaacatctatgagatgggggtttgcctgagaaagtccactggtgtaaaggaagaaaatagaactttaatttatattcatttttaatctcttcaattttcattctgtagatattttataacatatataatatagtaacatacttataaatatattaatagatgcatataaatatatcacaggtgttataattt

SEQ ID NO: 47389 - DNA, 1834 bp, Bovine  19866881356230
  misc_feature (1)..(1): n is a, c, g, or t
naaagaaaggctgcgaatatattcaaagagatatcaacttcaaaataaagcccaacacctccttgcccagtaacaaagcgcaataaggatatatgttgtttttctgccttagagatggaaaattttaaaaacacaaggacaaaatggtaccatgacaaagactgactaagaaagataaagcagctcttcttaaactgctcagtgttcaaatagattttgaaggcctcaatgaaaaccagctgggagccatgtgtaaaatataatggcttttgcctgcagggaaggaagtgagatcctgaatgattaagtttaggaaagtatataattcactgtatcattatggggtgaactggattacttataatatgccaagactttgtggtcttttttatatagagaaaatgagaaattattaaggaggtgactatagagggtggttgatctagtggggtaataggtaatgggttaaaatgggctcccagatggccgcatccctctctctctgacaagcctcacccgcaggagtgagagtgtcgccagagcttcatgttgtccatggtggtgaacatcaataggagatgacttctaactgcatttgagtcaataacagaattctttttacttgtttaattttacctcatttaaaataacagaatgttgacaaaaataacagaaggtaaaatagtttatccaaagaaggaaagcattcttctactaaaaattctgagaaagtatacttaacaggcaataagaaaaactggttagaacaactggaaagccctcatgcataactcaattagaatttgttaaatgaatgagtcagtgctgctatttttaaagtatactatatataaaaaatataactgagatatttgtcttaaatttcaaattttcccttttttttcaaaatcagcatctaagacttttaattttggctcaaaactcaatgggggagaatttagcattagtaattaataattaatgtaactatcatacgtctctctcatctgttggactgtgagctacacattggcacacctaagtgctcagtgcatctttcttctgctgtactagattaatccatattctctcttcctttaattgcaggccagttactatttttgttctgtgcaacttactttttcttgctattattcatctttagcaaaactatgctttaaagtaaagaaaccattactcattacaggaacttatacctaacaatttgtttgtctttaccattttgtgtgtgtgtgtgtgttaaaatcagctccagggcactgcataatccttaaggttgcttttatataaaagttgttagcaggagttgtgaggttacaaagttctggttttgcatccagtcttcatcctaaaaagcacatctgcttactagctgtgcaactctgaacaagttactttctcagaaccacagtgtttattaatctataaaatcttccttgcagttttataaggattaagagagataacacacttctgtgacatacctaagtaaaatggttctcatgagaaagaagtgaaatgaaagtcactcagtaatgtccaactctttgcaaccccatggactgtagtctgccaggctcctctgttcatggaattctccagacaaaaatactggggtacatagccattcccttctccaggggatcttcccaacccatggatagaaccctgggtgtcttgcattgcaggcagattctttactgtctgagcaaagagcatttgtgcaactgtgtgagttgagagctgaactagcacctttgtaatgaaataaatatcatttttatttgaaataacaaccaacaggcatactata

SEQ ID NO: 47390 - DNA, 2116 bp, Bovine  19866881366790
  misc_feature (1)..(1): n is a, c, g, or t
ncctgtatggaagagtttattctcttagtgttgtgtgtctgttagaggaacactgctatgtgaagttaatcgagaggatgtcttcttttagacaaactctccaaccatctcactcacaagcattctgatttgtgtttaagtattatactgatgtgtgtgtgtaggttaaaaatcattcaactccacacaagactgcaaggttgtactgtttcttttttattcttctgttgatgtttgtttgaatttgtgtattggaattcacatctatggggcatattttaggttataaattcttagaggacagaaattgttactctctgattaactttgtatatcttctcatttgggtctatgtatatacaaaagcttaatgttttcaatctgttgaaaaattaccaggcctgggatttttcaagggtaaaactgtattccatgatatttttatttaaatttggaattcatccagattgattctttcacagagttgccctaatgtgagattatatatacaggagaatgaaagcaaaatgctctcattttaccaacatgtaagacagagcagaggggagatgattcacatttaatgtgcatctgctgtgggtcaggtaatctaactgttttggacaggtttcctcggtgactattcacaaggtaagcagtaaaggataatgacgtgtatctgaaagattatgttgcttgttgtttagttgctcaatcatgcaactaaccatggactgcagtcaaccccatggactgcagtctaccaggctcctctgtccatgggattctccaggcaagaatactggagtgggttgccatttccttctccactgaaagatcatagtattcaaaatagacttacctgaatttgaattcctgttctactaggctgtgtaatcttgagaattttacttaacttctctgaaagctgtcaattataataccccataacatcattatataaatttcaagtggattttattgttgtcatggtaagagttgctatattcatttgataaagacactgaagacagtagcattacatgatttacccatcatcccactggaaatgcttggcaggttttctattccaagtcttataaaaatgtaagagcttaatagtacttaaaaggctgtaattaacttgggctgtgggtgtgatcatgcagagaagtgttcttagcactgaaggaggagcagtcatgacatcagagtggcatcagaattagagaagtgagactagggtgctgctatttacattagttaagatgagatttggtcattagtgaaagaagacccaaaacaacggtggatttaaaaagatagaagtatgcttcttcctcatataaatgaagtcagtctagtgttgatatgctagctcaaaaatgactggggacgtaggctctctctgttgtatgttctgccacttaaaacacccagctcccacctcgtgttttagcatgattgctccctgtccagtaagcccatctacgttctgctgcattctagagggaaggagtacaaatgaaggagaaggtgtgctctcgcccttttagaacactcccggagtgttgtgaccacaacataagttctgcttctattctgttggccacaatgtggtcacatgactatagtagctgtaagaaactgtggtcatgaactaactggagaatcttgtgactggaaaatggaagggcatggatgtcaaaggacagcaccacttatttatgggttttgtgtttgcaaaactagtttgtacaaagctatttcttctctactagtttctatgctttcaatttgattaagaaactattttcactaaggagagattacagggtttcaactacagatacaatttattcaaaggaacatattaaatcttctacaaattataattttttattagtaataagatgttatcaaaacagcctaattttaatgataaagttttacacttaataagtatgatacatagtaaggactatttaaggaaatgaatgaataattaatacttattttagtaagatttaactattctttctatatttaatctaaacttgtagctatccttgagtagatcaacgttaacttgctagactgtaatcaaaagccattt

SEQ ID NO: 47391 - DNA, 801 bp, Bovine  19866881432883
  misc_feature (1)..(1): n is a, c, g, or t
ntaggcattttgtagtagcataattcagaaccagatgaggggagattaaaagtgcacaacactatgttagacagagaagtgaaataatcataacactaatcacaaatccattttataccagtaggagcttcccaagtgcctttgtggaatgatctccctgtgcttacttaggtgtgtttctttgttcctgtgtttgtttaaacatataagtttgtcacatcctgttatcaatcataatagccacagtgagaaattcagtttatgaaacagaaagccttgaccctaattaacaaccaggtgagtgaagctacctttgagcttagaaatggtatatatcagcatatcatcagtcaaactctacttattatctggagactacgactagcttataatcatatactttcccaacttttggcaaaagcactggaattctggctgtatttgccaatagacctaaatgctggaaaggcaatgccagtgtttgaatggtttaagagctgtgatagagtcactttaatgggtgctgcccagcctttacacagagatagggtttatacaagttagtcaatccaaattacatgattcttagaaataagtggataaaaattattccctgtcataactggggatagcaaggtgtttgtaagattgttgagcaattcacaatacagctacataccaggatttgattctttacatcagcaatctctgctctgagttccttttaatcctgataaatttatcagagaaatcattcatttattcatacatgcaaacagcagctgcttttaggaaagtctg

SEQ ID NO: 47392 - DNA, 726 bp, Bovine  19866881477776
  misc_feature (1)..(1): n is a, c, g, or t
nctgatattttctattcttgtttaaaatgctggtagacacatgcaaaattgatttcatgaactactaatggattacaaagctcttcctttaaatttttttaaatttatttatttgaatttattttcaaatacatacccgtacacacacacatttttgcatatactgtgtcaatatgtacaagggttatatgtccattcaccccaggcaaatgagtttgaaaggtactgttctaaatcagtgctgaattctcttccccagtccttccttagaaacatctggtatgtcctgtggctgcagaccatctcatcaggtccccaagcccatttgtagcctgaaggcagatcttatttctgcacaaatggcaggatttctgcacatattattgatggagaggtctgtcttgatcgaggcatccagaagatcagcagatatttccttttctggaaaaatactccagggcaaggaggggcaggggatgaggtttttttttttaactaatttggatggcaactcttcttttccccttcttttttgagcatggcttataaatataattgttctagtatttctcaagcatcatgggggtggaacttaatacaattctgttttattaaccaatttccccttttcttgttaattgtactttaaaaatgactatgtgtaagaacgtctttcccagatgggctgccggggaaaagagcattatttcatcatttaattcagca

SEQ ID NO: 47393 - DNA, 845 bp, Bovine  19866881501604
  misc_feature (1)..(1): n is a, c, g, or t
ntgattataagccttttaatttagataccaaaatatttgagtcgatttttggttgtattctgtgtaaacagacacctgattgacttcagtgtagattcaactctggtattttgctcacaacagccctagatactttggagaatttcaaaggatagatttctcttgtcactgtggggcctagtagaggaacatgcatgcacacacaaaacatattcaaaattattttttcaaatacacttattgagcatgtcttgtaagttccaggttatgtgagaaaatcaaaaggattaagacacaccccttctcaagctcagtttagtgcaggagacagatttctatatgggagtagaaggacattataagaaaacacagtagaataaaaattcaaggctaatttctatgtgctcttttaattactttgtttccacaagcgaaaattcctttggcctttattgtttaaatggtgaaacaaatactaaattctgcttgtccttgtaggtagctggtgagagctctccaagaggttatgtatcagtgcctttaggtttccttttgaagccaggtttaaagaaaaacatactagactatagatagtataaatgtttgagggtaactgaatacttcttttcaaattttcccttcctcattgttcctatcttctttccttctgaatggttgcttattatatatatttttatatatctatatatggagaagatgggcctgaaagcatattatgaagcataattacaagataccgcaaaagccacgagaaggacagaaagcttaaaagaaagaacaaagctaaaactaaatcttcatattttatatccagtaattcaagt

SEQ ID NO: 47394 - DNA, 1839 bp, Bovine  19866881503992
  misc_feature (1)..(1): n is a, c, g, or t
nattccagatatgtgtatataaattaaaaaatttaaatagcatttaatggaagtagtatttttgatccaattattaaaattcaaggagtttatcttagaaaataacaatgaatgaagacaaagaactaagtttaatgatttaatagcagcataatttgtaacattaaaaatgtaaaactgtaaaacagagtaaattaaatatcaaatacagttgtgacatatttaattttcatgagaaaaatatctaatgacatggttagaatgctaagaattaatttaatgtgaaaataagtgtacataaaatagtacatataggatgactacaattttatagaacaactttaaaataagcgtaagtaaatataaaaacaaagcaaatgtcaacagacgttgtccatggatggtagaaatctgaatggtttttactgtgattttgtacttctctgtatgctttttacattgtatctacattataatttctaaaatgtcttttactaaaatcagttctaaaagcagaagaaaaacttatgcaagtattacaaatgtagcacgtaaaagatttttaaaaaggaattcacttgaactaaaccatgaattataagaaaaaatgatgacttgagcttaatgttggtttgatgaaagaatgcatataccaaacaaaatttatgtggaaagccatttaaagaacactgtcctttgaatgtattatgtgtgatcccaatctctacccttaagttcttctactaaaacaaatttactttcagagacatgagtttcaactaaaactaaattaaactaaaattaaaaaaaattattaagctaagacatcatgaaaagttcagcatgcaattaaaaaattgtcatatatctccctaatgtgcttgctgtaaatatttagaatgcaatgagaaatctgaaactttgtgccaaggagtcagttgtttcatactctgccacagtcttggtgtcactgcaagaatgtatcaccttctgaaaatagtccccaagatgtttaccttctgtgtttctgcttcacctgccctagcaacgcagtctctcctttctctttcattgtggttgtaagaggagttctaatcagccacaaagaattagcacttatggcaaatattctaattgtttgattccaaacaaatgctatgttttagggcctttgtaatgtttcctgcaacaaataaagcaataatctgttatgataatgtgaaatgtttttgattcgtcttttaaagaacactggttaagtgagttggataaaacaacattgtagaggctcaaaattatatcaggcttcatgcatgggcctgagaatctgtggataaactgacttgaggaaaacagctctgttccacagtcacacattttctttttaacatctggtcagtcatcttgtaaaggtgttacaagtaaaaaatgtcactgaatcagcagagattcatgcccatactcaaaataccttttttaaatgttcatttctgcatattatgtgttagacattcagagaaaccatgtcagttatagcaaaactaatgctgaaataaattaaaaataatattttacaatagtaacaaaattggtcccccaaaagggaaatcttcagaggtcagaaattctatataaatataaatcaatggaattagtggatcctggagctggcacttgactcatgggcatctgctttgttaatagtagaacactgggtaatatgggtcatatgaaggtgtagtaaattatattacaccagacactctctcataaagctaggcttatctaagaatgagactttcaagaaagtgtacttggaaggaaacattccttgaaaag

SEQ ID NO: 47395 - DNA, 1088 bp, Bovine  19866881605035
  misc_feature (1)..(1): n is a, c, g, or t
ntgcatgaaaattacaactttctgaaagaagtccaaccacatgtggaagataataaaaatctagaagaagatgatttttatgacaccatggcctattactatgaaaaatatgataaggcaagttgaacaatattatggtcatagaaatattaggtaaaatagggatgggaactggaaaaatagaagtcctatattactgcacaaatatcttccataattagaaaatgtagcagaggaaaaaaagtacaatatcaaagtgaaaggtaaatagatttgtgtttgatcggcttgaaaattatcctcatcaccaaaagggtgtcttcaaatgtgaaatatagagatgattactttttactcaagtgtacatttttttatataacactttgaactcctcagtctccaccatctgtagaactcaatttccgtttcgtaaaaaaaattgctgacatctgtttaaaccctaatatctccacaaccatgtagaatgttaactcaggcttggtgtcatgttaaaccgttttaactttaaaataatattaaacttatggttctgtttcaactttgccatgatactagtatttaacccttcagatattctaaactgctcaccaaagaaaaaatcttggatggaaaaaatgaagtcaaatgtgaactcctcatctttacaggacactggagagatttgtctgctgctgctgctaagtcacttcagtcgtgtccgactctgtgtgaccccatagatggcagcccaccaggctccacagtccctgggattctccaggcaagaacactggagtgggttgccatttccttctccaatgcatgaaagtgaaaagtgaaagtgaagtcactcagtcgtgtctaactcttagcgacctcatggactccagcctaccaggctcctccatccatgggattttccaggcaagagtactggaatggggtgccattgccttctccgagagatttgtctaaaatctactaaaaatttggagtcttggaataatatgacagactgttggaaggccagtgacttgactaaaacacagaacagtcagacttaaagagatcttgtgctactgactgtg

SEQ ID NO: 47396 - DNA, 759 bp, Bovine  19866881654093
  misc_feature (1)..(1): n is a, c, g, or t
ncccagcttcacaaagcaagtccgattttgtctctgtgccacgttgcattggcttttctaagcatatttgcttatcctgtgtaggtcgtcctcagaaactagacctgtaaagtcattatacttccaaatgtgaagctgcttaggggtggatttaatttaatagccgaaaactcagtgcaaaacaaacacacttacaactgacattatcagggaatcaatcattaacgctctcgactgctgttccaagaccctcaaattgccccagctatgatctgagagttctcattgactccttcccccgacctgaacctccaacatctagccaatcccacctgctgctgattatcccttttaaatagttgctgggttaatttccccctctccatcctactctcactgctgttatatagacctttatatgtataatctcttgcctgagttagtttacttcccaacaggcctccctgccacagccaacacaacgtcttgccaaggtcttcaaggcctctcacgaattccagacagctgggtgccctgtctgcagcgtgtgccccagccctgtctgtgctcctcgacagcagcctttcaggctgtgctccaatgactctaaaagctccagtcctcacacttgaactctaatctcaatgcctttgcctcccctgtcccctctgtctggaaagtgcctctagtgaggaattctggaagggacccagagcagcactacttccgggaaacctctgggtcccccagcccaccagg

SEQ ID NO: 47397 - DNA, 1419 bp, Bovine  19866880051529
  misc_feature (1)..(1): n is a, c, g, or t
ntgtcagactttatttttctgggctccaaaatcactgcagatggtgactgcagccatgaacttaaaagacgcttactccttggaaggaaagttatgaccaacctagatagcatattcaaaagcagagacattgctttgccaacaaagtccgtctagtcaaggctatggtttttcctgtggtcatgtatggatgtgagagttggactgtgaagaaggctgagcgccgaagaactgatgcttttgaactgtggtattggagaagactcttgagactcccttggactgcaagaagatccaaccagtccattctgaaagagatcagccctgggatttctctggaaggaatgatgctaaagctgaaactccagtactttggccacctcatgcaaagagttgactcattggaaaagactctgatgctgggagggactgggggcaggaggagaaggggacgacagaggatgagatggctggatggcatcactgacttgatggacgtgagtctcagtgaactccgggagttggtgatggacagggaggcctggcgtgctgcgattcatggggtcgcaaagagtcggacatgactgagcgactgatctgatctgtcgtagtgaattctaataaaggagaaacaacaaattcactgagaacttagataatgagataatagagaaactattttttctaatatgtttagctcattttcttataattaagctacaagattattccttcacctacaaaatggataaattcttcatcagattgacttgttcgaaaagatagcttaaatggaatgaatttcccttaaatgtgattttctcgcaagattagattctaatatggaataatcctaaattgagagctctaattgaacagtgcaggaatcaagcgtgaggcaaagatattatccgtttacaaatgtcaatcaatgaagagccatgcattggtggaaacatttctatcagaattttctaatttatctcattgaaaactatacatgttttaaattaacaaagtaagtactatttaaccaataaacaaacatcatttatataaatcaatataaacacttaaatatatataagaaaaataaaatcatatatagtttaacttattaataaaataaaatgttttatgaaataaaaaaaaaagagacacccattggggcatcggagggctctcagaacatcatgcaatggggaatgatcataaatgacattgagtgtctgctgtgtgtcaggcagcccagcctcctcgaagcctcatgcctgcaccagatgtagattttccattcacagtgagggaattctctagccagcaagccagcattcccatctgctcttcgaagcatccttttctcaggatgtgaggacctgcacagcagcctctgtcatcagcgtgcatcccagcaaaggg

SEQ ID NO: 47398 - DNA, 1191 bp, Bovine  19866880142219
  misc_feature (1)..(1): n is a, c, g, or t
natcaaagctatggtttttccagtagtcatgtttagatgtgagagttggactctacagaaagctgagtgctgaagaattgatgcttttgaactgtggtgttggagaagactcttgagagtcccttggactgcaaggagatccaaccagtccatcctaaaggagatcagtcctgaatatgcattggaaggactgatgctgaagctgaaatgccaatactttggccccctgatgcaaagaattgactcattggaaaagaccctgatgctggggaagattgaagatgggatgagaaggggacaacagaggatgagatgattggatggcatcaccgactcagtggacatgagtttgagtaagctccgggagttggtgatggacagggaggcctggcgtgctgcagtccatggggtcacaaagagttggacacaactgagcaactgaactgaactgaacagaggttgtcaggaaggtttcccagagggagtgacatatagagtgagaccaccaagtagaagctagtttagcaatgagcggaaggaacagtgtctgagaaagccaggggccatcagagaatcactgtgaaggtcaaagtgataaactgacacactaacacagtctgtggccaggactcagtccagggttcctttgcttctttcagtctctccctttgttcttcccagccctacttccttcccattaatgttctttatcctacaatacactgtgttgaaggacaacagtcaatccttcaacttttaataattatctggaagaactcctccctgtcacccatcagctagtgaactcttcaaatctcctcttctcaggctagtactagccagcctcttgctcccttgctgcattgcctcactacagcggcagtggaggggggatgtcttgcacccttgtctgcatgatttgatcagtgtattctccacaatcctccaccttccggaacacgaagacaaaatgcatcctcctcagacacttgatttgttttgagaaagctcagtacccccccaactgagaaccacaatggatgtgtttgataaataaccacttagagttaccataaatcctcttctttgagagagactgttagtgttaagatagagtttaaagtttgacatttccctgaggtcggagaaggtcacagacatgtaccatattcagtaagatttaagttcatg

SEQ ID NO: 47399 - DNA, 1050 bp, Bovine  19866880168367
  misc_feature (1)..(1): n is a, c, g, or t
ngttctcgtagaaatgtactgaagtataatctgcatgaagcccgagcctcatttcaagttatctgttaattacatacccctctttttcagtgcctctgtgattgtggcaatggtctggttcattttatcccattgctcaacagattttaattgcagctgctgcagcagacaccttgaggtgcttttcctatagagaccgtggcagcctgctgctgctgctgctgctgctgctgctgctgctgctaagtcacttcagtcgtgtccgactctgtgcgaccccatagatggcagcccaccaggctcccccgtccctgggattctccaggcaagaacactggagtgggttgccatttctttctccaatgcatgaagtgaaaagtgaaagtgaagtcgctctgtcatgccaactcttagcaaccccatggactatagcctaccaggctcctccgtccatgggattttccaggcaagagtactggagtgaggtgccattgccttctcctggcagcctgctagactggcccaatgatgattaacttcaatgacttgaatcgctgaggaagagggaagctgcttccattttaattatgtctacaggagtacagcacttttaccccagttcattgtcctgaaacaaaagacttcctgaaaggaagattaaaaaacccaaagtgtggtggtctttacttacaaagatcttttttcagtccattcagagccacaacttagctctatattgggaactcttggcaagccattggggtttgcaagcagatcagaagatagaaagaaagcatcattcagtttattttacttgggcaattaaaatgcattgagctggtccagatatgaaatagcatctcgccatagtatgtgttctgcataaaaggaactctgacatgcagtgtttttttattgtcccatagagacagagccaaagacagcccaagctggtttcttctctctccttttccatttggatacatagtctcttccagcaaagctcagctcagttgccacttcctctgccttgcccgctctgcagtaaga

SEQ ID NO: 47400 - DNA, 2134 bp, Bovine  19866880426602
  misc_feature (1)..(1): n is a, c, g, or t
ncaggaggtgctcaataaatgttagagagtgagcagacaagaatggcagaacagtgttcatggagggattcaggggaagaagaggctggtcagtgactctggtaagggacagagggagactttagtgctctgatcaggattctggacttgatctggaaggtgatggagggcccccttcaagtttgatgtgtaagtggtgttgctcagctgtgtatgaggacagcaattcttatgccagtgtgaggaagatcacagggaggagctaggggaacagtacaaggttcctgcaacagtgagacaagaagtgtccgtgaataaggcagcaaatgtaaagctagtgaaggaaagaagagacagacctcgcaaatgatgatgatgttggagaggtagctgcagttgaacttggcccatctgagatggtagagtgcagtactcagatcgcagatgcttctgtttaaattccagctctgtcacttaccctgtgaccttgagcaagttacttaacctctcggtaccttgaagtcctcctcagtatcctgtccatggggttgctctgaggattaaataagtatttgtaatgtacccagagcagggcttggtgctgggctgttactactgcctaccaccaatcattgttttatgaagttgaactccccaaatggtttaccaagtgactgtctccttcagagtaaggcaacccacatctcagaccctcccaggaggtgacaagtgagtgtcgtaaatctagtaacaaagctatggaaagagaggatcacttcaagggacaaacttttatcagacttaagggcataggacttccctctgatggggtctgtaaacatctattcacagaggctttttctttcagtcagtcactaccttgctataacagtttgcagtactgtagcatgccagggaaactaagtgccgggtcattcatttgcagggagaaagctagtaagaatgcctggaaaacctgtaatttagaaatgttcaaatctttgcatccaaataaaaaagaaacggtgtcaggtttgtgccaaaaggaaagtcataattgctcagtgcttcccttcccagccctcctgggcaacggaacataatcagctaagtgggcttcagaactgtcatctacagaaactgagcagactgtgccacttatactactgagccaccttctcccaggaatattacccaaacagagtaaggcaaaagcccatttttccaagtgagggctctgcaacaaagttagcatctcctctttcatatttcctgaattctgatgccagattgaagcatccttactaacttttttagtgaactttcctcccagcatgtcagtccagagtttaatactcactaatggctcccttactccttttgaatcaagatcaacctctttatcttgatactgaagaacttctatgatttagcagtggatcttggcccacaaagaccttctaatttcaccaagtctgtctgtttactgtcacccagaagtaccatatttactctccgctccaacttctcagagcagttttctccctgtccacccccttcacttggaatgacctcttcccttctgtccatttacccaaaccctactactttcttcaacatatcaactaacctttctaaggacttctggtgctcccattattacattcttcatgcatctactttctgactaaccaagtttaatttgtccccagttcatgtctgttttagattcattaacttttgcatacacatttttatttataccacaactagatttcagcatagtgtcttggaagtcaggagccttgtttatactctgagactttctcagcgctggtcaactcggggtacctagtatatgtacaatggatactgattgggtgactggtttttccaacactaccttccatatgaaaaagaaggaaactttctcagctagacaacttgagtgtttctcaacttgagtcaaggcatcagtttgaatcctgtacttcccattatactaaaaaggaactataatagtattccccttaaaatcaggaataagcatgaatgccaccatttaatattgtactagaggtgacagataatcaactaaaacataaaaaggaacaaaggtatatttatacttccc

SEQ ID NO: 47401 - DNA, 1339 bp, Bovine  19866880545047
  misc_feature (1)..(1): n is a, c, g, or t
naaaactgctagtcccttggactgcaaggagatccaaccaggccatcctaaaggaaatcagtcctgggtgttcattgggaggactgatgctgagactgaaactccaatactttggccacctcatgggaagagttgactcattggaaaagaccctgattgctgggagggattgggggcaggaggagaaggggatgacagaggatgagatggctggatggcatcaccaactctatgcacatgagtttgggcgaactccaggagttggtgatggacagggaggcctggcgtgctgtgattcatggggttgcaaagagttggacacgactgagtgactgaactgaactgaactgaaaaagactaaagaaaccgttgcccaatctacattcataaggtttaattttatgttttcttcttagaattgcattgttttagctcttgtgtttatgtttttgatccattttgaattaatttttctacatgatttaagaaagggggtccaacttcatgtacattatttgacatgcttaaaaagattctgaaagggaatcacaggcttcaccagactgacaaggtggtccatagcacagaaaaagggaggcatctttgctctaaaatggactatacccttgtttctctggatctcagtttcttcccctgtaaaactcatggatggggttgaattgggaagtccctttcagttctgtggtgctcttaactatgtacaccttatggagatcaatgattcttttctcaagaaaatacctgtatatgacaccagctgcttctaagtttatttaaaaggaagccattgtctggcaatccagggagggctcagtcagagctctggaaagtgttttaaggggtagaggtgacacaataggggaaggaaatgttttctattgaaaagcagtcaattgccttcaacaagttgccaacaaactgggaaaaggctttttcttttttttttttttgctctggtttcagttgaatgccaactttcggaaggtaaaggggctagattaaagggtcacaaacacgaccaaatgagggaggaagtttttttctaggaagttagcaggagagatgccatacatgcaaataagatgccataactgaagtcattaaaggaaaatcaggaaaatacattcaaatctttgctttcacaattgtaaagggacttctacagttttacaatcgttcttccatattccttaccttaaaaaaaatgttttaaacatggtatgaagggtcttaagtatatattggttggggctttttcaaaattagttaattaattaattgattatgagataaattattggaattttttaaagcttta

SEQ ID NO: 47402 - DNA, 2086 bp, Bovine  19866880550533
  misc_feature (1)..(1): n is a, c, g, or t
ntttaaatttgacattttagtacacatcttttgctcacagatttcaaggatttaaattaaaaaaatatcttcatgcttgttagcattcagctgctatttatagtttgttacagcatctctttttcagaaaggactattttattttcattcagtctccctattttaagtaagatgaaaaactgaataattgttatgaaaattaatagcaccaaagagtagaatgtctgccttccttgatgctgtgttgtaattggagatcgcatttttatgtttataattgtatttggaatgtactgtccctttcttaaggacataaatatttaactgcggggaaagggggccgactgcacagtcctagtacagtttaatatttaatcctttaaactgaaacatgtgggctgtttgttaggtcacagaagtaatttgacattgcagatttttgtgtcttgacattttagctgtggacttgacctggattggagaattgtggtcatgtgagaatgtatagtatatccttacttcctggaataagtacagagaccttgactatgtataaaacatgtttaatatacaaagtcccaattaaaaacagcacaacatcatttaattttttttcagttctgggtctgaagaagcccaggatttatttttatttgttacaacagagtatcttcaaataatgcatcagcaaggtgacaggtgagtgaccccatgtctgattggggaatatatctctgatcttattttcattttaaaatgtggatgtaaattgaagtctgagtggtttggccttgataaaaatacacacaattatagttgttctttgtatggcagtttttactgggtgtcttacgatatgtttactatctcaagtggaagtccaaacaaattttattttgtagtaaaaagtctttatttccaaaagattggttaaccagaaaaactgtaaaccacctaacacaagactttggtaagaaagagatttgacgttttgtataaattcccccttgtgcaaacaaaaaagagttaacacttacgtaacaagaaacatgttacccattcttattcattaaccagttgcctggttttaagtctccaaaatttggattaaaatttacccaaacaggaccaaacaagaacttgagatactagggttgcttgtccttagttacttagaaattgccactctgtggaactttgattttcatgggttgggaggaaggatgcatttagatagctgagagtaatgttggaaaagcaagcagattctatatcagggctttttcttttgtgcaaatagaaattaaacctcttatttatttatattttgtactgctttgtacaagggaggagaaagcagttcacttgaaggattaaaaaaataatgttggaaacaattcagacccccagaaagctcagcaatggagtagtggtccctccagaatgagggtgcaaaaggcatatctcttactgagtatgactgaaatggataacaattgtaaaaaaaaaaaagacccaaccttctgaacactgaattagtttaaaacacaaaagacagacccaatgagttttttattgaatagtctctctcgtagttaaaacagtacagattcaaggctgtagcatatatatatatatatataatgttgtgtttggaatatcctgaagtattcaatgcaaattcttaaagtagtgtattcaaagcattgtatgcatctcatccatggtacatatttggattaagcacgataaagaaggcctgcaacaagagcagaacagtgattttaacagtaaatgagtgagtagaaactgctgatggactcaagttggtaaaacgtccttttacactaatccttggtagtcagtctccctgaatttggtgtgcttgtgtgtggaagggaacggaaaaccatgaccctccctgtggtggtgtcagaggaccagacccttggtgtggagggctgatgtatgtacgtttgacttcccaccagatttttctgctaacttgattctgtgacattcctttctccctggatttgtcttggtctctgaaacactttttctctctacatataaaattttatga

SEQ ID NO: 47403 - DNA, 1545 bp, Bovine  19866880588893
  misc_feature (1)..(1): n is a, c, g, or t
ncctctctggcactggctttgcatttgtgactttagaactgaaacctttcccttgaccctctccatctccccgctctgttcagaccttcattcccctgatttcaactatcccacttgcttctctgcatttgcctggctctcaaatgcacaagattgtgtttgcaggccatgaccttgtctctttgcaactaagatgatgaaaataaggactcgccatccagctatgttgtctcaggccagtttgggcaattcctccccattggatcgagccctcaggactcttctttctgtgaaaaatgtagtgagctagacaagcatttaggagagatttgtccccagtggggataggatatcattactcagaaaataggctgaggtcatctaaatgcagaaagaacaaaaaggtccatcacttctgaacataaatgtctaatgactgatactgataactgacagattgcaacgggattttcacagaacagtaaaatgctacttgcatgagaaagtatatgtgaggaaaaaaaaaacacatggagtttagagatcaactttttctcttagtaaatctgaatcaaacccgggtctcctgcattacagacagacgctttaccgtctaagccactaggggagcccacagtaaatctgaagaaaagtccaattaaagggggacatagtttagaataagtcatctgatgttagtttaatgctctttttttgaaatgtgcattttgttcctgagaaaacaattttacttcccttttcattttgaggagaggggcaaaaacttgggagcgtcattcctgtgttctagtgccaaaagaaaatggttggcatgagaaatgttatgaatttatgaaaaacaatagttttttcccctaattagaatgctgtgtttttcactattttcccccatcaccatgagagtacatgtacaaaaaaatggcatcttcgcatacaaccctttgaccagatttcataatttttgttctatgctaataagcagtctttactagtttcagtctttacaaataagtctgtaagtttctgaggcagcgaatatcagtaggtcttctctgtcctctgtctcttgacccctagctgaaaccctctattcacctaaaaaggtgaagctagaccctattctacagagcattttttccttatggtgccacataaaaccgtggggactccactctggccgaagagaccgagactggctgccgaccagttcagctggcttgagagacgccagcttccttgtcctctcacagacagtcccttctgtgctgacctttgactaattggcagggctctggagctctgaccctacttcctctctggccacactcttcttccccacattgttggtcctttttggaagtgggaagagcctgagggaaaaggtgctggggaaggggaaggtgtaagtcctgacattcaagctcctaaggatattttccccatccttgataaatggttactggtcatttaaatgggatgtcaacaaaagatttgcaaattagtggaaacatagagaattttagt

SEQ ID NO: 47404 - DNA, 1156 bp, Bovine  19866880619549
  misc_feature (1)..(1): n is a, c, g, or t
ncctgccatgcaggagacataagagatttgggttcgatccctgggtcaggaagatcccctggaggagggcatggcaacccactccagtatccttgcctggagagtcccgtggacagaggaacctggtgtgctatatatagctcatagggtcgccaagagtcagacatggctgagcgactgagcacgcacagtgtatacttacaggatagcaatctttcaggaaaaaatacactaatattttaattgaattttttcaaaggtagttttgtaggtaatttttattgcttcttttatatttttctgcatttcccccagtgtcctatagtgatatatttatgcatcctttttataattgaaaacattttaataaaaaacacgtgcacaaattaattttcctacatacttttcttgtataaatttgcgatccataagttacctcctctggagtcagcaacaaagaaacaatggaacagctgacaaagcaggtaaaatcactttgattgtcatcaaaatgtgacctgtaatactctatgattatatccatctggtcagaccattttatttattaagagaatattttatactttataataaactttcatatacattatctcatgtattaattgctgagctattttaggtccttttatttatttattcatttttaactttttattttgtattgggatatagccaattaacactgttgtgaaagtttggagtgaactgcaaagggactcagtcatatatatgtatccattctcaccccccaatcccccctcatccaggctgccacatacactgatcagagttccatgtgctacacaataggtttctttatgtcattttaatctgaccatggagaaaaccttaacaatttcactgaaaactgaagtcagctttttcaacctctctttccttgcggtaagcaccctgcgctaaaaagggctgaagcccgagactccaaaggctagggtctgattgcctttctgctccctatcagcagtgtgcagtcacagcctgtgagtacttcattttcctggtcttcaaaacaaaggattcctaaggtttcgttgatctgcgttaggctgtgattctgagatgatatgtcagtcccttccgtgtcccatctgcgcagatcagtaacatcagtgcc

SEQ ID NO: 47405 - DNA, 1771 bp, Bovine  19866880649604
  misc_feature (1)..(1): n is a, c, g, or t
naagccctgatgcttctgggccccgagatctatgaagcctaaacggattctttacagatagataatactcttgttgacaatatttatttcagaagaaatgtattttatttcacagtgaaatgagtttattttcacagtgaactcacagataaagagttccttatgatcatattctatttccatcacagttaccttaattcagacccttgttgccttgccctgaaccacaaaactagctgcaaagtgtaccctttacctgcaacttctccaccatccaagatggaaatgggaagagtgtcctgaactgtatgccaaaattcaccttccaaaaatgtgggttttgatcacattgttgttgtttaatcactacgtcgtgtctgattctttgcgaccccgtggactgcagccctccaggctcctctgtccaggggattctccaggcaagaatactggactgggttaccatttcctcctccaggggatcttcctgacccagggattgaacccacgtctcctgcatgacaggttgattctttaccattgagccacctgggaagccctttgatcgtattgttcctcatgattataatcatcttgaaaccttcactggctccctttgtcaatagggtcaaatataagaaatgtggctgctgaagtcttctggatctaacctgactgccccaccaataatccttgtgtcgcatccctggtggcccaggtttgctgcaggatggagtgtgtgacagtgtctaagtttctaagggttgactacagtaaaacaccctatccaagggtaactaaagaggaaagaaccaatggggtaggttagacaataaggggctgtattgtctacctagtggttagggatcaggctccggggtcagacagcttggattcaaattctgactctaccatttacgagcaatgcgatgttggaccttctcatcttaagcactcatatgcccacaaaggcccacataagtgttagctttgattctataggcttgagttggaattgcgaaatgaacctcggaggtcaaacattagaatcaagttctcagggtctgagtaggggtggaaatggaagcaaggttaggagtctagctgagttgggatggcaaagggcagggaggcagtgagagggagggggtgatgggcaaaagacatggccaggattggagcttgtttttcggttagagcatgtggcataggtatgtagggcttgtttaaaggcatagagtcagaacaaatatcattcacaatttctcactacatccatgctctgctcttcctactagcccccaccaccaactttctctgaataccccattgcctatcggtccatccattgttatataacttatcattcctggaatgtttccccccatcccctgacctaccagcccaatcccatctgtcctccaagactcagaagaaaactctagtattctccacagccttgctaaagcctcattctacccttcccccaccagctagagcccaaccctccctggttcgtattcttctggcaatgattcttttcacaattcacttggcaattaatcacatactgtctcgtgatgtgcttactgttgttggcttaaacagataaaaatatcttctatgcctgtttaacttgtcacatgtgtctggcttgcctttctgaaggggagtccaaagaacaagccaggaatcactaaataggggagagctccttgaagaaagaagtaataataacaatcagagagaaagaatacacttttcaaactca

SEQ ID NO: 47406 - DNA, 1838 bp, Bovine  19866880666525
  misc_feature (1)..(1): n is a, c, g, or t
ntttatgtatgaaatagtgagggaaaatctatacaaaatacaacataaaaataagcatatttcaggttacatacgcacacgctgccccacccccccgcccccaacacacacacacacacactgaagcaagcactgcagcttttgagtctaggccgtactgatttctgtacctacaacaaggctttgccttgatatgcattttgcagcttcacacacacacacacacacacccctgactatctttcaaagcttcttctacttgccgcaatggagaaaggttaaattttaagtattaataaacttgaaaactatcctcttaaccatccctaattctccaaaaaaaagaaacgaaatgaagtgaaaatgaaaaaaaaaaaaaagaaaactatgacaaccctaaatagtgtattaaaaagcagagacattactttgccaacaaaggtacatatagtcaaagctattgtttttccagtagtcatgtatggatgtgagagttggaccacaaagaatgctgagcactgaagaactgatgcttttgaattgtggtgctggagaagactcttgagagtcccctgaacagcaaagagatcaaagccaattctttacttccaacaccaagaatgactaaggtcaactcatcataagaggataaatttaaaaaacacattctgccactcaagaaaaaacccttccctggcaagaattttttctttaagcagtaccaagctttaaaaatatcagttatgtggccttaagacaaaagaacatcaccactgattactataagactgaaatatcaagggtattatatctgtttaagagagtactttgatctgacatccagaaatttcagtgatacagaaggcaaatgtgacaaattcttgaatggagacaaactatcttagccttttcattgattaacttaagaatatatgaaacaatgatttcaaagaatcaatgcacaaataggtatttcagaagataattgagaaaatgacttcaaaaatgaagaagaaaactttcccagacctgagaatgtttcattatttctcagggaaaactagtgaacagagaaatacttccagtcatatcctgacaaatgtttccatttccaatgataaaagaaggctacaagcatacaaacagaaaacaagttattcctgcagaatagaaacttgaggctagtgagctaaaagcaaagacatgaaagataagtaaagcaatatctccaactgtttcaatacaaaaatcttaggacccaataattttatactcattatttatcatccaaaagtaaaattttaatattaaaattaaatcttaaaaattaatgtaaggttaatctttaaattttaaaagtacttgaaagtgttctctaaataacaattcaaaataaaaaccagctgttcgtgaggattgcttgttaggactgaaattagttagaatggtaagaaatggcaaataaaagcaatagttcttaatgagaaaggagagggcaggatggttggatggcatcactgactcaatgaacataaatctgagcaagctccagaagatgaaggagacagaagcctggcaggctgcagtctatgggtcacaaagagttggacacaactgagccactgaacaacaatatttactattacaattataataacaaaatcaaatgcaaaagacaaaaaacaatctcttaaaacagtgcagtcacacacacttttggttactttaaagaccggagatccaaccagcccatcctaaaggatatcagtcctgggtgttcattggaaggattgatgctaaagccgaaactccaatactttggccacctgatgcgaaga

SEQ ID NO: 47407 - DNA, 1163 bp, Bovine  19866880723398
  misc_feature (1)..(1): n is a, c, g, or t
ncggcttgcggccgcccggagaccgatccaggttgggaggaatgggagggacccttttcggatagaagggggcaagcccgccatcctgggattccccccaggcgctcaggttcctttggggtaagtcacagacctcaggcaggctccgacaggttaccactgggggcgtagggaaagagggcgcttatggtccccaaggggagtgcctagtagagaaaccgagttgaggtggggaggcgacgggtcccgcctttacccccatcccagtttagggtggacccttgagatgtccaagccgagctgcgacctggtaagtgccagtccccaccaaagtcatggggaagaagccttgatcactgtggctaggtctgtccttaacagcagcggggattcttgagccatgcagcaggcccttgcagtggctttttagggaggagcacgtacgtcgagcgctccctgggagcatcctagtcggtattaccgagtctgtcttcctcaagaaccatcttaataaagggaggagctaccgtcccatcgtccctgcacccttgccaaactaccagtgggtccacatctgtttctgcctcaggaagcatggaaaatctgttgtcgaaaagatcttcccacattgaaggctttccactgtaactgcatattgggggtggggggaatgggaggattaggagttcactccaagaccattgccaggtttggatcagttggccgtgagagaagccaaataagatgctatctgtgaattactgatgaaactagctacatgtgggaaacacggactcgaaagcgggaagaactgctgtacggaagggactgctctggaatctcaccaatcataactatcttagtgactgaactgtgtttccctcctccaaaactctcccttccacctcatgacaggcctgcatgtctcaaagagctaattccacatttttccagggagatgtgaaaccttactgtgtggtaaatcccacaaacaggcccatttttcaccaattaatctttgcccacagccaagaccatttttgtatatggtcatagttcacatgcatagcagaaatcacagtgaaattagcacaagaattggaccaagatgaaaaaagaccagaatttttgtctgcttcttagataaaggaaaaaatatgtaa

SEQ ID NO: 47408 - DNA, 1629 bp, Bovine  19866880770341
  misc_feature (1)..(1): n is a, c, g, or t
naaaatgtccatgacctcttcttttgattctgattgtgggtcagaatatatctgatcaagtatggaattgttaatgtattctgattttttgctatgtttgtgtatgtatgaaaaaaagactagagaaaaagaccaaaaactgaagctgagaatgtaaggaagttttctttataaaatttctgctaatgttgtggtagtgatttaatcagtgaaagaatactgccagaccaagtcaagtaggctttaattcatgttagtctattcaacagatagtgagtctgataaatactgtatgcccgatactctgtgagctgctggatatacaataatgaagaaaataaaaatagtctctttcttcatagagcttaaggtctggtgtaggaggcagtcaaacaactctaaacaaagaatatagaaatgcaaattaggataagtgctgtttctttaagatcaagtttatcgagatacagacaacactaaagctcacacattttacatgtatagttctgcgagtatcaacaggttcatacagtgatgtatgaataagtggtgaataagctgctttaagtggtgataatttacctgtgctgtttagtcttgcttatgtgtagttctctagtattaagtttatcccaaatttcttgcaggcactttctggttactgtggctttatggcagccaacctctatgctcgttccatatttggagaagatgcacttgcaaacgttagcattgaaaagccgatacaacagggaccagaggcccctgttactggccacataagaatccgtgcaaagagtcaggtaacggttgctttttttgagatggtctctgaactgaatacaaagagaaagaatctgtgtctctctcatttctatatatagtgtcctctggcatactagtgttttgtgcattgctagtgctcagttgctcacttgtgtctgactctttgcaaccccgtggactgtagcctgccaggctcctctgtccgtgtgattttccaggcaagaatactggagtgagttgcctttcccttctctgggggtcttcccgacccaaagattgaacccacatttccttcattggcaggtggattctttaccactgagctacgtgggatgccaaccatcttatgtaaagtccatttaaatatacaattttatatactttcatctcaattctgtaaatttttatccctttaacctttgttttcatttgggatccaatcaacaagcttggtcttagagagaggagttttataagttttttttttttctttttccctgtccattttagtgacctttgtataaaaagttctggcatctccagagtgagattgagctgaggagttcttgccctttggtctaactgttgccccaataattactggtcaaatatctcagtgcaaatttttgtagcctcttaaatgcatattttaaaactgggtaaatagaacagatgtgtttggctgttaatgttggggaccagtgggggtcccttttggcccatttaacctcaggtagggtataatatcaaatcttgctttaatcacataaatgcccattttatttatcccattttaaataaccactaaagatttctttattcttgtaaataactcttcctaag

SEQ ID NO: 47409 - DNA, 1541 bp, Bovine  19866880780565
  misc_feature (1)..(1): n is a, c, g, or t
ntggagaagctctgtatgcactgtgatctttctgtgcaccaattacaccatgtcactctcttgtttaaagaacaccagtggttccccatcatttataggataaaacctttagcttagtattgaatatgtacaggctcttcacagtctgcctccagattcctttttagcctcctgctcctcccagacacatttttcccaaatgcagcatcccttctacctctttacatgctcttctttctgtctggaaagttcttcccaattttctctgtttgacaaatgccttctgatatttcaagatatagcttaagtgcccacttcttcagtgaatctttcctggaaccattcaaaaaacccatcctgtcgcgccctggcagttccttcactcagctatcactgcactagtcacagtggcctgaggtcatgcatttacatctatttctcctagtagactgtgttcttcaaaagcagtggccatcttactccctattatgtacttatctctctagcaagggctcagtataatagtacagataagtattcagtaaagtaagtacacacaccgaacacgcaagagcactcagtaaatgtttgtatcatactgcttcctaactgagatccacaacaggctttggagggccccttgagctttctatattgtatgtgaaattaagtattttgaggatattttcctaaaaagaagatccattctagtcaagagattttcagagggcatctggattcacccgaatttaagtacttctaccaggaagttgttttcagaaacctgaatctcagttcagagcttcaacttcaccttgggaatgaggtgacttctacagctactcacgtcactccgttctggagtgaggagagagctggagctgggtgtttgcagaaagtctgtgtccccatcgcagaccaggacatgcagaaagttgacttctcaaggcactgtactctcctctctcatgttcttgagcacacataccagaatgaatgcaaactcaaaatttaaatgcgaatgcatcgcacacacccacaaacatgcagccaggcacacacaaacacattcatctgcacgcacacagatacacacggtcgcacaaatcggccgcctacaaatgtggggcctgagtggctcacagcctggcccacccctgctccatatgtagccacacatgcacatacacagccacgcatgtgagaatcacaggacctggctcctgccctccccactgcaaagagcaagcgctggccctggcatcgggcccagggagacagccgagtggagccatctgtcaagctgaggttcctgcgccgcccatcctgcctgagctcagacgctcggcatgccgagcatgcaggctcgctattctctctggctgaatcatgctgagtgagctggccccgccagagtttatcaaatcagaacagaattttggcaaaacagatgacttgtgagcttggcatttgtgggcctgggaggcggagaccggtagggggaggaaggaggagtggaggtgaggagagaggaaaatact

SEQ ID NO: 47410 - DNA, 1006 bp, Bovine  19866880784802
  misc_feature (1)..(1): n is a, c, g, or t
nctgcattgtaagcgatgcttttaccgtctgagccggaaagtctggaaggcatctttcagtatggagcctcaaaatctccttctctgattcctcaagagcattactccttgcccaatactccacccttggtctgggttagtttccctcctctgagctcgttcagtacactgagcttacttacttttctagctttcaccatgaaccctgaagggaaggaatcccatctttcatcattgtatctttgtcagctagcacagtccccagcacaatgtcaggcacttgataaacgttgaatgaatgaatgcattcattacgggagagaggttcatcgctggcagaagggaatggtgcgtaggagagccgaggaagtaaaagaagtgagggattaaatatagagatgagagagaaaagaagtgagggattaaatatagagatgagagagagaaggtgggcagaggggagagagggaggaagacagccatccagatactggggagaggacaaaacttgaaaacgagctgagatgaccacacaggagggagactccagagaagaatgactctctcctttcttaatagttctcaagcacattcccaagttttttttttttttaatcatgtattctcttgtgctctttaaagatctatgtacataggccctacctcccacataaaactgcatcttgaggaagcttctagaagtttctacagtagtttttaattattctgactagcatctagcatgacgctctgcatatagagggcaatcaataaatacttgttgagatgatctaaagagtgagtcaaagtgaggttcagattctgagatgagtattagctggaagaaaaataggtagtattaacacacttagatggagaaggcaatggcaccccactccagtactctggcctggaaaatcccatggatggaggagcctggtaggctgcagtccatggggttgctaagagttggacacgactgagcgacttcactttcactttcatg

SEQ ID NO: 47411 - DNA, 1024 bp, Bovine  19866880831838
  misc_feature (1)..(1): n is a, c, g, or t
ntcacagatgggactaagtcaggaagactctggggctctcatcaaacaaaacagaagagggcacgtctgcgtgtgcacagcacaaattactcattgtagtgcaatgtggatgagaaatatcacattttccatttcttgaacatctaggctaggggtttgcaaactgtagtgtgggttagagtcaccagggggcttgttaaaacagactgctggacagctgtcccccaaatttctgactcagtgggtttgaggtggagtctggggagaatctgcatttctaacaagtgcccaagggccaaccactgacctagatagttcctgtcacataaggataaatggaagttacgaatggcattaggcactgtgcttagtgctttaatacaccagctaatttaaccctcataatagcactatattgcagaaattatactatatcattctgttatacacaagaaaatggagactcatagatctcaatatttgcctagggttacagaactaataagtggcagggatgagatttaaacctcagcatttttgagtggagaacccatgtttttctgttagtttattctccctcttaactagagaaacattttttcttcctttttttaatatatagaaactaaagagacgtgactataaataagtgaattctagagtcataatacccttattccatttcaaatacatccccaaatatattattgtgattgtaccacaagagacagcgacaagaccatttatttcttgaaaatcgttgtgaaaatatttgagagagtgggagctggcagtgccctgagcccaaggagcctcctaagccagcagccatcaatcctcttttaaaagtaatggagcacattttgttaaataaaagtatattcagaagcacaatatataagcagacagaaacttttcagtcttatgaaatagatggggggtgctggcagaaacgagcacttgagcactgtgggcagaaactgagatctcttcccacagaagcatcagctctgatgcaaacaag

SEQ ID NO: 47412 - DNA, 1044 bp, Bovine  19866880833860
  misc_feature (1)..(1): n is a, c, g, or t
ntttagaagggcttcagcaagggaaggaaggacatttgccctgtgtggggctcagagaaacactgctgtcccctgggaggaagcctgctgtggaggctgctagagaatttctggttttctgctttgggccttagtaattcagggatgatgtgataggagcctgaggggagcagttttcaatttcacccctaatagcattggcttgggctctgaagcttgggccacctctgactcacagctgagttaaggaattaaatccactgcctcccagacttggcaagggacggccatgggcggtggctgcacaggccctgggagtcccctaggcaggcagagtgggctgcactgggccatatgcgggtggggtagagggcctgaaaacttcattcccagcacgccttccccagctgctctaaatgcctaaaataagccagcagaccttccctttacctttggagtctttgatcccaatcaaaatgccactctgtactgctcaagatggtcctcaaagctgacctcaatcccatgggctttatgagttttacatctttccttcttatctggtttggagagagagatagtgggaccagtgggcgcctctgtgtatgtgtgttggaagatgatatgggaggtggaaatgacagaggaaacaagctcagaataggggctggagcctacagaaggcaggtgtacctttaataaagacctaggtctaatcttggccatgccgttaactctctgtgtccttcagcaaactgcttaatctctcgggacctcagtttcctcatttgcaaaatgaaaggttgagtaaggaagtctctaagggcctttccagttctgaatcattgaatctgaagcaaatgccttctggagagaaagccagtaagagtcagaagtttccactggaatctctccttttaggctttgaaagagtaagcagcagcagggactcatgcccagaaagctggaaaacgggaaaggtcttatagctaaactaagactgctccagcttccagccccaaattccagcacctgtcattttca

SEQ ID NO: 47413 - DNA, 1234 bp, Bovine  19866880835588
  misc_feature (1)..(1): n is a, c, g, or t
nggtggggggagttgattggggctacctgggtgacaggatcttcctctctccacttatggaaatggcagacaagcctagggtcaggatggcaaatagattttatctcatgtgccaagccaacacattggtaatggctgcctggaagactctataaagaagaatttcactcctctgtctagactctgggaagaagttcctatgattgattagttgccatagagaccaattctatttggagaagttttaccccatcacacagattgtgagttaggagattttggggtgatacccaatgaattagttgccttctgagacagtagaatatcattacacggtacacagaatttttcatgatatggtcctatagattgtccagcattgctttccatgctactcccacctctagctttatatacccaccgtgggtctctgaacacagttttgggcagacaggaaatccaaattagagactcttggagctctactccttcagagaccagggcagaagccccccctggcacactgcagatgctggaggcccagtgcctggagctcagatcctctgggagagcaggtgctgggggcaagggtggggtgcaaagggtggcccaaggcaataatacaaggtgagccatgttcaaccagacccagcaaagccttcagaccagaaaggacatcagaagagaagagttaactgggcaatgaaaagacccagtcctgtcatttgagaaaagccatcagtcagatatggatggggctaagctgaacttttgggtgaaggatagaggaaactaggtatttccctgagcagtgccccctggaagagaggaacaagatccatgtacatgtaatacagaagaggacatgaagtctaggtcctcaacccacccatcacagtactcagccaaaagacaacactgggctaggctctgcagtccacacctcagctgtaagacccacaggcacatcatttaaaccctgagtttcagtcccttcatctataaaatgggaacaagaagaccaacgccacagggttactgcccactaatttatccattcattgccaattgattatgcacctgcaaagtgtcaagctctcagagagtggctggatgaacaagacacagtctctgccctctagctaggaatttgggtacaaagactgaaagtcgtaaaacaaagaccataaagtgaataataatgacagtaaagaagactaacactgagcctggg

SEQ ID NO: 47414 - DNA, 2354 bp, Bovine  19866880836614
  misc_feature (1)..(1): n is a, c, g, or t
naatggttgtgggtgcaagctgggagcagagtgtgcagaaagggagtgcgggacccaggctgtgtggagaaggactggcatggaagcgggatggtaggctaggaagactgtgcacattcaacaggatggaccgtgtgcttgggggtgggcactgcgttagggactatgggagaggactatgggaacagagacaagagaagactccaggggttcatgatctagagaggaagacagacgtagccaacagtgattctatgtgacaagtgggaaacccaaagatggaatattgcaatagtaagaattacaataatttttaaaagtgcttatgaagaaggttactgaaaatatgtggagacagtgaaagagtttgaggttcaaattctaactcttgtcccttttaaggtatgtgacctagcacaagtcctgtagttctatttaagcttcggttagcatatctgttgagttggcaataaggttcacttggttttccagtaggctagtacttaaaaacctgaacaaactttttggccaacccaatacaaagtggatataacacctacttcacaatgtttcataattattaaaataagatacatgcaggtttttaaacacactgtctggcacaacaaccactttctgaatattagttgcaattccaactactacaacttcaactcatacttgccaggcactgtgctgagggctcttgcctatgctacttaatttttgcatacattctgctagctagttatttttattcagacttaataaatgagaaaatggattctttaagtgtttagataacatagtaagtatttagcagattcaagactcatttccaggtgtgtccagtttcagattccccactcgttgtcttgctgctttattattatatcttaggcacctgtgcaaactgcctaggttagtgcttggataataattatattagtagcaaaacgaatgtatttaaaaattatatatttatatgtatagcaattatgtatttataataattattatagtaattgttaggctgaggtacttttttattgttaactgaggtacttttcatacattaatttatttaatctttataatatcttatgaatcaagaactattatctattttatgggtaaaattaagtaatttgcccaaggtcacatacgtataaagtggtagagttgcagttgaaatgggaaactggggggagtgactccagattctgtgtgtttcgtcctactccaactttagtctaaggagctttctctttctccagtctttcctttatcctttcttacccttcttcttttctcgctggtgtctcaagggaacttctctccaccattttcataatcaggttagacagtctctcaaaaaggaacacaaatctgggaaaatagcatttagcctcactaataagcaaagaaatgcaaattaaaatgagaatggtattaactctggcaaaattgtttaaaagaagaatacccaagtctatagggaaacgggtcccatttcctgtgacaatgtaagctggcacagccctttggcaggaaatttgcagtagacagtcacaaaagggcgattccacttaacagtcacttattcattcagcacacagcaatagggctgcctgggaattcatcataacgccatgatggaaattactttcttctcttgggagttctgcttaagaaggggttgtaggctactatttactcttctcccagccatctctcagtttgctatctctcccctgcggctggctcagcttcagggttgcactcaacaccccaggcactaggatgctgtgtctacagaggggatccgggtggagcgggggctcatttgtccaccaaggatgctacttaaagtagaaagtagtcccatcctgatgtggacagccagcatggagaaactgtcggccttccagcagaccactcggctctctaaagagtgtcagcctagctttgtcacctgtcatggcttcttgctgaccagccatcccatcactcctgcctcaaaggatacggctgtctctcttacatcctcactctattccttctggaaggaggggccaaccattttgttccaaagactctttcttcatcatcccaggccaaagcccaagtcccttctcagcagcctgggagtcctgagcaaataaatctgtggtcatgacctttccctgtagtctctgtagagctggtcagctccattcttgatgccctgcaggtcttgggcagcacgcttttaaacctgagtgctgttagctctgactgcagcgggggcagggggacagtgaaggggagcccggcagaagcaggaagcattctcctgccccctgcattacctg

SEQ ID NO: 47415 - DNA, 1629 bp, Bovine  19866880845319
  misc_feature (1)..(1): n is a, c, g, or t
ncagtaatatgcctcaaaccaaaaatagaatgcaaaaaatgactccttagataaggaaatgcttctgtcagaaatggctttcagccaaacaaattaaagggagtggaggaagacttaaaaagcctctgtgaggtaggttggtttagccagcatgaagtcagcttaaaatcccaacattttccacgtttccctctcaagtattacagcctctgcccttcaaggtaaaatgtcaaagctatgtctttgcttttcaccttccctctttgatatatattgacccctctcttatcgcttctacaacccactactcagtcctgacactccaatatgtcaaagccaagtttatcaccaaagaatcatacaattaccactgataccatgacccatgtttgtagctgtttcttgggaagttttgaggccaaaaagaatggatatggtaggtcacctcaaagcctaggaacactgtcaaatgtatggatcagcagtaaacaagcctgtttaaattagtcttaatacctacatgaccagatttattttgacaggatctcaccctctaccacagccaaccagcttttgttgctcttgctttagcaaagggaattagccttctttagaacacaatttaggaaacattaatgtccccttctggttcatagctacagcccttctcacattcccaatttttctggcaagacttactcaggagatctcaccccagtctcctcccctaaagagttctattttaagaaatacagtttgacaataaaaatacagtcaggataggaactctaacagtccctgccagtgcagtcatctcattaggcatcagtagtgccctgagacagtggcactctcaaattttcatataaaattaaagcaaacctattttaggtaagagtaggtggctttttgttttgtgtgacagttccttatggaactcaaatagttgttgtctgagaagctacctcatcagcaaactttggtcttttggagatgttatatgatattcagaataatttacatcagagagaaatgtcttgtttgaagaaccctgagtggcttcttccttcaaaatatgtcatcctgtctaaccctatcaaaggaatctgagcacagctctatccagagcctgtaaaagaggtaaaattttaaattttcattattcagtcgttagttagtgggtaaacatttatggagcacctattttgtgccagattccattcctaatgctggaaataacaggtgaacaaagacaggaaagatccatgagcacttggctcctatgctccagcagaaaggagcaggaagtaaatgaaagaatctcagagtaatgaacactctgggaggaaataaagcagggtcacgggaagacggctttcagttgcaggagaagagaggtctctctgaggaggtgatattaaactgaaatcagaatgagctgatggagaaggcctgcggtaagggaagaagactgcacagaaggggcaccaattgcaaaaggcctgaggtgggagcaagcttgggttttccaggtacagaaagaatgtttgtgtgcctgtatgtgtaacaagggagggagatcttgggtatgcatttagaggggtgctcagggaccagaccaggtagggt

SEQ ID NO: 47416 - DNA, 1723 bp, Bovine  19866880880472
  misc_feature (1)..(1): n is a, c, g, or t
naatagcgattcaaattagactctgttctttcctcctccccctgcccaaatgaaaatgtgattaaatttcgttgtctctacttcctgctccagattcattccctccttttggtccttactgctaactgtcttgatccacacgtggtttcttcatgaatgaaattaatgcatccttaccccctcccatcttacccccttcattgcacctccatgaggatttcatggtgatctttcttgtccttctcctatagggtgatcaaccatcctactttgcccaggactgaagaggttcctaggatgtggatctttgagttttaaactcaggacagtcctgggcaaaccagaacaaactaatcatcctaaatcttttacttaaaatttctccccagttcttcaaagttttcaagatgaactgaaattaatcagtgtgatacacagaactctttgtaatcagccccgtcttcctctctacctaccttcatcctcaccaccaagcccttactcatcacacagacacacattctctgctttggcaaaactaggcttctggagtgtctttcaaagatatttcatgttctgccccagcccctttgttatctttgcctttgcagttcctttggactgcaaggagatccaaccagtccattctgaaggagatcagccctgggatttctttggaaggaatgatgctaacgctgaaactccagtactttggccacctcattcgaagagttgactcattggaaaagactctgatgctgggagggatttggggcaggaggggagaaggggatgacagaggatgagatggctgggtggcatcactgactcgatggacatgagtctgagtgaactctgactcagagttggtgatggacagggaggcctggcgtgctgcgattcatggggtcgcaaagagttggacatgactgagcgactgaactgaactgaactacctggagtgtgcattcccctactcctttcatctggccaactccttcaaaccctaatatatcaccttctctaagaagtctcctcttagcacctgcttaacatagatactcctgccccaaactcccatagcatcctgattttgcctctaaacggatgcctactacgcttcactatgtctaccctaacagactgagagaccctgagggcaggggctgtatctttatctttgtaactccaggagctgacacacagtaagtgttcactgaatgaatgaataaatgagaggcactcatttgcctccctacccccccaccactgtgtgaactcctcagaagcagaaagaacatgtggcttgattttctttgatttctttattcccccccccccccccagcacttggtcacttcaggccttcattcatattttgaatcaatgaataaataaatgtacaaacaagtacatctttatttaggtttgagccaggcaatgaacgttcacgatgaaataaacttcccttcagttcaagccctccccagccatgtgccctggacaaggcaccagttgtcagaagtaaacctggccctgtgctgtccccaggtagctatcagctggaaatcactggggtcatgacctctcctgtaaacacgaactccagaagaaaaatggtttctgtccaaaggctggtttcagatctaaggaaattctccactggattccctgcacaattgagtataaaggccactagcacatgggaagagagctacagcag

SEQ ID NO: 47417 - DNA, 1833 bp, Bovine  19866880893448
  misc_feature (1)..(1): n is a, c, g, or t
ntttttgttaagtatgcatgttcaatatctaaggtaaccttaaaaagaaaattcataagagtttaagtttcaaactaacagaaagcaaaatgtagaatggcaaaaagtagaagagactatttgaaaaacaatttctgagacgttttccttaaaacttaaaacagtatttggggggggaaatgcataaaaattctctttgaacctgacattaaaagagaaaaagagaatcaacatttcaatcatgctttgaaaatatttctgctactctcatacttaattaaaaaattctaaaataaagcaactttattttattaccaattatgattgaaaatgggacactataaatagatcaactttcttattgcataatggttgtagaaaatatccaactatttctcaggttgctaattagcatactctaattagtatgcttcttattttctaatataaaaaaatacttgcctttttatcttcagggtttagttgattcattaacatattgacattgtcagtactccaaacccaagaattacttgtgaaatattcaagaaacaccatagctttgtgaagacgagttattgttttcatcatcctgtattttaagaaaaattgagattcataatttgcatagataaggaaaaatctcaccaccacccagggaaccagtttctattttgagacactgacagtaaaattgtaacacgtagttcaataagtgtaccaaatcaccaggaaataagaatatttctgcatcttggaacattatataaatgcaaaacaaagaaaaaaaattaagcagcagtaaatgaatttaatattgcctaaggagagttctgctgatatatgaaatggaatatttcaaggccaaattttctacatataatactaagcaaataaatgaattcaattagcattcttttccttttttgttccttaaatcacattttagttcagcttcgttttagtaagattttctgtgaattcataacatactgttacattttaatctcaactcttcagcatcatggaagcaaagtatacagaaatattcatttgccatttagttaactctctctatatattttaaacaacttgctcttgaacaccaacaggcgcctggatgtgccatgaaatcaatgactcatggtgacaactttctcaaatagatattcaatatattccctaaacttcccaaatcccccaatatccatctttataaaaataagaaaatttgatactttgtttctttttaaaagggtgaggggctttaatctttaaatttggcattttatatatcatggttcactgtaagtcattaatatcataacactaaccagaacagtaacatctaaccaataataattatcaatgatagggagagaaatagaaggcagaactttttgaaacacacacaccaaaaattcctaatctctgataaaaagaaaaattatatgtgaagaaatactttaaaagaattctatttatagtcccacaattaggattagcattatgcagtttagagatctccaaatcagggcttaagaaatgcgagaaatagaagaaaatgagaacattagaaatgaggaggaaaccaaaagagtaacattagctaagcaattctgacattttcaacacatttagaaagaaatccggaatacagaatactgaaacacaatgagacaacgtggacaatgtatgtaaagaagaactgtacttcattaaagaaagtaattacaaaataaaacctccattaaacacagaaagaattagtgagcatcaaaggctaaatctagacaggaatgttcaaacagaaagaattgaagggaggagaag

SEQ ID NO: 47418 - DNA, 1259 bp, Bovine  19866881028555
  misc_feature (1)..(1): n is a, c, g, or t
ncaaccccagtggaacctgcttgtcccccacaaccccaccccacaggagcccaacactgtaatcctatagcatgaaggaacaggatagagggcgtgctgtctgtggatcccaagttaaaatgaaacaggaaggggcagagagaagcatttaaaaattattctaactcatcaggaagaaaaccactccctctttccctgtggaaggaaacaggggtcgacagagagtggacaaagggtattacattagtgaagctccttctaaaatgaaaatatcagaataagaggaagaaagttgtacccctaaacatttcccagacatttgttctcttaatccactggacttgaccatttaacttataatcaaccaggctctctggctgtgcccttgaggggaaaagatgagcagattttcaggacagtacagttcttactttcatagggttgttccatcagaggagttagtcatgctcttctatgggtcctcctggtataccccaggtccatagtgttgcttctaccctagaatgttctgaaacaggccagaagagtacattaaataaattaacttaaaggtgacccttgtgccccaggatgaaaataaattctttacttatttcccaacctactttgtttaatactctaaccatcctcagctgttggctgggagtagctggttggaaagctggccttagtgtaaacatggtggtggatccagagactgtcagtccatcgaacttcctgcagatggagatctgagcagtgcatgttcatggctatagtatgcatatagctcattaggattccacaatggtaccaagtgatgacataaaaatactccaaataacatcctaacaataagatacttcacatcccataatcaaattctatggagaaattatatttaaaaaaaattagattcccccttcttggaagtaaagtccaaataagttaaagtccaaaaggattaaaaccctagatcaaattctcttaactttatgagttaaagttaaaaacattaaaatccaaaatttatttcctctcattttcctatcctcttaatcttagtcaagagaaagcagatatgtgggtgtgtcccttcagcaccgaatcacctgaaatcgatatggttccttcaagaacccaaaattagaatttgtcttcatgatcccgactcctattaaaaagtccaaagaattcctagaacatacagattaaaagagtcttagctcaaaaactatacaatttataaagcaaactaa

SEQ ID NO: 47419 - DNA, 1459 bp, Bovine  19866881116327
  misc_feature (1)..(1): n is a, c, g, or t
nataattcttgactctgattgagctaaaaattagaaaatttgttagtttcaaaaaaaaaaaaatcattaaaatataacaatactctatgaacttacatcataaccagcaatgagcagcccaacaccatatggtctccggccatatcgctgtgttggtatctgggtttcttaaactagtcaaagagtttgttctaacaagaagtaaagtactgtctttaatttcaaattaaacattatcaacaaagagttctggtttttttaattgctgcataatccactatcccaagaagaagaaaataaaacaaatatttctttggcttagtgttaaaagatgtttgactatccaccaaacccgaagtgagtgctagcaagatgatcttttctggtatagagaatttcattcattttggatataagggacaaggatttagggggagcatctataaccaccaataaacaaacattaaatctcttctaaaattgatgctcagttttttatgaaattaggcttatctatatctggaacatattaattgcttatctataaaggttgataaaaagaaccacccaactcatttagaatctattcttccatagtaaaactccctacaactctccttctaaagactttaagcattcttttactgaaaagtgactcaacttaaagtttgcacaatcttacctatgttatatatcatattcctaataagtaacataacaataaagtatcaagaccctttaaagtctacatccataaatgctacaataaatatataaataaaaaggatactgcttccaattagagatacaagacgagacacaggaagaggtctgtcaaatacaaatctggaatccaaacactcctggcgcataaaattactgaaaaagaaacaagaaaaactggtaatttcaaatcacagagtcattctaatcaaacgaagtaatttggtttctttttgctttcttccagatgtttacatgaattacaaccatacaatggaaccataaatatataatgacaaggatgcatttttctatcaaatctctatattttaaatgttctattattgaaagtgactaaccttaaagttttcacaattttacctaagtttgtgactatacgtttcttagctctagataacctttgcctcagagcactttacagaagagaagaaaaggctgcacaataggaaaagagcaatctctcttctcttacccttcccactgtcaacaagactgtcttaattccatgtcttgagctagcaaaaagaataactttgcttttttccttgaaagctgacaaaaatttccccaatagaacaaacagaagaaactgaatccatactagggcgctgttaacatgttcctgtcaatgttacttctatccatagcagtactctagaggagacactacactggtaagtctcttaaatccaacaagatgcaagcaaatgcaaca

SEQ ID NO: 47420 - DNA, 768 bp, Bovine  19866881124233
  misc_feature (1)..(1): n is a, c, g, or t
ntacgtaactcatattttaaggcatgggacaagagagatcgctaaaggcagtgtggctagaaaagagaagagcacggagagcttgaggccagggacacttcagtgtttgcagaaagatgaagagggtcagcacaggaggctgagaaggaacgaggtgaggagaaaatgaaaaggcagcaggagctaggccagaaggtgtttcaaggcagagggagtgagcagctgtgtcagacggtcacggaagctacaagctgggcactgacctttggcagggagagaggcgagtctcactcacttcctgtgagaaagggggaccacttgcctgccttcctcagaagactatggtacagcccacaggagaccatgggcaaactgtagagctcactgaatgtgagctgtctgtttttatttatgacccactaaacccagaacctgttgaaatgatgggaggacgtgttaggcacaattgattttaaagatgcttctggctccattatcgcctcataaaaaggctcatttcctgctgctcttcacgaggacactcatgcaaggatgaaaaagtccccctcagaggtggaagccatcaggactgatattttttatgggtggttagtggaaactctgggaaagggtagaagcaaataatggaaccaaacacggctcactgggtctttacgcaagatgacaggcgctgcccttccagagggaatcgagtgaccctgtgcctcacagcaagggctccgggagaaaactatcaaccaggggcag

SEQ ID NO: 47421 - DNA, 712 bp, Bovine  19866881129894
  misc_feature (1)..(1): n is a, c, g, or t
naacctctgtgtgcttagtacccagtctgtccagctctttgcgatcccatggcctggagcctgccagggtcctctgtccatggggattctctaggcaagaatactggagtgggttgccatgccctcctccaggggatcttcccaacccagggatcaaacccaagtctcccgcattgcaagaggattccttactgtctgagccaccaagggagccaagaatgatggagtggatagcctatcctttctccaggggatcttcctgacccaggaattgaaccagggtttcctgcattggaggcagattctttaccagctaagctaccagggaagcccctggcctctcgctattccctcactatttttctcctagaagaatagtaacttacatgattggtaagtttagactaaagaattacttaagcataattctacctgttgcttttttgctcttgggggcctacctgctagcctggaagtaattctcaagtgctcctccacagatgggctctcctagcaagcagggaggatgttcctggccctgtcctgcctgtgtgcaggtatatctatttagctctaggctttatgactagaaagcaaaactgcctgcatacataacctatgtcctgcaacatgagctttatcaggaataaaggtggtattctgatctctcatctgtcactcttttctcagtttgttcagaatttgggaaaga

SEQ ID NO: 47422 - DNA, 1596 bp, Bovine  19866881158263
  misc_feature (1)..(1): n is a, c, g, or t
ncctcaggtcatggggtgatgcccgtcctcagagtgccagagacaggtgtgggtgcaagggcagtgggcgggcccaggcagctctctctgatgggcccttccttctcctgcatcagaaacaccaagctgctttcacaaaaccatcttgcgggaaaactattatctacgggcattatgcaattttcctatcagaattacaggctgtgtttgaaaagaaataaaaagaaattgaatttgaaatgcttctgtgaaaccacatcaccttcttacaggtctgttcatgggcttcagataccttctctggcttttaaatagctgatcagacagtagcttatgatggcagcagcttccagggtgcaaggtgggctctcggcacttataaacagtcagcctaggtcactggggcatgcatctgaggcagactcagagccttgcagctgactgtgggtcctaaggaggccctatctcttcctcttcctttttttagtgccaggtctctggttggcactcgccacagctcacccagtgcccactagctcagtgcccatgtctgttggtgtcactttactcagctctggctccacactgtgccatagagtcctgggactcagaaagacaccagacgcttcctcatcacagcctctcattcaaacagcaaagacgggggcctctctagtggttcagaggttaagacatctctcccaatgcaggggatgtgggtttgagccctggttggggaactaagatcgcatttgtcttgtgcccaaaaaacaaaacaaaacaaaacaaaacagaaacaatattgtaacaaactcagtgaagactttaaaagtggtccacatcaaaaaaaaaaaaaaaaacttaaaaaaaaaaagcaaagattgagcatactctaaacactgatagtacagcagtgagtgagcagaatagacaaagcctttgcccatagaaaatgcctattctagtaaaagtagaaaagataaaaagtaagaaagcaaaatgcataggatactgtgtgcgttaagtcgcttcgtcatgtcaaactcttcgcaaccctatggactgtagtctgccaggctcctctgtccatggggattctccaggcaagaatactggagtgggttgccattgcccccctctagggtatcttagtataccagatggtgacaaatgttatggagaaaagacaatcagataaagtgagagcagggtgccaggttgaggaaggggcagggaattgctattttgaatcgtgtggtcagcagaggcctcactgagaagatgacatttgagcaaagacctagaggaggcagaggaatgagtgctctagtatctaagaggacatctccccaggctcagggatctgtaagtgctaagtgtgtctagcatatctgaggagatgtccaggtggctggagcaaagtgagcaaaagggcgagtaataaaagaggaagctggtgaggtaacagggaggcagagcagatcatgaggggccatggcagccatggccaaggtccccatttcctgtgcaacatgataccattagaggattttgacaagaaaaacggcatgatgtggctactgcgtgaagaagagc

SEQ ID NO: 47423 - DNA, 753 bp, Bovine  19866881189080
  misc_feature (1)..(1): n is a, c, g, or t
ncttatagatccaaaccccgggataaaagcatcctttcctggtaatcccacggacaattttgtagaatttctagggttgcaaggagcagagtttaaaatctgctgttttaggattaatcctttgaactggaattaagggaccaaggtacaatttaaagtttcttgataattattgccaaagaaggttccaaaagaattgtgtaaatttacttaaccacaaacgctgcgtattctcattgttttatttttttcctggtataatggcagggaaatgactcctgttaatgttttaatttgcacatacttgaaaatatgaagctaaacacatttccttatgttgacttatggttgtatttctatttatggaagaggtctattgattcaagctttaatttcatgatatcaatttcatataacttatatattaattattcgaatactttctcaaacattttctgttttattttccttttgttacttttctttgtgcagaagcttcacatttttacatagtaaaatctgttcatcttttcctttgcgatttcttcttttgcttcaatgcttgaaaagttactattcatccaaagatctgataaatagtgagttcaatttcctgccagtctttctgtgatttggctttcatatatttaactcttttatctatcagagatgtatttttgagtattgtgtaaaagatatgaatccaaatgatcacactgggttttagattgatatgcttttgtgaataagtca

SEQ ID NO: 47424 - DNA, 1036 bp, Bovine  19866881350636
  misc_feature (1)..(1): n is a, c, g, or t
nacacacacacacacacacacacacacaagtaagcctacagagctgtgttatcatttatttataatagattcccaaaagcagtactagttagtcagtgtgtgtatcttcttcaattgtaataggcattagcaagttgcttcccacatattacacacattcatgcaccagccaaccataggtgatgcccttctcccttcttcctcaccagtgctctaagttcctgtcttttttttttttttttttttactgttgctggtcttatagacaaagctattactgttttaattcacatccccctgactcatcaaaatgttgagtatctcacacttctgtatgtttattggccattagcacttattttttaattacccctccacgggctttgttatcatcggctctgttacttctgactcgttgcaggccagttaagaagccagcatcatgcttgacccttgacatgcattgttgtgtttaatccaataacccgggcacgaggggagcgccctgcacagtgtgtgaacgggcaggcacattgtgctcttcgtgaacgtccaggacggagcgcacacattgtgaaataataaatggaatggaagagacggcaagggctgaataactttttggctccaggaatgtcttccagggtcagttagcatccagttcactctttcaaatagtcctgagccaagagatgccaaatcaaagcaaaactctatcaagagaattctgatttaaaacttaaggaaacagcctctacatatttttagaacagcgcagaaaaggatacatctgtgactcgaaacagctggaaatcttttttgccaaaaatcgtgccgattatgaaagccataatggtcagacaagaggcagtcaagatgcaagctgtcctgtatttttcatacattcagcttttgaataaccttcactttggtacattaaatactgacccctataaactgccttttgaacatcaaatgccagccagctacacagtttgtacagcagtgtttgtaccattattgaggatttcattat

SEQ ID NO: 47425 - DNA, 921 bp, Bovine  19866881372704
  misc_feature (1)..(1): n is a, c, g, or t
ncagtcagctactctgttaccagaagtgggaggatggtgctagacaggcaaagactacaggtgtgtgcaccagccacatgaagtcaggcaggaaccgactcatgggagccagaaccacacatgagccaaaactatgaaggtgttaggaagccagaaaaagcagaggaaacctgtctgctgagagaagctgagaagtatagcagacgatcagagaggagcagatgatggcagatggtgccactgtgttcaagctgggactatatgtaattttcctttttcagtcccatccccaggtgtcctggctaggctgacccctgcattttagtgtccccagaatacctcctttagatgttcaaaatatcctcttttctttttttttttaagttgaagtatagttgatttacaatattacattagttacaggtgtacagcttagtgattcagtatttttatacattatactctatttaaagttattataaaataatggctgtaattccttgtgctgtacagtatatccttatttatctattttatacacagtagtttgtatctcttaaccacataccgttgtcttaaaccccccctcctccccatttgtaaccactagtttattttctatatctgtgagtttgtttttgttttgttatattcattcttttatttttttttagattctacatataagtgacaacaaagagtttgtgtttgacgtatcactaagcatagtaccctctaggtccatctgttgctgttgctgctgctaagtcgattcagtcatgtccgactctgtgcggccccatagatggcagcccaccagggtcccccgtccctgggattctccaggcaagaacactggagtgggttgccatttccttccccaattcacgaaagtgaaaaggaaaggaagtcgctcagtcg

SEQ ID NO: 47426 - DNA, 1240 bp, Bovine  19866881386627
  misc_feature (1)..(1): n is a, c, g, or t
ntgccaggtatcttggagggacagctagaaggatggctgggcctctgtccatgtagtctcagggcctctccttcaccagagtatctctggcaggaagcagctcagaggttgcaaaagttcaaaagctcagaagcgcaagctgccaggcattcttaaggctgaggcccagaactggcacagcatttcctctttacattctgttggttaaggcaagtcatagggctagccgcgattctatcagagctgggactgagagaaaactcactggtgaccagcttgggaaactaagttgactctttcacaaatattgagaaaaggatcaagaagtactggtgaatctcaggttaaatactggccttttttgtcaaaatttgaatacacatttgcttttataggtgcttatttaatagctgtgtaattggggaaaaaagtacagaaatttcttctacagcatgaattctttttttaacttgaaaaagatgttggtatttggagcagtaagatttgcattatttaactgctgttggaaacagtgcaggatagtacctcacagctgctttgttggaaaatattcttgctgtgtttattagtgctaaggaggaaaagaatgtctaaagtgtgctggttctatttttaaggctagtagtgataagaaaagcctttattcttaagcacaacaaagtatgatgaaatgctggaattgttcattgctttttattatgtaatatttgtgagtaaaagtgtatattggttaagtgttctttttacatactttcttttttcttcctctcttaagcctactcaacctgctgatgaacctgcagaaaaggctgatgaaccaatggaacattaaacaataaaccagtctatatatgtattgtcatacatgtaagaatgcaggagcacattctgatgacagtcatctacactttgaaccaaaagatgcagaatggtgggatagaatggtatgttttaggaatcagttcagatgtgagtttttcctaagctgccaccaaaaccatataattgggttcatttttctttaagagggcctctataatcattttctagaaagtatagttctctctactaatgtttttatatgaagaacatagtgtctttgtggttttaaagacaactgtgaaataaaattgtttcacctgctgatgtattggggttttgctttttaagtagcttcaactgtaaatagtagtctgtgattacagctgtgtcatcatca

SEQ ID NO: 47427 - DNA, 1335 bp, Bovine  19866881806107
  misc_feature (1)..(1): n is a, c, g, or t
natttggcaatagggagttcatgatctgagccacactcagctcccggtcttgtttttgctgactgtatagagcttctccatctttggctgcaaagaatataatcaatcagattttggtgttgaccatctcgtgatgctgataggtatgctaagccagatttgaacccaggtcttattccagagtcttgtttttaatcccacttcacttcaggatgtatgaatttaaaaaatattattcacacatatttttccatgcttttatagttctcataatttttttaatggctgtattctttcattgtgttaaaaatacctactttattaaatcatatcatagtgaatgtttgagctctagccttttgctatttctaggtagtgccttatcagttattattctgcgtatatacttttgcatttgtgaaatttttgcctcaaaataaatttcaagaagggaatatatagaccttgggatcttgcatgtcactcttgtaacaaatgtaccagttttgttcttaacacccctttgcattgtgtagccttaaaaaggcggttaggttaattgctactaaaagagagataaacatttttatttgattttatgttaataaattttaaggtttttgcgttttctttgactgttttgtcctgattgattactctaccatagcattttaaaattacttattcttttctttgtatgtggtatagtcagttcataaaacagtatgctttcaaaaatcaagatgcaaaaaaagtgtaaaatgactttgaaatgtatgcataaaagccaaagactgaaattatctgtgtctatttctgggaaatttcaaataatcagaaaaattttaaatacaactgatagaatggctgtacttcatgttaaaataacaaacaaaatctgagctaagggattagttgtaaagaaacaaatacctctttgtccctttctatctttgatactctaaaatggaaataagtttttttttagtgggtgaaagaaagacatagcttcccaattttttattgtgactttttgttttacagagatgctgttcagttaaatgtgattgctacacgacagcttattctgcttgcacaacagatgaagaatctggaagtgttcatgcatgtatcaacggcatatgcctactgcaatcgaaagcatattgatgaagtagtctatccaccccctgtggatcccaagaagctgattgattctttagagtatgtttgtttgaaatttattcaaatttgctttgaccccaaactttggatccagatttatctatttacatgtatctcttgtctgttagtttctctctctctccatccaca

SEQ ID NO: 47428 - DNA, 889 bp, Bovine  19866881929148
  misc_feature (1)..(1): n is a, c, g, or t
ncttgcgctcacctctggacctgtctttagttctggaggtgatagatggatgctgagctaggagaaatgtgtgtggagggtgcccaagagaagtggggataagctgaggggcctgcttccccacccgttcctgctgcccacattgcttctaagaacagttgtccacatggaggtatcccctagggaatgtttccaggggtggaagggggcagccagtgagggcctctccaactcctgggaggcaggaagtgggggcttcttagaactgtcaaggtttcctggaagcctatgagagctgaggccatctggctttctgcagcttgcttttgggcgtgtttggaacccggaggagggcggcccctctggggacacaagctcactagttgtaaaccctgaggccggcagggtgttcgtgttggtctggagaaggaggctttcaagctgcagctcttcctctctcactgctggtcatcacaagcccacacacctgccctctttgcagcctgcacttgtcaaatcaaactatgccttctgagaaatacgatcgttttcaaggctcttcctttgagaaacccttgaactgaggaaggcaggaagccacaggcttctgggtgggcagagcctacctgggttacccgccccccacctcagaggggagcgcagctgttctgagtcatcaaagaagcctaacaaataacaccttcttgcatgttaacaccatcaaagaggtcggtgaaggccagtttatagctggcatgagggcgctgaaaagaacagagactttgaggctgcaaggcccagtttccagctccggctccttcacctcctgtccatatctcacaggtgacctctctcagctgtgaaagccatcatggtcagatgtgtgata

SEQ ID NO: 47429 - DNA, 907 bp, Bovine  19866882156277
  misc_feature (1)..(1): n is a, c, g, or t
nacagttttagactggatgactataagatctttgcagcatgccaggcaaagccagagtgttgaaaataaagggggtaaaaaaatctcaattcagtggtaagtctggtttcatggttggaacagtcttcagaggttggaaaattatgctgcaataaaattgaaaagacagaaggtaatgttttaagagaaaactttggtggcagcttaaagtgtctgtgagtcccaagaacaggcattactttgggtatgttggctgctctctaaaacttcattgataggaaaagagctacagcctataaactctcaatagggtagtagaaacaagaggctaagacataaaataagatgagctacagtcttaccaatctccatttagttatttatcattctcaggctgctggtttagcaaaagaattgaaataacttttaatgaaagattcaaagaccttagcatcctaaaataaaataacaccaccaaaaataaccacgtaattaaaggaaggatatttggtccttcatgcaaactcgaacctctcaggtttgccctcacactgggcaagagaaccacctaaaatcaggtgttcaatacctccaaggtttttgctctgaagccccagccctgacctggtcctgatgctccgggcttcggactttccctcccctgcacccctgtacacattgctctggccccaccccagggccctctgctcagcaccactcctttcctttgaccttcagtctctctctcaggttatccctctggcttattatgcaggaggaaattgatccaagatcaaggagagagatttaatacaaatcgctactgacatggtacgccaatttaaacacttattgactctaacaaactatgttcagccaggccaaagctgcacactcattgaaagcg

SEQ ID NO: 47430 - DNA, 1715 bp, Bovine  19866880179380
  misc_feature (1)..(1): n is a, c, g, or t
ntgtgcctggagaaggcaatggcaccccactccatactcttgcctggaaaatcccatggacagaggagcccagtaggctgcagtccatggggtcgctaagagtcggacacgactgagagacttcactttcacttttcactttcatgcattggagaaggaaatggcaacccactccagtgttcttgcctggagaatcccagggacgggggagcctgatgggctgccatctatggggtcacacagagtcggacacgactgaagcgacttagcaggagcagcatcatgtgtccctatcacctcactcagtactaggtattgagtcacctacaacttactaaaggcaaggtagctaccacctaacacatatacctattgttgtgagctgtgtttccaggaatcttccaagaagccctttaaaaaaaaatcagaaaatgtcccagaaattactaaatctttgcactggagcacatgtgtcttggttggggagctcacaaatcagccatgaatgttcagcctgagaggggctacctagaggaagatatttaaagaagatagaagtgagttccctgaaaatctatggtccataacaccacatccatttttatagttgcaatcaacaagaaagcttgttctatttgctttccttgcttgataatataatttcagagatggatgaaaaatgctttcagcactagaatcaatacttctgattacggctgcttttgtgctcgtctctccccagtggaaacatagccaggaaagataggaagatctatggaaagtctacaaccctgattttttttatctcttccaaagttgtctgttctcatcaaatgctgcatttattttgaagaatttgaaggcagcctagggctcacagaagagacatggtaacttggaggcatttgctatatgagctgtgctacctgaaaaactacagacccattcacccacctctgctacagaatcacatctttcccttcagattccacaccaaaggcatcttctgaaagctcttagtgtagttgagaggtgctccattgtcctcttaatctctgctcccaaggaattcttgttcaggatggaagaggaaacacttccattgggagaaggggcctctgcctcccccaagggctgaagtccactgaagggctgcaatctcaagccaaacaattcaggtgagcaagaaatgccacttcctctaacttgtctttaattgagttaatttcccttttatgtttggccgggctgcgggagcttgtgcttggtcatttcagagtttttcttcattttatttcaggatttcatctcagttctaggaaactacagagggccaaggtgtccggagatgagggatcaagggaagccgtgcacttttgatttgtaatatgaaatatgtatattggtctttgaccctggttccttccacagggctcctgaaacccttgtaatttcctgattcataggagcatcttttgtttaaatgaggtgactgggtgagatcctggagcagggctggtcgatagaaagaatgagccatgattagaagcttggaattttcagttcatcctccaccttccagataagggggaaggaccgacaatggagtcagtgatccatcatattaaaggatgaagctgccataaaatccccaaaacggggttggagagcttctgggttacatccacatgggggagtagcaccccaactccaca

SEQ ID NO: 47431 - DNA, 1858 bp, Bovine  19866880464718
  misc_feature (1)..(1): n is a, c, g, or t
ntgtggctccagcctgtccacagataaacggggtggccacgagcaaggggcagccgcagaggcaatcagcaccagggaacacggggtggccagtgtgtggtgggctggtggggtataggccctcaagttcagggaagcctaaatggaagcagagctgagggtggggcgggagtccctggagggaggggaaggtgggcccactccaggcagcactgcctctgtattcatcttcactacaggacactcacagcggagggtgcaggccccccccggcatgaggcgactgaaccagaaggtcaagggctgtggaggacaaggctgagaagcaagaggccaagggaagtcagggctgagccaggagaagctgaggaagggagggcaaggcatggccaggactcagaacatcccctggctgggatcagaggtgggacaaggtgctgctggggtaaccatcacccaagacagaggtggagacctctgccagctgactggggggctgggtcagatggagacggctatggtggtgggcggtccagcactcactgctgaaacatctttaaaggcgggtcccttcagcctgtggaacaatccagtggacggtgacataaaacacgaaatgaaggagcaactccagggtgctgcagacaccagccagtcccagacttgcaccacggtccacacagtcagcattccagccaccttgagattctgctctttccggagaagctcagcagagggcatggctctgcggctggggatacccgtccaggctgagagggtgtgaagggggagacacagagacgtgtgtctgctgttgccaccacacgcctgcccctctcaggaacatccaaccacccagctgacaggcgcgagcagccgtgtcagagggaccgagaaaagtgatttctttacatttctgaacataacaggtacccaggaacccctgatggaagggtccctcctggagcaaaacggtgcctcagacttgcttctaacacaattttgcaaaaaggtgtgaataattacaacttctaaagtgtttctgtatgttctcacaaatcccacaaaaaccatttcaggtcttcttgactttcagatgacagccgactaaaaggagcacctccctcctcaaagggtccacgagtgtgacctgaaatgttaatttcctcccttaaaagtctgtcttcacaccagggaaacaaatggccccttagatggtgacaaccaatttgtcaccttgagcattctgagaagtcaagagcaggtcatcttattcccagattgattttgagcaccacggaggggtggagtcaattgagagagcaagctcaaggccacggccaggccggggaaagcgccaggcctccggactcccagccgagcttcctgttgacctggctccttaggagccaaagctcacctggacaggggcttctgaggtcagccctagcgctggggcagccaaacctgtgctgtccttacgagggtggtaccaggtatagtcttgcccttgagatatttcaatgctggttatttcctgttagactgttctgtcctgcacatgagcagaatctaatcagagagtgaaggaaataacaaaagaaaagctcaagccccatgaagtcagttactaggatttttatagaccatggtgtagatggaaaagttctgttccaacccaccccttgcaaagattccacgaaagtcttatggtgcaagtcatcgagatcaaatgtctcctctgcaattacgttttaaaacaccacgaggtaacgatggctctgcagacactggcccacacctgctgacatcaggaggcacgagcgggcaacctcaggaagctgctgaggaggggaca

SEQ ID NO: 47432 - DNA, 737 bp, Bovine  19866880485329
  misc_feature (1)..(1): n is a, c, g, or t
ntgtgcagtttggtagtgttgagtatgttcaattgttgagcagcaaatctcagccactttcacctcagtaaagaatggtcatctttcagctctcccctccctgttccccggccatgggctgccatcccagcctcagctcactgcgcctgaaggccttggtcctgagggctggttcttctgtctacgggtggtggcagttctgctctctgggggtctaggaaggtgacagttatgtgctttgttcttttttctttgtaaatgcagttcatgttccatcttagaaggtctccattccttcaagtcttcaacaatagccctgacgagtcttcgtattatcggcaccactttgcccggcaggacctcacccagtccctcatcatgatccagcccatcctgtattcctactctttccacggccccccagaggtaagggacctaggcactaggaatcagctgatatggagtgcttttagtctagcaagttcactcttcgagcaaaactataagaaagaaatcttttgagtccttatagtaatttagcagcatttctgagtattaaaaaaacgtgcataggaaaaagtcacaggatgcataaaattagaaagcagtccaaatgttcaatgtagggaagttaagtaatcagaaatattcacaaagtttatgtaatagaataaagtaaatccttatgttagattaaagagatttttaaaaagccaccaggaataaaactataaaaa

SEQ ID NO: 47433 - DNA, 3742 bp, Bovine  19866880803531
  misc_feature (1)..(1): n is a, c, g, or t
nactttgggggaaaaaaagaagatttgcttctgtgtttgggccaaaataaacttcctaagttgctatttgatagcagtgtttgtaaaataatattataactctgtattgtaaagaattttaggttcagaaaaagcctctgagtatacaaggattcttttaaagatttgttattcttttagactatatgagtcgtcttccctgcccttaaaaacttttgggttggtggcggaactccgttggttaaacttagtatgtaagcatcacattgttagcagaagtggtcatggtgaatcctgtagtctgtaatcctttaatcgatacgtgggccgactggggtgtgtcattacaatcatacagaaaacacctgttgtgagaggacagacaggtgctgctcagcccatcctcatggttcctcggtatagatgcttcttgcttctgagccaagaggtgagcgtcttctgccaccagcgggtcctgtctgaagcttctcactattgcgggcactaagcatgatgcttgtcaggtgtgtggtcggtgctcagcagctgcttgtccgatgagtgactcgacagacagcgtacaagtcaccagatgtcatgtgtccgcagggagtgctgcccgctgtccacggtgctgtcatcacctgcgagtgttaaccggcagccaccacacaggttaatctgtccgggatattcaagtcctaaactggaattctgaggttttcttaaacgttagtgtgatttttgtttttatgtgatgttttaaaccatttgaggtcaatggatcaacttttttttttttttgtattcacctaagcagtactcttgcctggaaaatcctatggacggaggagcctggtaggctatggtccatggggtcacaaagagtcggacacgactgagcgacttcactttcacttttcactttcatgcattggagaaggaaatggcagcccactccattgttcttgcctgaagaatcccagggacgggggatcctggttggctgccgtctctggggtcgcacagagttggacacgactgaagcgacttagcagcagcagcagcagcaagcaccttatggttaataaaatgtcaaaccttttctggtgtgaaaaatgctacaaatcaatgctacatggtagataatgtctatgagtcatatattattttgtgcttgttactcatttccacatgttattgggggaaggagtgggagggacttaattctttgcaggttccgactcttatgtaataaaaagggaaggatctagaggtcttaacttcttgtcaagtttccgagtctaactctgcagaataacgtctgtcccagttgatgaggagggtgagagtaagttcctctgaaatgctgtcactcctctgtctcagaactttagctctttaaaatctgggtcacatctgaatcgacccttagaagccttacttttcagggcaggagaagcagcatttccagcttgcatccagggaggtcagtacaggaggctttgagggctgagtggactagagtgtttttcagccaagggtcctgccaaactgcctggcaacatttatctgatcatttttctccattaaaaaaaaaatctgtccaagatgataataaaaccttacatggagatattttttctgtttagacttcattatgaaaacattttgctatattctattctgatactaaccattacagagtccctttttcaaaaatattggtagtaaagggggagaagatgcctagtttctcttttttaaaaaaatgaatcgctttatgttctttttttttttaatatttatttggctgcaccaggtcttaactgcagcatgtggaatctatatgcctcaccaggaattgaatccaagccccctgcactggagctcgaagtcttagccactggaccaccagggaagtccctttagtttctcttcctaagtcaccaaattaaatttctcaggtttgcttttttcctgtatttgcattgctcaatttctgtttttctccatggatttatatcagaggtacttctttcctactttggtgatttcttttttcttttttgccagtttagtgatttggtgatatatacggaaactattgcactattctgagcaataataattttattgacttggaagcctgagttgtctcgacttccagtggttgtttgcattgcagtgtttaaaataactgacaaccctgagatccttaccaaaagtttatgacagaaaggaaaaaaaaaaaaaggaaagagtagggcagggagtggaaaaaatgctgtttaaattacaaactgcttgtgcttgtagcatttacatagagagggcagttaacccaagtcacttaaaaaatggtcataacattgagagttaaaaataatcttacttgtagaatgacttggagcagaaatcggaagtccagatgagcgaacagttcacatgaggagttgttgggtggcaggcacgattttgagtgttacattgtggaagctggttggtgctgctgggggctgggcctgcagtttggggccacatgtgtgatcttgattgattcagagcccaggttgattcagaggtctctttgttgataagctcaaatgctgtctcctcggggggtggggttggtgtcccgtcctctactgtcccatttagagtgttcaccaagcactgttggaagctggctggcctcccaggtcactggtggagccctggaccccggtggcagaaaaaagtccccacccctgtttccagggacacaccttgcagccatgtgggtgatggcccccctgcccctgcgaagtgaagcctgcctggatcacgggggtcatgctttaagccagacagcatctgtgttcattatctagtgctgtgcagagaactaccccaaactcagcggcttgacacaacaatagacgtttttcatactgtttctgtgagtcaggaatgtggaccatggagctggatggttctgccagggagggaactctggttaggtcgcagccactgtgtcggcagggcccgtctcctgcatagcccttggggttggcaagctggtgctggctgttagccagaggcctcagtttttttgccacatggacagggctactcagatgtcttcccaacatgacagctggcttccctagagccctggcctttgaagtcacacactgtcatctctgtggtgtcctgtggttacactggttagccctgtgcagtgtggcttcacaaggtcacaaggtcctagggaatcttgaaggctggccttcccaccatcccaggtgtcccttccggtcggtaagatccatcctgtcttcccattgtgagcttaaacaggatgcttcctgagtgtgggtaccacatagtgaatcgtgtcctaggaggttgcagggcggctgctcagatgtaacagaggacaggttcgtccttgctgagtgcacggtgggagcattttattcaaacactcttcttttgaaatcagtgatgatactcaatcttatcttttcaaagaagaaaataaaatcaccttttaattctcccctccatgggaacctggcattgtagctcagctggtaaagaatccacctacaatgcaggagacctgggttcaatccctgggttgggaagatcccctgaagatctggaaacggcaacccactccagtattcttgactagagaattccatggacataggagcctggcaggtgacagtccatggggttgcaaagagtcgga

SEQ ID NO: 47434 - DNA, 2271 bp, Bovine  19866880351309
  misc_feature (1)..(1): n is a, c, g, or t
nacacaggttgtggaccatggaaggcttagattttgtggccaaaagtgaaaatgaagttgctcagtcgttcgtgtctgactctttgcgaccgcatagactgtagcctaccaggcgcctctgtccatgggattttccaggcaagagtactggagtggattgccatttccttctccaggggatcttcccaacccaggacttgaacccaggtttcccgcattgtagacagacgctttactgtctgagccaccagggaaggccatttctttttgtgtccaggttggcatcaaattaaattctggctttgatgttctcagatgtgtgtccttgagcaagtgtcttcaactctctgagcctttactgtgtcatttgtaaaacaggggatcagtcagtacttaccataaagggtttctatgagagatgacatgagatggtacagaagtatctagcatcatgcctgacacttttaaggatttgagaaattattgctgctatttgatttcttctcaaagcccctgcactttggtaggtttgctcacttggctcagctttatctgtttagagcgcttgaattgaactgaaataaggggactgtagcaatcaagttagggcagattttattgccaacgtgtatgtcttgggagtttgcaaatgactttgttgattcccacctaagcaattcaggaagactcactcttattctctacctcacagagaagacttgtcccaggactgcagctgtaacatgagcagctaaccaggaatgagcctattggaaacttcaggagtcctatgatttctttcaggagagcaatcagctttattcattaataaacaaaactccactttattgtattttaatgaggaaagtcaaatatatacatgatagaaattcaaatatgatagaattacaatgtgtgatgtaaacagtaagaaagagcctttctctattcgatactgttttccaggggtgaacactatgaaaaatttgctaggtttccttatggaccttctaaatatcatcatcataatcttagaagcactttttgagtgctttgtgtgccaagccaatgtaaatcccttccatccatctctcatttcaccctcacaccacatcatggattggatgggtagtacgatttctctttattttacaggtgaaggatctggtgctcagagaggttaagaaaatcgagggtcatacagctaggaaagtaatagaattgggatgtaaattccagttgattcgaccagggtccatatccttagcgattattacgcaagcacaacacacccatcacaatttcctatcaccagatagcgtcatattatccccagtggtttgcagcttgtcttttttccttagctgtatatcacgaacacccttccttgacaggacctatagcctgagctcattctttttaacagctgcatacattccattatggggatgaacataatttatttaaccagtttccttctgatgggcatttatccatttgcgactattccctgtccttccttgggcccagaagagctaagctttctctagctttctggctttcagaggagaatcagcatcgcatctccatcagtctaagctgtatggtctttaaaaatacataaacctccaaaataaggctccattaaacaaacttataaaatatgaataggttgcttaccctaccttccgtccaagagcataagggtcaccgccccaccctggaacttatggagcttctccggtcttcctcctgaggtttacaagaagggtgcaccctctcaggtgtggggtcttgaacccaaatgaattgcgtgccttaaatggaaaggacttaggtaatttgctgagccatgaagcacagctaaatgtgcttgactggtgtgtgtgtgtgtgtgtgtgtgttcatgtacgcttgtatcatatcatgctgtactaaacaaaactgtgttcagataaactctcaggaaagcagtgagttggccagtgatggggaggctggggcgctcagatgtgaaacaagaccacctggtttgaaggctaactctgccatgtgtcaactttataatcttgggcagtcacttaatctctgtgcctcagtttcctcatctggaaaatggagataaaaaatgtccctacctggtcggggtgattgtgaggataaatgaattcaaacaaataaaacagcaagtgcctgatgcacagtatcacctctgggttagcttttataactattggatatgtgttgctgctgctgctgcggatatgtgta

SEQ ID NO: 47435 - DNA, 912 bp, Bovine  19866880708376
  misc_feature (1)..(1): n is a, c, g, or t
ntctccgagtccatttttgtaacagcctcatatgcaagtactgggacccacggagtatttactaagtccttgttggacacggtggacttctcgggtggcccaatggtgaagaattcacctgccaatgcaggagacgcaagagacgcaggttcaatccctaggtcaggaggatcctcatggagcaagaaatggcgacccagtccagtattcttgcccagaaagtcccatggacagaggagcctggcaggctacaatccattgggttgcaaaaagtcagactcgactgagcacacgctggacacgccaggtgctataagcactctataaaatgcaggcagagtccaaggaatgactgtctaggatggtcgaatcatcgtgacggtgcaaagatgctcatcactgcctgcactccttttttaatttttttggccacactgcatagcacatggtaacctagttgccctaccagggatcaaacccctgtcccctgcagtagaagcaaggcgtcccaaccactggaccaccaaggaagcccctgcacttctaatagctacaaatcgctgttttgtagtgcctgaagcaaggcaggtgagtggaaaaagcagataatctcatctctcagggtttagcatccacaaccttcccacctgttcacgaaacaaactttctctgcatcttcttcctgctctgaatgcatattcttaaggtgagaatgaactgccctcccccataacttcagaaccatcagtgtcactgggggcagaggtgcgcatggagcctgacagtcttctccgatgggacccagcccaatccctcttatgtcagaatgccttgtttacccattagtggagcattggacaccagcagcagacaggctggctccagggcatttaaaaggtcacggattgagag

SEQ ID NO: 47436 - DNA, 940 bp, Bovine  19866880885396
  misc_feature (1)..(1): n is a, c, g, or t
nacaaccacgcaccctcccgaagatgggctgatcgatgtctggagcaatcccatgtgaaatattactgttgcttaaatggtgctcgtgggatttacggctgggtattaatcggccctgcttaatgcattgacctttgccctccagcaattcagggaatggcactggtggggccagaagctaattctgtggattaaagcagaaagagccccctgcatttggaagtgtcagggacagtttaggcaccggcagaatgtctatggctttcctcatcacagcaggcagcagtgggggcttcctagcaggatacgtgctagaaatgatgctctatgccatcagtttcttttttattttatttattgatttatttgtttatttttggctgtgctgggtttttcgttgctgcatgctgacttttctctagttgcggcaagtgagggctcctctcgttgcagcatgcaggcttctcgttgcagtggcttctcttgttgccgagcatgggcggtagagtgtgggctcagtatgtgcggctcacgggcttagccgccctgtgtggcatgtggaccgggaatcgaacccgtgtcccctgcattggcaggaggattcttcacccctggaccagcaggacggtcccactaatttctctgtctcgttcagccctatgtttacttaatccctctccccttctgctccaggacttttcacatctgtttcctccccctgcaatccccttctttccatgcatcctcagttctaaccttagatgtcacttccttcaggcagccttcctgacccccaagtcttgttcagcctgtcatcaagatcccaagattgtttcacaattgtcattatggtttttctagcctggctcttctgacaacctataagttgctggaaggcaggagctgaaatattacccagatcgcctgcatacagaccaag

SEQ ID NO: 47437 - DNA, 1380 bp, Bovine  19866880888841
  misc_feature (1)..(1): n is a, c, g, or t
ntatgcactacgagattgcctttcgacttggaggagccgttcaaagtcttggcgtctgccagtgctggaagtgtttataagagacttccttgggaaagaaaggtcatcagggaaaaccagaaacagatttcttttctttctctggctcacttctgtcaggcacctccaagaagtttactaacacctaaatcgtggacatggaacttttagaagaagagatgggagaagccgttgatggcattgcaagtaggcctgtgccgagggtcagtccaggctgtggtctggagcagaaggcacaactgaggaaggaaggaaagaagggagaaaggatagaagggagggggaggggaaatgaaagaagagagggagaaatgggtggatagacagatgtgtgaaaggataaaatagcggcagggtagatggacaaaagaatagggttgaggggtaagtggacatatggatgggtttgtaaacaggcagataaatgaatggatgactacagggttggatggatggatagataaatgggtgggtagatggatgaatggtgggttgatggatgagtggatggatgaatgagtgggtggatggatggatacatgaatgggtgggtggatggacggatggatgggtggatggacagatgagcgggtggatgaatggatgagcgggtggatggatggatgggtgggtaggtgaaaagaaagaaggaaggatagaagaatggaagaatagatgtttgggagggtgaatggtggggggatgtgtgggcaggcagatggcagatgggtgagagtggatggatagattgatccatctcaaagatttatctttatgtaaggttgtaaatgggtggttcccttgctgagtatggcagccagtatgtcttatttgctcactccatgcccttaaagagtggctctcaatcttagcgatgcactagaatcaactgtagaacagattaaaatctgttgttagggtaccatcacccacaccaactatgtcacagtctctgggcatgaaacctgacgtcactacttttttgaatcctcacatgattcaaatggcagtcacactagagaaccaacataaattcaaaaggcaaagcaacaggctaatgttatgcttgatcaaaatgcatgcaattctttacctcttgtcttatgccagttccagtagagttacttgcctggccttggtaaatacctgaatgtgtagccaaactttggtgcaaaactcaagttaatatcctcccctatatcaagagactgtgtgacttcagtccaatggcttagatgctctgtgcctctggtttgccatctgcaaagttggagcccatgaaaaataaacatcctgtagtgttttgcaaggagcaaagga

SEQ ID NO: 47438 - DNA, 1335 bp, Bovine  19866881242036
  misc_feature (1)..(1): n is a, c, g, or t
nggattgtctaccagagtactagagtgggttgccatttccttctccagggagaagaaagtcataaatcatgactgaggttaaactcttagtgtcccaagatctacacaccctcctgaaagcctaggtcttatttcaattttctgatatgtctaacacctccagtttctaagtctagttctctgctcttatgtgatcagtttagaatggtaacaaaaaaaaaacaaaaacaagactccacacaaacctaatgccatattttaaatacatctttgaaaggttgaatggttactagaaaacctcccatttctggtcccaaaagcccttgtttatttaactgatacataataagcccatttgcttttacctttaacctgctaaaacgctctgtggttttcatagatttccttttcacatgtgcagtgatacccacttccattttcattacatagaaaagcttatacttttcatcaaccttgcttttttttcccaataagaatccatttcagggtatttcagagcaatgtagactctctctttgaaagttaaagaagtttttttcccctctctacatttggatctgtacaatgggattactgcacaatgccatggaagtgtaagggcttcctaggtggctcagtgggtaaagaatctgcctgcaatgcagaagacctgggtttgatccctgggtcaggaagatctcctggaggagggcatggcaacccattccagtattcttgcctggagaatcctatggacagaggcgcctagaggattatagtccatagagtcgaaaagagtcagacacgactgaagcaactgaacatgcaggcacgtcatggaggtgtgaacctttgaaatatttatttaaagaacaaaaatttctgtggtccagtttctagtgcccatcactgtatcagtcagataggatgccttttgttgcagtaacaacaatccccactttcagggtcttgtaacagtgaagatctatttctcattcatgctacactgctcttgtaggtcacctgagggctcggccctatatcctcactctgataccaggctgacagagcatccaacatccagatccttgctggtcaccatggcagagagaaagatagatgtggtcaattgcacaccagctcttaaaacatctactcaaaagtgacatatcacttccacttaaatttttggccaaagtaaatcatttggtcatggccattcctaaccccaaccttcagaaaagagcaaaccctccaaaacaaggttagtactggagtgagcagccatttccttctccaggggatcttcccaactcagggatcgaacccatgtct

SEQ ID NO: 47439 - DNA, 875 bp, Bovine  19866881464285
  misc_feature (1)..(1): n is a, c, g, or t
ncccagccccaagcctggaaaccatttcttaaatattcaaacatggcctctaagctgggagattaaccaagacgcagcattcttattgcaggtaggactttcagaggccctcctggtagaaccgtaacaggatccctccaggaggggaactaatcaccctgaaagcttctgagcgtggaggggaggcaggagcagagagtctgccccacccgggccagcctcattcccgcagtgacccacgtacagggaagaaacctacctgctgcaagactgggccccagcctccccgaacgtgcagaacccagagctgaagacatgagacacaagcgatagccagacccatttcatagatggggttcatcaaatcatgctcagtaagccctccaaagcctgggatgcccagggtcctcttgcagttgtccaatccagcatggctggcctaccgtcccatctgaaggatgctccaggtgcgtgctggacaaggatggttagagagtcaggggttttgtgagtcagtagttgaactgtcggtagcttgaactcaaccagggcaatcctcctggcattttttgctcagagcacaggcatcctttggaagcccacatgcctgggttatcaccctaaaggcagaatgagataacaaagaatttgaactttagaaccccacgttgcctctatcaagcatatactctgagcaagaattgcacaatgagaaacatggggataaagggatgagctggggtgtctggacgtgagggagactgaggatttgcaagggaaacaggaccaagctctcaactatcaagctgcaggtcttttccgagtcccaggcttcctcatctgtaaacaagttccaggattcacgtcgtgggatt

SEQ ID NO: 47440 - DNA, 1796 bp, Bovine  19866881681303
  misc_feature (1)..(1): n is a, c, g, or t
ncccttgccttccctagaagcctccaagagactttgcagccgactgcctaggagatcagaggtgttgtttctccccactttggacactccccccgccttgagggttttcattccagagagggctaagtcaactctctccaggttttataagctgatagaacagggctgtcaaatgctttttatgggagaagaaacaggaagatggtttgttttgcagacagcgggttattgggtaattacatttttatagagcggttgtgggacaaatcacggggcctgctgtctcctttgatgctaaaaggcagacggccccataaagatcagaacaagggaaggtgaaaagggtcagggacagagctgccccttggggatcagcttctgcctggaagccccccaaccaggtgccccttggggaaatgacctccttctcttagaggttttggttagagtcatattcatcccaaactctactacctaaaggaaagacagaaaaaaacatgggaacccttgggcgatccctgagggaaccatcactattccttctcagtcttttatgtactcattcactcatttagtcactcattcattcattcatacacccattcattctcattcactcattcattcatctgtcatgcattctttggctcattcattctctcatccatccactcattcattcattcattcattctcttagtcatttctcattcattcattctttcatttgctcattgaggcatacaatcaagggtttggacacttacctaaggtatactcacatttttttccctccagggtccatttatttattcatcaaacagatattagttgagggcctactatgtgtcaggcactatggccctcatggtgagcatggcaattaacggtcacacctgaatcaggtgtgaaatgcccgctgtgataagcatggacagtgtacattgtggagacagggcatgtacagtagagcccattacacagtatctgaattgtcacagtgatcagaggaggcttccctggtggactgaggtctaaaagatgaggtcgtggtggtggaggtagtgggggtggtcaggagagaatattgagaatgttccagacgaaatgagataagtctgcctggctctgtggaaggagagagcatgcagctttcaagataggtaagcaccagtgcgcgaggcaacctggctcttggagaggtcccctcctggatgtactggggccaggaattccctgttcagacctcgtcttggctccattccacagacaacctccctttgcagaaacaaagcgtgctgcagggctatcattttagcccaagccagaaagtcagaggaagctgtgtggggacacgtctggtggaggctcaggctgtgtacccagcctggtggcctggagaaggcctgtctttctgccctgggaggttctaggaaaccattcattgcacttccttttcctgcgaggtttgaatccaggttgagggccgctgtttttactggtcccatctggagacaagtgtttcaaatcaagctttcttcccagctctctcttcaagatgcctgctctcttagggagggaaggctccgacccccatgctggtttcctgctgcagagacaagtaccttaataaatgtctatttatctggctggaccgcccttctgtgtgtgttggcttcctgctgagacctccagcctgagtccagaggtgtctttcttaaaggggtagaagagatgcaggtcttttcctatatatatatatatatatatatatatataaaataggtggccaaaaa

SEQ ID NO: 47441 - DNA, 1345 bp, Bovine  19866880870029
  misc_feature (1)..(1): n is a, c, g, or t
ngctttaaagaaattgctatgactcatgaattcttgtatattttaggggaaaagggaagtcacagagcccatgcagtttgaccatggtgtattagagtcagttaatgtttttcagaatttctagttctagcacagttttatagccctaaccatagacttattggcagttagagtctgaactaaggatatcatctatgggtttttactatcttattcttgaaccgcaaaaagaaaacaaaatcaacatctttcatctgctcttaatcaaaacacttctatgtctataaatacatggacaaaacagtgtttggaataccattagctggatgaaatacggttacaggagtgctctaacacaaacaaggcaaatttggcacctttaaagctcaataaattcaaaccactgtcttgtgatattaacatcttgaaaattgtgttaacttgctgtgttctgcttacagactttcaacactgaggcccccaaatgaattttcagtaggtcttatctgtcttgcactttgcatttattgctctgcattttattacctgaatctgcttccatatttacacatgcaaaacatggtagagaatcgaaatcatttttctggataatccaaaccaaattagtggcctcagctcctacatatttcagatgtagttgtatttctcttagtttgagttttaggataattattatagttctgtatttgatgtgcacaggcaaatccttagaattcagagtgtgggaaagtgctgagggcagtgatttcaaaatgaaaggaaggaatctattttaaagtgcagtaagaatttgaatttatggttataattttggcttaaagtcagaaaactttctctttttaatatttcattaacattttagtgatctagagatctaaagatctcttcaagaaaattagtgatgccagggaacatttcatcacgttcagttcagtttagttcagtcactcagtcacgtccagctcttcatgatcccatggactgcagcacgccaggcccccctgtaaatcaccaactcccagagtttacccaaactcatgtctgttgagtcggtgatgccatccaaccatctcatcctctgtcgtccccttatcctcccaccttcaatctttcccagcatcagggtcttttcaaatgagtcagctctttgcaacagatggccaaagtattgaagtttcagcttcaacatcagtccctccaatgaacgctcaagactgatttcctttaagatggacaagttggatctccttgctgtacaaaggactctcaagagtcttctccaacaccacagttcaaaagcatcaattctttggtgctaagcttt

SEQ ID NO: 47442 - DNA, 1028 bp, Bovine  19866880998399
  misc_feature (1)..(1): n is a, c, g, or t
nccctcccctttattcctccacaattcttagcaagcgttaaatatggtcagtgctcaataaatatttgttgatcagacccttaccagatgagagaaagatcaaggaaggggaaggggtgagcgagagcaagaaggtggcgtgtgaagcaggcaggctgaaacagacttcaaagactgtttcgggagaccctgcagtacagcgagtgatggacagtggagagggtgaggttgcgcgaggtccttgatgctgttgagaaggtacattgcaaaccagagctgcgagcaggctgatttcactcttcgttagtggtggcacagactgtaaaatatttatgttcatattctaaatatgtattcctggagtaaataaataatttactgttcaggttataaattatttacttagttattctaaatatatgtatatactatttgcattttgctggaagcaaaacggtagactgatggtctttaaggggtcctaaaagaaaaaataaataaatcaagacttaagctacaagaggaagtgttctattaaagagatagagagagcagaagatagccccaaatacattgccttccttgtagaaaatatcgattttatctgataaccccagtgcccaacatgaattttgtggattttgtttgaaatttttaagttgggcttctggattagaaaattcgatattacaaaaaacttttttaaaaattactttaattccttaaggcttgctgtgacttcaaagcaataggtaagatattgtcctgttcgggttgggggcaccatctaacgggctttggggccggttcattcattggaatcactctgtcaaagatttcagatccccagaaatgactcggagaaaagcttcttcttgaataaccttgctttcttcttaagcatattatctgttgattggacaaacaattcagactcattctcttggcaagcggaattctgagtcagagtcgtttggggacacatctgttcccaatatcaagcaggaatcatgccttcttgcctccca

SEQ ID NO: 47443 - DNA, 1239 bp, Bovine  19866881264155
  misc_feature (1)..(1): n is a, c, g, or t
ntattatattattactcctgggtatctttggggtgcaacataagtcgtctctggcaggaagcaaacccgaagcagacactttaacatctcttctcgttctacacttgagacggtagtgtcagacatctgaagccgcgggaagttcctggaaagtgatttctcagcgttcacagtgcgctgaagccctcacacctgcccgtaacaggcgtccctggcgctggtttgcagatcagcagcctgctctcacaaggcccctcctagggagaggctcttgaggcaacactctaactctggcatgctctggaatgcaaccagcatctccagagcgtgagtcacgttggcaggttacatttaatttataaatcaaataacatgttcgttatctccaaggtcctggaaattagcactggaaattaagttgagtttcaggccaccctctgttctgctttgaggaaaacagcagggaattggaaatgtttcgtggacacaggtaatactgtcataaaggaacgttcccccagggaaactagcgctgtacacatgttgaaaatagtaacgaggattacaaccaaactgttattcccttttcagaaaattcacagttgggcaggtaaatcatattaatggaacttagatcctgaacagcgtttgatcacatgctctttttacatagcacagcaggaggaacattctagattcggcccctgtccctcaaggctgatatactcaggacaactcagtaggaaaaagtagctcgcatgctttaaagcaggcacatctgccagtttccagttttgtctcttcaaatattgttgttgttctagacccgtaggcattgtatgtgtgtaacaggacagtatgctaaataatcttgtttgatttttccaaagttgtttcccatcagatagacagcctcttaggatttcccactttaggatgtctttgaagaccccagagcagaagtcagaggctgtttctgccccttttgcaatgctgtaagttctttgaaggaatgatggttgtatctcagagggaagaaggagaacatgggcttctcaggagaaaccagtgcaaacgtgccacaccgcccacagcaaaacccaaggggaggggagaggcctgcctgcggcagggctcagagtgggttaaaaacacactttgcgttaaatatatgttatattggatatattatattatatactatagaatatattttaaaaaatattaaatacatatttt

SEQ ID NO: 47444 - DNA, 1043 bp, Bovine  19866881723096
  misc_feature (1)..(1): n is a, c, g, or t
ntttctttattctacttggagcctgttacttggcatttgttaaactttgtgatctgtggatggatattttttgttaattttttttttttagtttttagccataaaacatgctttctgcctcatacttttatttctctcgattcctcacttccaaagcaggggctgtgggtttgatctctggtctgggagctaacaccccacggaagacagacataaggtgaatccgtgagccctgcgtaaaggtccgttctgatcacacactccctcctcccacctacccctcactcccttcccgctccacacaccacggagagtcagtttagagatcctgtcagctccccttgacaggcccaagctgcacatggaatatttccagttgactgctttcaaaggcttttggattacattaagaaatagaggttcctagaatatacaaaattcaactcggttttgaattcattagctcaaatccctatgtgttcctattgtaattcttccctccggcataaataattcctctgctttcaacaagtctttgtagcaagtctgcagctcacaagctttagatatcctctgatatcagttttaaatctcctgagccgtaaatggtccctggcagctctctgccaagcaatcgttttagcttctgacaatctgtggatagctgaagctactgatcaaaacaagaatatggggcatccttagttatcccagaaaatcctgtggggaaaatgagtgttctgtcccaaggccaccatagattagtggattttatctagctgagggtaatggtaaagagggccattcatactgaggcaaaactgtcaaaaatattttaacgcttagatttatttctctaccttagtagagtagtgtaagtaggctttctaattctgctcacaatctaagagatttattacttgcaattttctctggtactgaagtaccaagaccaatccttttctattcacacgggggcctcaaacctacgtaagaagccaggctgtgggtatatgtctttatacccacgaaggcagtctgtg

SEQ ID NO: 47445 - DNA, 2618 bp, Bovine  19866880440424
  misc_feature (1)..(1): n is a, c, g, or t
nacccttatggcagaaagtgaagaggaactaaaaagccagagtgaaaaagctggtttacaactcaacattaaaaaaatgaagatcttggctttcagtcccattaccccatgggaaatagatggggaaacaatagaaacagtgaaagactttattttcttgggatccaaaatcactgcagattgtgactgcagcaatgaaattaaaagacgcttgctccttggaagaaaaactataacaatcctagatagcaaattaaaaagtagaaacattactttgccaacaaagatccatctagtcaaagctatcatttctccagtagtcaagtatgaatgtgagagttgggccataaagaaagctgagcaccaaagtattgatgcttttgacctgtggtgttggagaagactcttgagagtccgttggactgaaaggagattgaaccagtcagtcttaaaggaaatcagtcctgaatattcattggaaggactgatgctgaagctgaagctccaatatttgaccacctgatgtgaaggactgcttcattggaaaagaccctgatgctgggaaagattgaaggcaggagaaggggactacagaggatgaaatgtttgggtggcattactgatttgatggacatgagattgagcaagctccacaagttggtgatggacagggaagcctggcgtgctacagtccatgggttgcgaagggttggacatggctgagtgactgaactgtactgagtctcatagatgatcaagtattttttatgcttctctatctggaagatagtgtgtggaattagtatcatttcttcctaaatattttcagaattcatcagtgaatacacctggacttgctacttttttttttttttggaaggttttaaatagttgatttaaaatttgatggataggtattcaagtcatctatttttcttgtgtgaacctgtctctttgaagtaattagttattgctttggtacacattttacccctttctccccaccttcacccttgtcttttcattggagacagtgtttacaatttatattcttgaaacccttagtcctgtgggctatattcctgacccttccttagatgatgcaagaggccagagaaggttaactggtaggaatttccttttcccatatgagataaagatatcatcttatctaatgtggtctcctggatagtagacctttgttacgaagaaggtcctgggcatatttctttatagttactctttgcttccccctgccaaagttaggagatgagtcttttaggatcttcaccatgagaatatagtagggtctccaaatataaaggccaaaagtaaatagggtcatctttaagactgtggcccctagaaatttctccctttcatgctagtccacacccagcctccagtaattcatcaaaattacccttttagtgttcctaccactttatgactccagtagcttttgccccatttggataagatgatctccgttctttcttcctggatgtacctgtccccacatattttggagtgacagtcttgcaacgttggctctgtgatgattctttaaaaagttgttaattttcactttgcctagctttcatttgttttaaggacaagagtgatgatctccagactctacatgttggaacaaaaaccaaagtcactcatccttcctgaacttcttggggtcttgtagaacttggtgcattttcattggcaaaactgaggggtgaagttggtaattgcagctgggagtcagagagtcagcactataagaccaaggactagttctgttcacctttacaccaggttaagagtttacttttgatacttgacagtctggcttcaatttcttatacattgattacatgacttaagatacctaggttctttaatcctaaaaattaatgctcaaacaagctcaaaaattgccaaagaggcccagtccaggaaaagtctcaatctgtgtacctctactttaaatccaggcccctcagcagccctcctgccggtcacccctcatcttggcccaggcagagctccaagggtgcctgtctctgtcactaaggctctgtcctggacctttctgagaggtggggactgatgttcaccctccatgtcatgatgaagcagagctcaaagaggccatgtggtagaggccctgaccccgctgactgtggtaaccacaaggaagtgggggctcttttcctgcccaccaagtaaagactctctcctcagcctgtgaaccttcttacccagagccttcacctgggtgtgtccctgtctctgatggtttatatccatctctttactcagttgtttgttcaacaaatattctttaagtgttgctgtatgttggccaccagaagatgagcaggtgaccaggtagacactgcccctagcctgaggaaacagtggtgccagggggctctggtcctagagacacaattgcaataaagagtgagaaagctttgcatgatgccataggaacaaatacctttgttcaggggcccaggaagacttctctgctgtattgatgtcttcagacaagttctggaggatgagaaagagtggctttgtaagaggggaaaaatgtcctatacataaataaggat

SEQ ID NO: 47446 - DNA, 1878 bp, Bovine  19866880487304
  misc_feature (1)..(1): n is a, c, g, or t
natgagagttggctagacatctgttggcaagcagaaaatgccaccataaagcatcttctgttatctcctgcagggtcaatcaaaggtttggtatcctccagagtaaatctccaggaatcctggtgtatagtaggtgctattggtgtcctctcctggctgcctgttactggatggtggatccatttcccagctccagtaggccactgatggcccccagtggtcaccttcccttgggtcaccttcacccaagacaaacccttggctgaaaaggagcctcctgcctgggagtttgttcactgctcgtctcaggcagcctgatcagtatgaacgacaaagagatacgaaatgctgggctcccatagcatcaggcaagatttctctcaccaacctccacttctcatgaaagcacaccctcaataagtcacattcacccaaagtcccaggctctgcttccggagaacttgacccaagaacctgcatgtatggcaggaataagccttcctcaggggaaggcattacagctcacttggttcttcccagacctctaatgattctctggggaagatgaagaaggactttccaccttcctgaaacacttagtagcctcctgcagactttctcacaatctgctgctgatctaagtataacgtgctgcctgaactggccccatccacttaagagccaggaggccactggctgttaaggtggacgtgacctctggcagaaacaaatctccaataatagtagcacaaagacattggaattgtcctttgggccaaaatgctccacccatacacagaggaaataatgagccaggtgacgttctgaggggcctaaaaatggatctgcgggaaggcttagaaagaaaagaaccataaaaatttttatatgccaaatctcaggatcaatggaagggattgatgtgtgggaaacccttgttccaggtcctaagtgccttgcctgaaccctctgttaaactaaaaacaaagtaaaacaaagcatggtccttccatgcctaatactccccagatgactttaaatgaatacacagagactcttttcttttttttggttctttcctgtttttgtgttttcttttaaaggagcattcttcaaactcattgtgacttgtaatgcctgaagatactttgtggggtctctctttttctgctactatgtagtttttgctcaatgaagggaaacatgcttcagcttcagtctgaggaggcttaagtagaaagtttatctgtaactcaggtatacatgatcccctagaggaaggtatggaaacccattccagtactcttgcctgaaaaatcccgtgaacagaggagcctggtgggctacagtccgtggggtcacaaagagtcagacatgactaaagcacagcagttaaacatgtagggttcctgaatgcaattctaattcaagaagcagtggtgtggccccgtaagagcctagatatatctgggactccagcaccaagcaattggccagttacacatgaagcccttagaaagtatcctcaggaagtgtgctgtataatataatccaacaataccactcttagaaatacacctgacagaaatgcaagtatatgttatcaaaagacatatgtcagagcattcctagcagcatttttggtaaaagccccaaactggaaactacccagatgttagacaacattaaactgtgacatttatatataatggtctactggacagagtcaagaatgaacaatctccacatatatattaccatttgaatgaattttaaaacaaaatgttgattgaatgaagacagatacaaataagcatacaaataggcaaaaactaatctgtagtgttacatgccaggacatggtctaaccttgaggag

SEQ ID NO: 47447 - DNA, 3909 bp, Bovine  19866880584558
  misc_feature (1)..(1): n is a, c, g, or t
ntggatgtctgcctgttgtgcttacagagaaaatataatttgggctatatttatttatttattaaataaaagtaagtcaaacaaaaagaggtccctgtttatagaaacttacagaaaagtatcagaccaagttaaggtgtgttttcattaagaaaataaaatgattaaaatatattctaagaattacatgaacaaaacctttttgactatcaataactaaccccaaacctagcttgcaaatatctaaatgccgttcatgacaacaaaactctctgattctataaaattcaaaaatgtggtactagatgtaatacagggccttcaaaatttctttttccccagatcatcagactttccctttcctctctaattcatcctaattggaccaccattagctaagaaactgatgcaaactaaggaaaagagggaacccccaaatcatgaggctgccctggaaaaatcctgtaattggaggataaactgaacttaccagcatttttgggcttccctggcagctcagctggtaaagaatctgcctgcaatgcaggagaccccagttcgatttctgagtcaggaagatcacctagagaaggaataggctccccactcctatattcttgggcttccctggaggctcagatggtaaagaatcctcctgcaatgcaggagaactgggttcaatccctgggttggaaagatccccctgtaggagggcatggcaacccactccagtattcttgcctggagaatccccatggacagaggagcctggtgggctatggtctatggagttgcaaagagtcagacacgacagagtgactaagcacacagcccaccagcagttttgttcatcacagtctggaatcatactaactcatcacgtttgaaggattcccaggcacaagcccccaacacttgcatgcgagagagaaacagaacaatgtgatctgggaccttacagccctatttaatgagcatgttgggcaactgtatctaaatacataaaacaaaaagaaccctttccccctaaagcagtaagaaaactgtaagaaatcgttgctttcaccactgggtgggcaagtcttcaaacactcgtcaatttcatacaccttttaagactacctggaaaatgacatacagcctcccagatggaaccagcttagagaatattttaaccttttcacctttcaacaaattgcttgttttcccattggaacaatatcctattgcttgccccgaagtacggtacatgactagtcaagtcaggaagtaaatgaattgttgtgctgtcaagaagatttttcccccacatacctttatatctaggaattccaaagttagaaagtgaagaaaatgcccacggctttcatttactttcatttttctgtgttctactagggtttctttgcaatgtgaaattactaggaggaggaagagtaactgcaatattcatacaagtttgtgagtggaccctgggataccccttgtcacagtccggtgagaattttgacccatggtactttctgtattttatttaagcccagtttcccaggtggctcagtggtaaagaatctgcttaaatatctgcctgccaacacaggagacataggttcaattcttgggtggggaagatcccttggagaaggaaatggcaacccaccccagtattcttgcctgggaaatcccatggacagaggaacctggcaggttacagtccatggggttgcaagagtcaaacatgacttagagactgaaccacaccaccacattatgcctgttctaggtacccagggtacatcaaaaaacagaacagggtaagaatccctgccactgtagagcttatgttctggtgagaagagagagaaaacaagcaataaatataatactcaataaattatgctatatagaaagggtggtaaatattgaaggggggggggatccaaacaagagaagagattaggagtgcagaagagtggcaggatgcaatttcaaaggcctcattttaaaaggtgatgtttcagcaaatacttgcaaatgtaggacgttcagccacatggatatctgagagaagagcattctagggagaggtttcagcccatacaaagccctaaggcaggaacatgcctgtgtgttcaaagaacagcaaggacatatgggaatttgagcttttatctgagtgagatagagtcattggagagttttgaacagagggtaacatgatatgacttacactttaaagggatcgttctgactgctttgtgaagtgtagacggttaggaaaggcaggaatgaagcatggagacccataggaggcagctgaagtatcccagtgagagatggctcaggcaagagtagtaacaggaaatggtaagaagtggttggagtcatgatatattttgaaagtaacgacaacagtcctagtgaattagatgtggatctgagagaagagaagaatcaagaaaggtttcaagatttctaaattgagcaaacttaaggatggagttgtcataacctgagatggggagggagactggaagttgtataagtttgactgagcatcaggggtagagtggagctcataggttcagtttcagatgtgctaaatggatgtatctactagacactcaagtcagggagtcaaaggcaatagtatttgaatctggagttcaggaaagaggtataatttggagataaaatgtttctaagtcttgagctaagagccccgtagatgttatatcccaagggctcagtgtatttcctcctgaggattttatatctgaagtgtttacagttgtcactgatgccattgtcactatcatgactaaacttctgctagattaaaagtactttgtaaagttttctgggcatctgggtgtccctgtgtccttggtctgcccagatgcacacagggtaccttcacattactctgaagtatggttccattagaatggattatggcatacagcccaatgctgtcatgttctgacattacaagacaaaaaggcatagtaggtattaaagcagtaccttggggttgcagaaatgtcacttcatcttttgtagttatcagttctatttttatcacccaatttacctgatccccaaaaggcaatctcagtcaacttaaagtagattcagccattttgagtttatagtcggtaaattatgaatttttcttatcttttcttctaccaggttggtttgtaagttctggagtgcatattctagatggagataagtgtctggtgaatctgtaaacatgcagagatgtacccctccctgagtgtcagagatggacacaaggtctccccgctctgtgcacagggctctgctcagctgacagcggaaagctttagaaacacctgttaactctgccagttaaagttaaaaagaaaattctaagaagaactttccattcatataaagttttaaaatattctctgtcagacctaaaattatttattaaatgaccaaacaaacacaccgtgtcttgagcacaaatctctaacgaaaggcgggaatgtagcctgtaagagatgccgcacagggtggggagccccgagtgtgtcctggtgccacgcagcccagtctgtgagcctctgtggtatgtgtcttcctgtggactcctgcagttcactcttggtgcaaatttttttctgttattaatgtgcaaagacaattgttttcctaaacctattatttataccaagtttatagaagcttaatagctagaaagtagcttctttattttctctcgtatttttggtatgactactgttcctggtacagtaaaaatcatggtgtagttcaaaggaatgagacgaggaagggtactacagagaggggtaaacctgagggatttttgaagacaaaatcatgaatatacccaatattattcagccacagaat

SEQ ID NO: 47448 - DNA, 1540 bp, Bovine  19866880596983
  misc_feature (1)..(1): n is a, c, g, or t
ntagttctcacctgtgagaacaaagcagaataatgcctagactatttcaaaggaaaaccacctttatttcctctatttatttttagttgttcaaaaggcacacctggggatttccaaggggatatggtgagagccaagtgactattaatgtgtttcctgagactatgtggaagtaagacccactgcctgcctctgcctagatcatcaggaaattgcatcctctctccctgggtttaggaggctgggttagggtgagggccaggttctgggagtaggatagctttggagtgtgtttcaactctttttcagcttctagtctttgcgtaagaggacaatgccaatacaagggaagaaaagcaaagaatgagggatcccaggaaggcacccccagcgtgagtgagcatgggagtgtgtctgcagatcacgctggttgggtctgcagttgttgcccaactcgggctcatgtggagaactgatgccctgcccgtgaatcgtgggaattttaggcacagttagcaatgcagccttttctctgctccattgttccctcccagactccccactcctggaactttgggctttttttttcttttctttgccgtctttggactgaagggcaaactccctcccaggcagctaggagacattttttcccttgagtaataactgtgttggacatgactaaatttgttcaagtctgtaatgggagcaacgtccccagatggcctcaaggctgtgaagagatgaagggaagcatgcacccacatatgttagaatggtctgtgtctttatcacgggaaacttccaccgtagagaggaaccctgcacataggcagcccttcagcccagagtcagcgtgtcgaggtggttcacagtgtccttggatggaatgaggaaccgctgggcctctgccaacatacctttccctttcctcggctccttcctttggctgagcctgggcttgtccctgactgcttcctttgttccatttcttctttctcatcttccctcaggcctctgtgtctggaacaagctcttccttgcagtctgccaatccggcaggctcctttactgacctgctctcagtgctttatctctaaaacactgcgttagctgcttctctccactaaggtcagggatgtggagaaagaaggaggttcagggcaagcttcaaattaggagacaatgaaaataataatgtctttgtctttggatccactcactttcatatcattttactgttatttacgtgagttgtttcttttaaactaataccaagactgttgttgccgactaaaatctagaaagtttacataaaataatcttttttttttttttttctctttttatgttttaaaaatacaccaggacttcccaggtggtccagtggttaagaatgcctaccagtgctgggggcattgattcaatccctggttgggaaggttccccatgccatggggcaactaaatccatgtgccataactgctaatgccctctcactctagacctcctcaacaagagaagccaatgcaataagaca

SEQ ID NO: 47449 - DNA, 1732 bp, Bovine  19866880951067
  misc_feature (1)..(1): n is a, c, g, or t
ngaaaaccaacccactactggaaaactaacccactgggccaccagagaattccttgtgaagctattttaatatagttcattaaaaataaataaactggagaataaacatgtcctttaaaaggagcacacatttacactggaaggtttggggtgattgtgttaggctgtggtttatgggtcagctggggaagttttgattcacctgctttagactgtttggaatcctggctgtgagaccccatttacccaggtgatactcttctcctgatatcaggattgcaagaagccaactaaacaaacatgtctgaagcctttgttcatcttatatctgccaatatcctatcaataaaatcaagccatatagtaaagcccaaagtcaaccaatgccaaccatgagacgatggcaatagtgtaggtgtctaatcctaccacaagggagagaaagagaaccacagtgatatgaactgaactgaagtcgctcagtcgtgtccaactctttgtgaccccatggactgtagcctaccaggctcctccatccatggggttttccaggcaagagtactggagcgggttgccatttccttctccagggaatcttcccaacccagggatcgaacccaggtcttccatactgcaggcagaccctttaccatctgagccaccagggagactggtgatacagttgactgcaaaatacatcagaccaggaataccgatgacagtcttcaacaaaaagaaccaatctgaagagctaacattataagatatcaagatgtattacaaaaatatcaaaatagcatcatgttggcatgaagacaaataaatattccacttcaatataaggaagattccagaaacagacttacttattatagcagagaagataccagagggccttggtgtgaagacttaccacataaaattgatgattacaggaggattatagatctaaatataaacagtaaattaataaggcttccagaagataccatattcaaacatctttataatttttggtaaataaaagatttattaaataagacaccagaagcatagaacatgaaggttgagagttgtgagaatgtggtattgtggagtcacatttgcatgttaaaattaaatatgacaaatttttaaaatcaaaattttagttgtattgacttatttgctccaattttctgtttataatatttaaaagtgtgaatcttattatctgaggttcagaggataaatatatgctgtacagccatgagtatggcatgttaacttggtataattcttagtgaattcaagaagggtttaattctgtcttgaaaaataaactaataagtgaaaaattaggggaagtttcagtatatgatgtatgtttagtaaatggtagataacttttagttgttcaagaaatagccttgggtgctaccatgtaacagaattctcaactagaacgcctactgctttgaacctattttgacatttcccatgttctgagaaatgctgatgttaacaaatttctgtaatttcttcatttctttagataatgccattttattattcctttagaaacaacttcctatttcacttgaaaaaccacaatgaaatgttttatgagtgtcgtgaggtccccatagcaaaagactcacattgctaatgcttctttgttcagaaggaaccagactgccaaatttcagagaattacagtatttgatttctagattagcaaggaatgaaattg

SEQ ID NO: 47450 - DNA, 586 bp, Bovine  19866881223217
  misc_feature (1)..(1): n is a, c, g, or t
ntagtgatatagttactgaatagtatgattttagggggcaaaaaaaaaaaaacatttagctcagtccttagtggtactcatacagacagagagcgttttgcctcttctaattagagtgtacttgcattccccatggtaaggggttgccctttgaacactgacctttatataccacacaaaactacaagcagattcatctgaatgtctcatttatttcactggaggtccctgaatgtggtagttacataaaaaaaaaagtctgaaatctcaaagtattttgcaaagtcaaaaatccatgacaacctaaggaaaacttagcatctaggtcaaaggaagacaaagtagcattttcataggcaacaaaaaattaactatagcctctacccaacaagtgtgtgtcactgtggtgaaggagagccaaacgtgaaacaaatcaaatttgcaatcatcgaaaacacatgacttattagtgagtgactctaaggaaaccattagacaagaaattaaaggcttgtaaggtaatgccaaccacatgtttagaactattggtgacgactagtcatccaagtctcaatggacatgagtt

SEQ ID NO: 47451 - DNA, 1474 bp, Bovine  19866881236176
  misc_feature (1)..(1): n is a, c, g, or t
nattttattcaaattctatggctttattcaataaagtcactggaagtgattcactatgaaagtggaaatcttggtttgaaatttgtgctgtgtatgtgaggacagtggaaagaggtgactgggtatttagggaccagatccttaactgctgtttctccatgcttgctccatcatttacctcatggatcaaaaatttttaagtcaccaaactagtattttagagcaaattcaataggacctgccttaaagatgaatagtctatggccatgttgcattttatacttacatgtcatgagatgcttttcagagttttattatataaatatcttgattgtggcaagtaatttgtctgatagaatttagaagagatgattaaaggtgtaattacatctctgagagaagctcttagtactagaattacagatgatttattttcccatattaatctcctgagtcaaattttccctataattgtcatagttaagttgtgaatgtctaactagcatctcaaaaataacatacagatagacagactctgatttccccacaggacctgctctactctgtatttctcttatcagttacaacaaaatgatctattcaatatctcaggccacaaactcaggggtattgctagatttctctatctgcttctctacctacttcctatctacatacatcctgttgcctctgcctccaaaagtctgatctgaccacttcatactctcctggatgtcaccctctgtcccaggaaacctgaaataattttctatttgatctccctatttccagtattacttccctaccatccattgttcatgtggccacctagagtgatggtttctaacatccaggtcacatccaaatcagattgcatcacttccctgcttgaaaactgccaatgcagcccattgacattagaatacagtacacattttttactcctgcgttgacaaccttattgtatggtccttggctgaatttttcattttattttggccacacctcatgatgtgtggagtttcagttcgctgatcatggatcaaacccacacaccttgcagtggaagtgtggagtcttaaccactggactgccagggaagttcctaaatacttggtctcatatttctcttccctttgtttgctatgctcattatacattgaccattttagtcctcaagatctctaactgtgtttctgatttcagagtctcatgctggctcttctgctgcctgggacaccctccctccagatcttcctatgctttgcccctttgaatatgtcaggtctagtcttctttcaaaaggccttccctgaccacctcatagtttacccaagtaactctctactccattaccctattctctttgctttattacacttagctctctctgaaactattgtaccaaattttagttctttattgttcatgtcccatgagtaaaatgaagcttcttaagaacaaaaacacttat

SEQ ID NO: 47452 - DNA, 1573 bp, Bovine  19866881500689
  misc_feature (1)..(1): n is a, c, g, or t
nttgccagccactttatagagaggcaaaagagaggttattatttactaagtacagagtttcagctttacaagattaaaagttccagagataaatagtggtgatggttgcacaaaaatgcaatgtaatatcactaacctgaacacttaacaatagttaaaattggtatttccctggtggtccagtggttaaaaatgtgaaaaagtagtagtggtcaactgtccaatatagagagttcaggtacaaaaatagaacacatctctgtagggttggcaatttgggtgacataatgtttgcagtttaagtggaacaatggaaggatacatccacagaataaatagaagatgaaaagaaatgagaataggcatctctagtgagaatttggcaaagatgttaaaagacagtttctccatggtaaatttattccagaaacttgggtgtactgttacgtctacaatgtactttctttctttagctgcagagttagccaacttgcaaagtaacagatttcaaagggtggcttaggcaatttatatctttttcatattttactgttaaaataatctctttatattaacactgggttttccatgttgctctgatggtaaagaatctgcctgcaatgcagaagacctgggttcgatccctgggtaaggaagatcccttggagaatggaataactactcacttcagtattcttgcctagagaattccatggacagaggagcctggtgggctacagtccatggggtcacaaagagtcgacataccaacaccattgcccataaaaacaatgactttttattaggtttacaaaatatatcttttttaaattttcaaatagtcttgaaatgcaggcattattaccttctttgacagatttttaaaaaattaagttgagtaattgcatggtcacaaagcaagtgcttgaatgactgcttgtgtaatttgaagctaatattcctgaacttgagagtgtagctacagagtgatgatccttagatgtgcctgctcacgagggtgcagagacatgagacaatgtcacttatcatgtgatggcccacccactcaccttgcacaagtcggttctaggtaggtaaacactccagggacaggagacgtgccctgcaagtactaaggcaccctagaaaacagaaaggaagatggacgggcaaagaaacccactgaatctgacacaaacatattcctccctggctttaaaaaaataaaagaagctgtgagagaccaaaaatatgacctttattctccaaggagcatggtggtagagttactttgagtctcccagttaccgtgagaaaatcatggctggcaggaccccctgatagaacagaactgactctttgtgtgagatttaaaacatttttaatttgaaagcaaacctaattgcacatactacttatacacacaccatgtggaaataataaatgcacttatgatggaaatgtttgcttcatttattatgctaggagtttttccaagaaatggaaacaattgttagaagtgacattaaatattcaactgagtttctttttcttagtatttttagaattcata

SEQ ID NO: 47453 - DNA, 1873 bp, Bovine  19866881514782
  misc_feature (1)..(1): n is a, c, g, or t
nattcctttattaccgattttaaaaaggaaattctaaatgaaatgagttgtcaacaatgcaaacttaaatacagatatgtgaacagtccttgacatttggcaattaaagaatatgagctaatactgataaataactttaaacaaagctctaaaatttattgagattttctttttaaaaaatttgagagaatagcattgaaacacatatattaccatatgagaaatagatcgccggtccaggtttgatgcatgagacagggtgctcagagacggtgcactgggacgaccctgagggatgggatggggaggaaagtaggaggggggttcaggatggggaacatatgtacacccatggctgattcatgtcaatatatggcaaaaaccactacaatattgtaaagtaattagcctccaattaaaataaataaatttaaaaaattaactgttgaatcaaaaaaaaaatgatatagaagaaagaaaagggatttgaatcccttaatcagtggtaaaagaactggatataaatatttgaaattagagatataaaatttattgtcttatggaaccagattatttcatagaagagagaaatattcttttgtcggtttgatatttataaattatactgtttcttacattcttgcatcagcttgtggatcaaggatgagaatcatagttatatatagaattgtctgggtactttaaaaaattatcatgagttttggctccacactagaacaaaaaaaaaattagatttgggggagtgaggcttagacagtgatattttctaaaagctctttcattgactcccatgtacaacccagggtggagaattactgatttaggcagttttgaaaaccccaatgtcctagagaggagaccaacctcagcattgatgaggatatccttgaatactcttaggaagcaggcgattattttggggagctttactcttgggcataagttctcttgattgtatgagaggaaaaaaagaccagatcaggataagctgacaaagcacaatgtcctagaacattaggtcagagtgcagtgtgaaacccagctttacagggaagcagggttagtaacagcaaaaccaagagttagctgttgtaatacttaagccggagcttcctacttcaggaacagaattaaccactctggggactcagaagcacaagtccgtctgtgatcagtgcaactcagttacaagtttcactggatttagggttgatactgctgccaaaccttaattatcagttatgcagtgatcattaatttttaacccacaatagtttggaaattgcaatgcattttatcatcagtgagtacacttaatgtagtattcttttccattattgctaaattgatggtctgtcttaaaatttctgacatcttagatttagggaaatatggtgtttccagggttatcccgaactgggcttgtgggtgagacacggtattaagagttagctgtgagaatttagggactttgaaaggaaaaagagaccagaactgaaatgacagatcataacaaaatcaagatattgaacaaggacggcttctggttcttaaaagcttgtgctctagtatgagaaacaggctgagataagtgatgtaccctgagaatattgtcccccaggtacaaagcggtttgttcatgagaccactttttcagctgcttacgccctctgttggtggtaggcagagtggatacatttctgccttggtacagttttgcttttatctttccaagtctgtaagtgggaaggtgggaagttgtggagtgtcactgccaagttctgtggaaaacactgtatgctttaaaaactgtaaaggatcaagatcgaaaaggactagggaagggctaatg

SEQ ID NO: 47454 - DNA, 3990 bp, Bovine  19866880350466
  misc_feature (1)..(1): n is a, c, g, or t
ntgatgtttctctatcctgtatttttctacataatccaaggtgactaaggaggacattatggaaaacaatacagcaaaactctcaaaacatgtaggcccttaaaatccagtctattcccaaggcaccaaggatcaacggggtgcaaagttcccctttgggaaaggtgactttttgtaatacttataaactaatggaattttattttgcagcttcgtatatcttatttggtgctgtcagtatacttaattacctacttttacacttgtcttctaagatggcaacaatatacaagctaaatagagtaccaggtatttctatttcaaagttgtgcaaaactgccacaatcttgctcaaggtgtctaagtatccacatggtagcaaatgggctgcattaagctgtatatatccacattgcatgtgaagaagaaatgaaatttatgcccagttatgaacagaaatgttacaaagaatatcatatactgagaataacctgcaaggttctttaaatagtatcccttagtggtttcaataaaatgtcactaaccacttatccctaagcctcaagttctcttcataagaatgctgtagaactgcattagtactttatattgattataaattaagccaaatttctatctaaatacacaagtatgtgcttcaagcactaatttgtggcaaacacacaaaacataattctcttaagaattattgtccttacgataatgcacttttaaagctttcatttcatagtttggtaattaagatccacatgaaacacaatgctttgctgaacatagaaaacgtatctgcattatgattatgtaacccggcctttgctggcaacttgaaacttaaaaaacagccatctgtagttcaaccagctccaaacaaggtttttcaagtggtaattattttgcagcatttataggtctatatatcagtctgaattgcaacttttaattccattgtctgatgtgagtggttgttatttgtttcttttagtgcactgccaaaatataaatcaacactgggttttattccactgttaccatgttcttcggcaatatggttcaactgtggaacttctgaacatgaagcagtttgggtaagcacagaaatgctacactgatggggggaattttccagtcggtcattttctacctcaggaagaatgttaacagtagcaaagcgggcgtgataatcagtggaaccatgactacaagaagttttcatgctttctaggtcagaacaactaaactcagaaaagtgactagagtgggaatctgctacggacggcatactgtcactgagggacggagcctcaaattcacttgagttcgtgctttgttgttctaacaactgtgcatccatgtcctctcgggtctcgtttatcttcatgttactctttttcctcaatttaccactttttgatttctttcctgctgttgcttctttggaccacttggtggcgctggatttaccttcaggcaagccaccggacgagcccccaggatggcttcgggtggcactgccatcctccacactgctgcttccactgttgtgcctgaacttggatggctttgattcaatatctacctgaacctccatactgttgccttctctggaacagaagtgaaacaaatataaatttttgacttcctctttttttattttttattaaatacaaatgtatcaaagggggagagtttctgggtgaaatgttaaaagactgtataaaagcatcagaacaaattaatgcaggatacattctactaatggaaaaaagctgcttgaaataagagaactgtctttataacaatgcttcaaataggggaaaaaagaaaaaaccaaaagcaaccatgctcacttcttacactgttccaggtactacgctaccttctccattttttttccagaacagttgtattgagagagaatttgcatatcataaatccacctgtttaaagtacacaattcagtggtttgtagtatattcacagttgtccagtcatcaccatgaccgaactcaagaacattttcattgtccgccaaagaagccctgtaccattagcagccagttcccattctccctgcccctcaaccccgagcaaccactaatctcctttctgtctctatggatctgcctgttttggacatctctcactacttacatttttcagagaacctaacagaagagataacaattatttaccataattctgcttaatgatagggatacaaattaatctaaaaatgcttttgactttacaacaactttttccttacttgtccagtgggatataggaattcagaatggatcctgccattgccttggtgctggcattatcactaactgtccccaagctgactgtgccggactctccacttaggctgtaccgttctttctgtacatctgcttgtacttccaaccttaaagagaggggtatcagaaaaagacaaaaattatacatagtatcagcactactatgagaatgcttatcttcaagtaactgagtaacaagaagctaatttagagacaactataaacattatttttttcagcttccttttatttgattattcaaattctactgcagtatactgaagagtaccagttatctgaataaaatgggaaaattagctgtctgccaggtaaggtagttacagagtaacacaaatagaatagaaaggattttagaatggatgcttaaacatgctccatcattctcacttagggtgtggcactctgcttccctgctgctgctgttgctaagtcacttcagtcgtgtccgactctgtgcgacccaagacagcagcccaccaggctcacccgtccctgggattctccagggaagaacactggagtgggttgccatttccttctccaatgcgttaaagtgaaaagtgaaagtgaagtcactcaattgtgtccgactcctagcgaccccacggactgcagcctaccagcaaaacaccaaatctgaatacattagaacccattctaagatcaatgaatcaaaaaattctggggatctgtatattaaaaatggttctaaatttaacacctgactcttaaaaaaataataatatacaccactgtaacttaagagtttgtgtttaaaagcacaatacctaaaaataactataactgatttatcttttaattcatgtattttcccctacatttaaaaaacccctaaagctaataaaagtgaattaaagaggaaataagagaagataaaaatgcttaacttatcctacctattatctacatagcttttggtaaaagactttgtgagaattaaataaccattaatacagaaaagggcccaggcagactcttggactcagcctgtgcactcccgacatcctgacaccacctgtcccctcaggcttcagccagtgtctcatttcccaacatccagctgtggctgcctcccaagagatgtaagtacaggcttaatcactgcctttacagtgttcaccagagaaggtccagcactgactcataaaatctgacaagtgtagtgaacaaaaaaatggcataatgttatccctaagatttggtttttacctcatcagatctcctcattcactgttcaccactaaatttcattttctgaaaccttaaaacttacttgaaaccttattgttttcaaccctgacacagtaggattatatgtaatcatcgtgctttgtgttcaaaattctcatctaattagtttacagttaaagcaaaacaatgcagttttcttacctgttgaaacagtttaccatggcacttcctgacagactccctgtgatactggctccggcgagcgccatggtgctggccgtctcacttaggttgtcccggatggctcctattcgaatccatgtggctcccgcttgcactcaaactgccagtcaaaccaccaacacttccctcccctatgctggggttgtgtcttgcttctgctactgaaagttgtgtctaaatgcaaatattt

SEQ ID NO: 47455 - DNA, 2122 bp, Bovine  19866880371199
  misc_feature (1)..(1): n is a, c, g, or t
ntgtgaatcttaaaggtggatttttatcaatttagttaataatctgaccaatgaaggaattccttctttaaactgaaatactctaataaaggatgcttactctgttgtacacttggacagggctagccattagtgattcctcttaatagcttcctcccactagttttagctttatcttgtacaataacacaaaataagtttacttctcttctgtataaaggctgagtctagttgaaaataaggtagtacaagtaccataaaaactatgtaagtgagaacatgactgctacaaatagagtatatctgacactggtattcgagaggctgcactgtgatgagttcgaagctccaagagattagcacccacaattatgtcacaacatgcaggaccaataacagggtatcatttagattaaagccacaatgaccatcatcataggtatcaactagtgattgctgttattcttctttctaaacttcttttcatattcttctgatcatcttgggacagaacaatggaaacagcacaaaacaagatcttaagagtctggttcatcatgcacagttgacaggtttttttggtaagttacaattttactttattcaccgacactgttaaccacagacctttcagcctttcctggcattagtgtcttttccaatcctaggaaaatgactttgtaaagggccagtctgtttgccatccaaactttttttatatgataaaaaatgtttatcttctgaataggagaagacattttcaatgggaatttataacaatacaaaaatttgaagaaaactctagcaagttcaaagataagattagaactctgagaagttcaggagaggttaatttttttttttttttggctcacttctctatttattaaataaccacatgtggagaggcacaaagcacttaagttttatatgactacaaagttatcacaaatcccaaacttcttagccacagatatttcacttactctgtttaaaaaaaaggcttttaaaacatctgagttagcttgatacacagagaccctgaactacatatttttaaatgcttgtacttcctgctctaataatgtcttcattttgacttacatgaaatttactgactacatctgattcaaaatgctctcatacttaaaggtgttagatatacaggtatcccccactttttgaaagttcactttatgccacctcacttttaagaaacatctactatactacctgtatttgctaattaaaagaaatcccaagaggatttttgcttttataggaagaaaggcataaagcaaaacagtgttcagcatttgtcttgcagcaagactggccccgcccagctccttccccaggaacctcacagcatctcggtgtccagctgcccagccctgaacggtgcttgaagcacctgtgttttatctcagtttcttttgtgcgtctgttagtaagatgagtcctaaggttcttcactttatgccatctcgacttaaggaaaagttccctaggaacattctacttttggatagtgggggtgggggtggggacctataaaatgagacttcagtcgcgccttctctaagagctcatgaagttctgacactctgaactgtctattgtgacttgatccaatgaaatatttcccactatctaggaaatgtgtgattctagtatgatggtctgtgtgtacaatgtttaatttttttgtacactgcgtctacaccgtctctgtcagcccatacctaacataaaaaggaactaaattaaacttaggttaaatggtgtagggaaatatttttcatcaacttgatttataggcccttaagaagttatgctatgttttagggaattataagggaacaggaaaatactaaatacattcaaagtcttgctttatctcctgttctagaaaaggctaatcatcacatagctatgccacaatgccatgtactagccaacacctttaagcttccccctcactttaagttgacgtaattcatataccataaaattcatctttctaaagtacatgatttagtgttatttagaaaattcacaaagctgcagaaccacctccactatctaatgtcatcttgcctctataaatgaaccctgtgcc

SEQ ID NO: 47456 - DNA, 2608 bp, Bovine  19866880422604
  misc_feature (1)..(1): n is a, c, g, or t
ntgcccagttattatcgcaaaaagaatttatttttaaaccatagatgagtctgaatttcataatcatcagtctgagtaactgccacaaggaaacatgcatcagctgcataaatgtgagctgatgcagagtggaaaactgaatggatagcagtgctttatatttctaccacatgttatgtttccatgttctcccaaattatcgcattcgcatgttacaataacttgttgagacaggcagaattgatatttttatttccattttataggcttagttcatcaaatacttattgattcctttttatatacctggccctacactgggtcctggtgatactgagagaaaggtaatacaatttctatcctcaatttgctcacagtctggcaggagacatgaatataacaactaactaaattatgtgtggtgaacattatgcaagtgatgggaacaaaatgttataggtgccaagaggaaggagtggaactgggggtggggcaaagcaaatatcactgactgactacaaagtgccaggttctgagctggggccttcctactccatgtgtggtctgtggaccatcggaggctacatctcctgggcccttgttagaaatgcataatcctaggccctactccagacccactgattcagaatctgcattttatcaagatgttcaggacatatctctgcctgctaaaggttgaggagcatgggcctaggtgacttacagattttatttaatagacagccagtgaatttatttctattagccctatattatagataggagttggagttacaaaattctaagtcacacagctatgtcatggagctggaattcgaactaggcagatgggctgggcttctgtcattaccctgatgttatttactctctaggggtatcagaaagacctcacagatgatgtctgagctagatttggaaggtcctcgatggaaggaaggagggccttccagtcaaaacgcctcttgagtgaattctcggtatggcaatggaataagtcccatagtgggcagtgtggcaagtatggtgaacaaagaagattgaaatcaaattacacagtttgaatgtcaccctaaggaacttgagtctatcccatgagtcggtttggcaaactgctgtggaactgtgattatgtggagatggctatgtcggaagtccagcctcaccagtcactagctctgtgattccaagcagcgttgctggtggggttctctggaggcagatactgagatgcacttgggagaatggttattagaaatcaaggtttgggagaaagaagaagaaaacagggttgggcagaggaggaaaataagatcagcccctgaaagtcttggccagcctgacagggagctccagagtgaggatattggccagtccaggttgtggcaggtcagggtgaaacagccaggcctttacctccaccccgccccggcgtcagaggccaggccagacatgagctcaggtgatgtgggtctctgtggctggagcagaccccgaaggaggcagtcgtctgcagacagcggggcagcaagtcctcccttggggggactctgagcagggcactctcggggtctgccacaaagttttcttacttctttgtctctgtcttctcattggcaaaatggaaatattatagtagatcacccatggggcaattatatgcctggcatgtaactcccaggctgctagggttatctgctcttttggttatctaccctgacaagatagggtcttgtcactgtttctcccttgcagcacttaaaatttgaaaatatcttaccgcggcctgaggaatagaagacgatcctgtccaattcccagtttgcctgaagttccgccattttctcatgatgttccaggcctcgtcatttgtccggagatcctggttgagttaagctgtgctaggcaaaaggcgagatttgagaaatgtaaagtaaatcaatggtttgaaaatacctaagttgaatcataaaggagggaatacaggctgcattttaggggtatagaccaggcttctgtaccatgaagactcaaaataagactcaaacaggagagtttccttcttcctcatgtaagagtctaaaaatgagtggtcaaaggccatgtaagtgacactattccataaggccacttgggaactgagatcccttttgatcttgttgctctactatcccccaagacagtggttcttaaagtgtagtccctagactagcagcatcagaatcacctgggaactttattagaaacccatatggtagggcccagaaatctgttttaccaagctcttcaggtgattctgttgcttcagttgctcagtcatgtccaactctttgtgaccccatggactgcagcacaccaggcttccctgtccttcaccatctccccgagtttgctcaaactcatgtacattgagttggtaatacattcaactatctcatctctgtcgtgcccttctcctcctgccttccatctttcccagcatcagggtatttttcaatgagtcagctgttcatgtcaggtggccaaagtattggagcttccacttcagcatcagttcttccaagaatattcagggttattttcatttagg

SEQ ID NO: 47457 - DNA, 3461 bp, Bovine  19866880429879
  misc_feature (1)..(1): n is a, c, g, or t
nttttatcacagacctgaagaaaccatgttttgctccttaaatagtcttttaacaaaaatgttccttgagcattcagtatacagttgacccttgcacaacatgattttgaactatacagttccacttatatgcagatatttttcagtagtaaacgttacagtactcctggatctgtggctggttgaatccacagatgcagaactgcgtatatggaggagccatggatacagggatctgctataagttatacagagaatttcaactttatggtgcccctaacctctgtgttgttcaagggtcagctgtatttggttggcagatacattcagcaagtggctagggatattcctagcaataaattgacccaaaatatagagggaagagccttcctcatcttgtccctatccctattcccaactctaaagaagctgtattttaaatctgtgtggctttcagacttcagtgtgcatgaaactcactgtaacatttgctagcaatgcagattcctgggctcactctctgagagtttgattctgtagttcttggacagaacccaggaatccccctctttaatggacatcctagttgtccgtgtgataaactgttagggtagcaagagaagagttttaaaaggcaaaagctcccttattaactagagacagtaacaaatctgcctgcaacgcgggagacctgagtttgatccctgggttgggaagatcctctggagaagggcatggcaacccactccagtgttcttgcctggagaattccatggacagaggagcctggtgggctacagaccatgaggttgcaaagattcggacacaactgagcgactgacacacacacttgtagcagaggaaacccagacatacatctacgtatcttctttcctagagggaaaggagaatctgtaagaaattatctgggaggatgaaccttcatcatctgtttgccttgggactcagaaactccaaggactgtgacctgggttagcagattggaagcattagacttccactttactatcgtcccagaaagtatattcaaagtggaaactaccattcctaattctttaaagagttaagcattgtatagaggggagagcatcaggagaaagacttcagagatcccacttgttttctaaagcagtgggtttggacacctttttttttttaagcatcagaaccctatagtttcctctgttcccatactccccaataccctatattagtcaagaagtttgtatttgttttccattcattgcctttttttaattccattcgttttctgccttttgattttaagtaagccactccagtactcttgcctagaaaatcctatggatggaggagcctggtaggctgcagtccatggggtcgctaagagtcagacacgactgagcgacttcactttcccttttcactttcatgcattggagaaggaaatggcaacccactccagtgttcttgcctggagaatcccaaggacaggggagcctggtaggctgccatctatagggttgcacagagtcggacacgactgaagtgacttagcagcagcagcaagcattttctgtgattccattttctccttatcagttatacatctttttaaagttgtctagttagttgccctagaatttgcagtatacatttacagctaataaaagtctacattcaaataatattctgctgcttcatgactgcttcatgggtaatgcaagtataataccttttaacagaattttgcaattccctccctcctatctcttatcgtattgctgtcagttaatttcacttatctataagctataattgctgaatgtattgttgatgttattatttttaacaactgttttctcctaggtcaactcataataaggaaataaaaggtattatttttccttcatttattcccctaatacgctttcattctttgtgtagatctgagtttctgacctataccatttcccttctctctgaagaacttcttttaatatttcttttaaggaaggtctattgtttgccttaaaatatctttatttctcctttaattttgaagggtagtttcactggatacaaaattctaagtatttctttttctctttcaacctttcaaacacttcactctctttttgcgtggtttctaaagagaaggcaagtgcaattcttttcttgactctcagattccttcaagattttctcttcatctttgactttctgcagttcaaacatgataggtgtagatttttgtataaatgtcctgctgtaatcgccgagctttttggatcagtagttttgtgtctttcattaatttttgaaaattccatcattattacttcaagtgttctgttccttttctccctgctatttcattatgtacatgtcacatcttttgtaatagtcccatagttcttggatattcttttctttttcattgttttttttcctctttgcatttcagttttggaattttctgttaacttctctttaagcccactgattctttcctctgctgtatttagtctattgataaactcatccaagacattcttcatttttgtttcagtgctttcagttagttactagcattttcttttgattctttgtttggatttctgtctctctgcttatgttactcagatgttcttgcatgttgtacacttctttctattaaaatctcttaacacatgaatcatagtgattttaagtttttggtctgatcattctgaagtctctgtcatactgattatgatttgatgcttgctttttgtctcttcagatatgtttttatgccttttaacatgctttgtagtattttttgaaagtaagatatgaggcatcaggtaaaaggaagtgaggtttatggacctttagtgtgtgagattttgtatttatctgactaggagttaggctgtatttaatgtttgctgtatctgtggtgccagtgactgaaatttcctctatgtctttgttattttcttcctgtgcttttgggttttcttagagatctcttaatagggtctgaggcttgcagttcttttatctgtaatccccgacattatacaggagtgctgttgatgtggtgatagaatgtgggaggaggagggtgttgtatagtcccatgattagatctctttcctttagtgagcctggttgggtatttcccccctcccatgtcagttaggctttggtgaaaaccacagcctgttaggctgtcgcagaatagtttctgttgagggcaggcattgttaggaagaatggatatattgcaaaattgtcactctgtccttccccctaggagaagcaggagaggggagttttctccgatggaaatttttatattataaatacttgcatgttcatttttggcctaccctgaaagcatctcacagcatgagttagtctcaacttatgccactagagtcggtttccttatattagtgctcaggaagaat

SEQ ID NO: 47458 - DNA, 872 bp, Bovine  19866880444534
  misc_feature (1)..(1): n is a, c, g, or t
ntattgatggagactttaactactcccaagaggctttggaaagtggctttgacccaaatatttcgtgacagcaggggcaggaacagggccttcacctcgccagcagccagagggaatgtagacatctgccagttgttacataaatttggtgctgatctcctggccactgattatccagggaaacacggctcttcatctctgtggccatgtggatactattcaattcttggtttccaatggactcaaaattgatatttggtaagttctgtggtttttgaagtctcgtcacttcctccccattagcctctcagccagtggtctaatcttggaatctattgattttgtttcctcattgatcaagtgtagtgacaagctcagaaaggtatgaggacaacgagtgagggaacaagagcctgacttctagatttgtgctgaagcagtgtaaagttttctatgaaaatagtggctaagttctgctactaaataattatgtattataagacggaaaaagaagaactaacatttgttgaaaatctgttatgacctgggcactgcgtttactgtgttagctcatttaatcttcagaatgaatagctcttaagtatttgttttatagatgaaatagttgagacaagaattctgggttaaatgacttaacacagttggaatttaaaactagttccacctggttccaaagcttgtttaccttctatcgtgtaatataccagactagcttcattatctctctggactcatgaagtataagagtccttcttatactgaacaatttgaagaagtagtgttttttgttttgttttagtgataccttgtctcttgagtgggaacaatatcaggtcactttaaaaataaac

SEQ ID NO: 47459 - DNA, 1559 bp, Bovine  19866880447288
  misc_feature (1)..(1): n is a, c, g, or t
nactgcagcacgccggcctccctgtcctcaccaacttccggagctgactcaactcatgtccattgagttggtgatgccatccaaccatctcatcctccattgtccccttctcctcccaccttcaatctttcccagcatcagggtcttttcaaatgggtcacttctttgcatcaggtggccaaagtattggagtttcagcttcaacatcagtccttccaatgaacattcaggactgatttcctttaggatggactggttggatctccttgcagtccaagggactctcaagagtcttctctaacaccacagttcaaaaacatcagttcttcagtgctcagctttctttacagtccaactctatgaagaggttactgtacgcttacacaggcagcacgttgtactgagaataccatatgcatatctccacttattcctgagcataactccgtgagacagttattcacatctccccctttcacatacatgaagacactggaggtgggcagcaactccttaagactctgcagttagacagagggagagcagggtcttgaacttaaacccaggtctgacgcctgatatcacgcacttaccctcccgctctactgagaaaataacatgcacagctgacaataaccctcagaagaaatgagtgcaggcttcccctacctggcatgcccggctggggatggcaacaggaatctcccacttggtctgggggcgtctctgctgcaggccgccaagcccgcacttgtgtggaggtgggcacagcaggaatgggcggcagcttctcccgccagtttgggccatccagagcgatcaaaatctttgttatcctaaaaagaaaatcagttttctctgtcgatcatgcagtttgcttttttatattactgaagggtacatcaaggtaaaacttacaaatgctacacagctcacggggtcacagagagttggacacgacttggcgactgaacaacaacatgcatttgtatacttccctgtagaaaacacagcaacttgagctatatgctgtccacataaactgtctttgaaaggacttttaaaagttgctccaaactatgtaactttagatcttttttgtatcaaaagaagtactttagaatggctatgcccaaactgtatactaaaaataggcacacaggactggctgctgaaactgatgagggcgtgtacgtgtgtgcttagttgctcagtcatgtctgactctttgcaacgccacagactgtagcccaccaggctcctctgtccatgagatttcccaggcaagagtgggttgccattcccctctccaggggatcttcccaacccaggaatcgaacctgtgtctcctgcactggcaggattctttaccacgcagccacctgggaagcccaaaactgatgaggagtggctgtcaaatggaatagtgcttcttcttgaaacattaacgaacggttgatactcttacctgcattgtttcatctctaaaacgatccactcattgtgtttttcatatgcataaagatgaaagaatttgataaggagtctactacaaggac

SEQ ID NO: 47460 - DNA, 1559 bp, Bovine  19866880508940
  misc_feature (1)..(1): n is a, c, g, or t
ntcactctagagctcctgcaccccggccccacagcgaccgaccttggactctcgggtggctgagccccagcggtgagtccaccggccttctgccgcccctgcccctggcagccctcccagtctctggcgcccactgcagaggctgccggctcacagacgcccggtacctgtgctcaccctgggtctcaatgctgccagcagctaaccccaggcaccccgctgtcgaaaagtacctctgcgtcacaggccactctgggctgcttgagctgcacgatgagcaagctgctctgctcgcggtcctgtgtgcagtcgatctccgtgactgggaaggcctgctgctgggtgtcctcgctgacgctcaccacgaagagcacgtctgacgtcagcagcaggcagccctcgtgctcctggcctgagcccctcaccagaacaacctccagggccatgtgcacttccggtctgcccagagactggagcatcttcctgcatcagaggagaaaggtgaggccacagccagcttgggagagatgctcacctctcagggctcacagtttgaaccaatgcaagggccctcaccaatctgatgattcatttcatcttgaaatgtgtaattgtcactttaattctgattctggtcagtcgaacccagctcctcctgaagacaaagataccccttggtttggtgagtcctcttccccccattagaaatgtcacccctaattaggatacagatgacctcaggccctctcgcgggccccggcatccctgccaatggacatcctgccctgagtgggaccttctgctgccagcccagagctgtggaccagcagcctctcctgaaaacagctgctccttttgggctcccctggaagggtagcccgttagctgagaggaagccaggccctgttaacatacagtgcacatgtacagcttaaccagcgtccagataatcttaccagacatatttgacgtggctgtttggagcctggtcagagtgcagatcacttggctgatagcgctgtttgggaagctgagaaagtccagctccgtgtaaaatacctgtagtaagagaagtaagggggttttactagttgttttctggaaaacagcttcatgctacagtgatgtcatctgctcagaggcatctgtaaaatgctacagatccaaaatgatgtcacatctctggaagtaagtgtatagataatcattaaacattgcaatgctcttaacccaggtgatcttctattagctgcaagctgaaatatgaatgagctacagtccaagtacaggcgggcaattagaggaagcataatgctcctgggaatagtcaggcctgagcaatagcttacacatcatttacagttgatgtgacacaaaagactgttagttgacttccttgcttaatattacaatatgtctatctgcggtgtggctggtcaaataaaaaacacaacacagatgcacacaaaggcgtgtggttgcctagatacagtatttaaatgacttggtccagctgttagacatgaatccatatatatttatgagcgctcgcggggcct

SEQ ID NO: 47461 - DNA, 1197 bp, Bovine  19866880629077
  misc_feature (1)..(1): n is a, c, g, or t
ntatctttagcttttgtgttcacaatcccaagaggctatagaattcagtgacaagatggtatcgtaaagggagtaaataattatagaattactaatgatattcatgtacagaaaggagtgatgaaatgtatcatgatgttcaggactctgttgatcactgcagcatttactttctaaaaactccactttcctgctgaaaagttggcttagagcctaatgggatggttcatttttctccagggcattaggtaaagtccattcccagcaacaagatgttggacttgatctgatgtggcaagtcctaccttcttggaagtaacgtatgcctctggaactaatggaaaaacttggcatgaaaatttgagcaacaattcttatctctataaatatcacaattaatcacttaatgtagagtatcctcatagaaagcatttgtccaggataccactctgctttttaaatgttacttttcttgctctcacataaaagagagattgtatcatttaaaagttactcaagatttattcttagatctgcagctttgtttaagagcttttccagaggtaaaatggtatttcctttctctaaaagaagggaaaggaggggtggagaggagtcccccttgatgaactgaatatttggaatacttgcataaaacagccgagtgtgtggcagatctactggtataagttttaaaagaaaacatgtatttcttatttaaaaagacctaatggattctttattaatacaatcaattggttagggaaacataaagtataaagtgacttttaactgtatttaagtgtatgtttttttaaaagaaagacttctcgttggtagtaaaaaaacattgatgataagcatgtgccaagctaaactataccaagatgtctggagacaataagttggaggaaacatgctgtatattaaagatagaatagttaatccattattatggtgaattagagttaaaattggtacatttgtataaaattgtaatctgagacatactttgttttttatacagatgacaatttttggagttctgtttaaattttggcctcagttctgtgagtttaggaagaacttaactgatgaaaaaattatgagtgttttggagagaagacaagaatgtagtaagcagaaaaagaaaaggcagtcatagaagataaaaattgtaaaggtagacaagaatca

SEQ ID NO: 47462 - DNA, 833 bp, Bovine  19866880648949
  misc_feature (1)..(1): n is a, c, g, or t
ntcaagtgatgtgtatagtacattttggaagcatttccatggaaaatcatgaaagtaaaaataacggaaggtatttaatgtgtattcagatattttagaaaccttggatggtttaaaaaagaggaaaaaaaaaaaaaaacaacctcatttttcattgaaataagaattagtcccacaaagttaagaacaaaagcttcggaaagttttctaatcctggctctgccatttcccagctagcaaattctttagtaattcagttcctcaattgcctcatctctaaaatgagggtaataaaagtatctgtcttgtagaattgtgagattaaacaaaataatccaaataaaacctttagtgtgtgtacctggtggatagttggtgttcaaaatgaattaattactgctgctgttgtcttgttactatcacataaataaaggaagtatatattgatacattagtaggatttttacaatggttgagatttttctctttgtacatatgtattctatttggcatttcgttctagctctgtcacacgaattatgtattgtatttccacacgaaacaaactgcttcaattgacttactatactctataacaacagtgtttttttttttttggaaggtgggtggttctgagcttattttaaccctattgctggtctgctatccagactagcactcttagcttatcttggtgcctagacggaaaggcaacccaggcaaggcacccttaagagcaggctccagtcagacagctgacaatttgaaagtaaacaccttgaaaaacaacaaaggctagcgctgatgccaaaggatttatccaaagtcagtct

SEQ ID NO: 47463 - DNA, 1899 bp, Bovine  19866880672743
  misc_feature (1)..(1): n is a, c, g, or t
naaaaaagccaaagctaaaaactgatggaacagatttgcaaaagcaggcagctgagtcttccagaaaattccgcatcctcaagcactaatgttcaattacagtgatcatatcatcctactaacttctggctcaattttttctgttttactattttgtgtcacattttctatttgttattgtaaaaaaaaaaaagctcacttttaagtactttatcaattttataggttttcctgggctggtttgtatccctaaacaccacagagaacatgatttcaacggaaaactaatgcatcaacttgcaaccatttgaggacacatttgaaaaaaggggacttgttactgcacctaagactgaacaatgaggtaaataatctctcctctataaattatttgtaggtatgtacagtacaacagtctctcttccccttctacttcaaagtatctgaatagttttgtttttagcaaaaccttgctttggacaactctataaaaaaattaaaatctgttattatgtttgggactttaacaattaagtttagttacttaaaaccttctgaaataaacatttggtctgtaaatatctctgtctggcctcagtttcaagctaattaaaaaataacatgtactattatttctaactataaatgttgaacattaaaaaaaaaaaaaatctggttgttctatgaaagaggatcagccttgtcttgagttttgttccaaaagtcagaactagaatcaaatgaaacaatttaaaggaaaatggattctgactcaacgtaagaattttcagtacagctccctgacagcacgatggggctgttggtgttttccccactacagaggtgcccaaatggctagcttgaaatttatcagggatcttacataaagaatttgggcatctgggtttaaatcctaggtctgcttcttcctgtgtaacttaagataaattacataaatttttcaaaacttcaatattctaacatacattgaggtcaaaatgagtcaaagtatataaaacatctaccacacagttaaaactcaacaaatgttagttccctttttaaaaattcctgtactttgttctgcttggtgcagggttgggattagataatttctgaagttagttctcaattctgagattctactaatttagggagcagaagacttcttaaccacttcatacattatccttttaacctttcaataaaaaatcatttgcttagctaatgaagtataattcattactcaggacagtggcaaatactgggcattcagactttcacaaaatgattgtaatctacaaaactacgtatttagtaatagcaataagaaaaaaaactttgaagttagaaataactcaggaatggattattcttttgccttgaaggcacagattatttatctattaacttcatagacctgagtgtacaaggacacacggatgagaaaaatgtcagatgagtagactttaaaattttatgtgaagtttataatgcaaatgtgctgaagtgttcagattcagataattttcaagtaagtctactttcatgcagacatacaagcttgtcaaacactgaaaatgtattatcttatgaaaaaatagtaattatttgatatttaagatgctaaaaatgacctttcaaaacaaacaaaaaacaaaacaaacacaaagcaaaaccattaatcttaaatctaaagattaaaaatgagataatgaattaacaaggagtcaaacactttaccttccggcccacatacacaggaatgccaatgatcatggcagggatagcaatgccagctattaaggcaattcctaccggagcaccaacaagtgtgcccagctgccacaatattttcttctttcggctccaggggtttctttcccccaaaaagtacat

SEQ ID NO: 47464 - DNA, 875 bp, Bovine  19866880705415
  misc_feature (1)..(1): n is a, c, g, or t
ngtgctgtgaccccaagtctagtccggttttccatgaacagtatcagtaaggcaaatgtgtctgaatgggatcctgagaatgtatccaaggattaacatcccaaaactgatgctgagctcgatgctctgaaacacatttgtgctcaggaaagatgtttgctaaggtttggtttttatttcccctggagctggtacacatcagtgaggcctgcagatagtgagtaacagcacaaacaataaattttaaaacaaacaaagtaaaaactccgagaatgctaatgcagaccagtgctgggctatggcgtgtgtgttactaagtcagcaatgattggggaaaagattctattacctgctccttagaagcagtaggtggctgactgctgattgtatcagttcctaggttatacgattttccatatgtcacgtgcttgttgtcgtttagttgccaaatcaagtcccactcttttgcgaccccatggactgtagcctgcaaggttcctctgtcaacatgatttcccaggcaagaataccagaatgagttgccatttcttgctatagggggtcttccgggatcaaacccacttctcctgcattggcaggcagattctttaccactgagccaccagggaaccccccatgtcacatgctaacagcaacaaatggggtgagagcaggaaggtgaaggagggtggacttaggaggaggaatggggactgtggcaggggctgtgggcttccctctcttccatctctctctctcctcactgggtgagaagttaggcagtatttcccagccccttctggcaggtgggggtacccataacactgacttccagtcatagcagcatgagatgcctctgagagagcagcatgcat

SEQ ID NO: 47465 - DNA, 1031 bp, Bovine  19866880718760
  misc_feature (1)..(1): n is a, c, g, or t
ntactgttacactgcgcaaagccttgttttaaaaacacttttgttgataacgtcacaaagaaattcgtcccatgctcttgggtgtgtgaggacagaattcagtagcgtaaatttctgttgtggaagaagccatgttgcaacagcagtgatgaaagttctgtctcttcactggcctgctccatgtgtacttcccattccttgcgtttctggatagaatcttaacccaggttagctagaaggacagcaaaggagtatattaggaagaacatctttttttgtggttatagttgggaggtttgttacatttggtgcttttattttttcacttaagaccctatttctgttttatagtgtgtcctttttattagagattctgaaattagcagtgactattacagaatcacctatcaggcttaattaacctgaacttcataaagtagaacctaattttatagttcttacatattttattagatttgttggaagatttaagtctcgtaaagaacgagaagcagaacttggagctagggcaaaagagttcaccaatgtttacatcaagaattttggagaagacatggatgatgagcgccttaaggatctctttggcaagtttggtaatgtgtctgaattaaatttttatattcacattgttaattttggataatattttatactaaaaataaatgagacttatcatggtacttaaattttgtagttaatttggattaagctactgatagtccattatactagcatatcagtaaaattctatccagtttaaaggtcaatagccttgcgttagcacagtaagttgtgattgtaattggaacagactttaaaaggttttgccatgttacgaaattgtgctggatttatgcactaacagatcccatctcaacagaggcattgcatgtgacacagccaacttaggttggaatgtagtctttaattatgggttaggaaagctggccagctttaggatatttggccagtctcagcatcatgtttagcaattcaaaataaacttcaac

SEQ ID NO: 47466 - DNA, 2063 bp, Bovine  19866880805417
  misc_feature (1)..(1): n is a, c, g, or t
ntgggttagatttcttcatatgtacttatactccccaacaatctccaattgtggagggcaaatttatacctggtaacagttaaacactaatgcatttaattactaaaaaataatcttgacaatatggaggagaagatccaatttatcattgctttgtacaaatattatagattctaaataataaaaaaattggaatgaacaatgaaagccttacttcccatgtgacagtgggcatgctcttcaattttccattttcctttgtacacatgacaataataattctaattacatttcaggtgaaagagtgtaaggcaaacaagtcatcataaatccaaaagaatttctgctaaatctactttggaagtatttgaaaacattttcttattcaaatgaacatcatgtctctaaaaagacaagtttcaccaaagtgccaagtcacaaagaaacactcaaacttttacctcgcccagagaaatgtagaacttcttcataattataacatcatcttcttcaacaggaggaggtggtggactgggtggttttttcaggacccagggtgaaaactctgtacctaatatgatattcatgcctgattcactccatcttacttgtgaaatcaatttggctaacctgtatttcagaaatcatacaaattgaaataaatttcaaatatggtagaattcagaataaaaactaaaattgtatgtattcaaatcaatcttccctcctagctttgcaggatgagtctcttaggagctgctaaaattaatggcatattcataggatcactaattaattaataattattctgttttattgtattttagaaaatagttgttctaagaaagggtcaaattttagtaaaatttcagactgtttaggaacttaaactttaaaagtcagggaacataaaagaaaaacttggccctgtgctagaacattcttttttatcccatttgtattcattttttatcaccctgaacacaaacacctttacagaagtagaaaaaaatttaaatataatgatcaaagaagcagaattgaagtacatttattaggtactgtttctatgaaatctctttgggaaatgttaagcaatttttaccaatgctctatattatactacatagtaaccaaaacgcaaactccaatggggttaaagtacacaattttattaagaaagtaaataaaaatgatttttggtgaaaaaaatcatttaaaatatatgtatattgatgaacccccccccctgtattcaaagtaacaatcactttccagaaaagttggaagtctttcttttttgacccagtgaataccttgttcacgattgagacactgttagaagacaagtgaaaaagaaagcatcacagaaaatcacctgttaggacaatgatggtctaatcactagagcaatgttacctctagctcttatagggagcctgtctctaccttctgtttggacaggacaaagaaccccgagtctcaagtttgaagccactttgtctgctggtacacttcattaattctctcaacaaacctacatcagctatcatttatatgttacagactaccaaactgaatccagaaaacttaagtaacttactgaaagaggaaaaatgaccaaaaaaaaattaatcagtgtcattattttcacagatataaaacaggttaaaaataatcacaaacaggggacttccctggtggtctaatggctatgaccctgagctcccaatagaggatgagatggttggacggcatcatcagctcaatggacatgagtctgagcaaactctgggagatagtgaagaacagggaagcctggcatgctctagaccatggggtggcaaagaatcagacatgacttagcaactgaacaagtgccagaagttcaggactctgtaggaggccccataggcatgaaaaccaaggtttccacagaacatgattgagatggggatggcgtcaagatggcagaatagaaggatgtggagttcacctctccccacaagtacatcaagaatacatctacaaatggagcaattctcagagtgcctgctgtacac

SEQ ID NO: 47467 - DNA, 1180 bp, Bovine  19866880851852
  misc_feature (1)..(1): n is a, c, g, or t
ntttcctccgaaacagagagcctattgaaattcttctttttttgggtgcctttttgactgaaggcaagctcacagatgaagcagaagactgaagatctcgatctgaacccatctgccgatgtaaactcatgtctaaaatgctcattagaattgagtcagggtctgtgtttacacacagcccttcattatatttaaagataaaatctatttcttgttcttgcattcagattaagtcatgatgttagaaaatcctacttggttccttcagagaattcttgaaagagttcaatttatagaagacttatcacggatgttctgaaaaacagaagaaaacaaaacagcaagattatttaattgtattcaccatgtgcatgtctttttaataaacttacaaactctctatgaaatgtcaaacaagtatgtactttaatcaacggtttttggttttgatttttttaaataaggccagtttatggtagtgctagtggtaaagaatctgcctgccaatgcaggagagataatgatatgcgtgttcaaaccctaggtcgggaagatcccctggagagagcatggcaacccacgccagtatttttgcctagagaatcctatggacagaggagcctggcgggccacaggccatagggtcgcaaagagtcagacttagcacatagcacgttagcagtgatcagtctacaagagatataaaaccaatgctgatataacaaagatattatttaatcttaagaatctaatttgagttgaccttattattaaaatcttgtataaaacttctgatttttatcatactcaaacctcaatgattcccactgcctttaggagttttttaaaaactgactataaaatgtacatgcaaatatgaagggctaagaagagcttatacaactttgaagaacagtgtgtatgtggagagggagcagattctcttacactggcagaaataatgactcattataaagttacagtgatgaagaagacagtgtggtacaacacaaagacggatataaagaccgatggggaacaaaacacaggccaggaaaaaagtcccactgatacccacgaatccctgacttactgtcaaagggtgaccctgctgagcattgagaatgggcttgtcaaaaacaaaacaaaaacaacatagtactgttttactggttaccat

SEQ ID NO: 47468 - DNA, 1976 bp, Bovine  19866880897230
  misc_feature (1)..(1): n is a, c, g, or t
ntggtgatgctccagtactcgcttgaatccttgctaaaccctctgctgtttaagattgagcacagaattttcttattagaattaatatttaccaagggtatagtagatgttgagtactgaaaaaggcactttgcagacactatctctgttatttacaacaactgtgcaaaggtgacattattgttcccgtttttctgataaggaagctgcagttccaaaattcacttgcccaagataactcagcttcaatgggatggacctaggattcaaatcgatctctttcaccctccatctctatcacactctttctgctgaattctgattccttactttattctactaccgcagtttttctgtttccttaacagttacttttctgccacttttatgcatctcaagcaagatttttccaattctttaaggattgtgctaaaagcagtcagaggctggtaaaaatgctacatctgtatcccataacaaagaccatgttgtcaagattcaggtcttattgcctgtcatctgttatactttgaaacaaatttgcaagaaaactcagccaggtctgaggctattattattttaatctctgcagaagatatacaactgcccaaactgattaaattaaaatgtaatttagattcagaaagttgcatgtctgaaggaatagaatgtacaatttccatatatgagttcttaagattctagctgttcaaggtacattagagtgtctgcagctatatgcgaccgaatgtctttgttccccaaaacagggaagatttattcatttcggcattaactaatctcgaccaaatattcattgcccactcaaatttgtgtaacttttccaaagaattgagttacaaatgccttttgtttagccatggaggacatcgaactgagtctaatgttaatagtttcctcacgcagttacatttaacaagatacacagtccattaggctcttgttttaggccttgagcataaaacgaaaaattttcagcaattagtttggcaaaatttttggctcttgagatccctgaggcaaccaattaagaatcagtaatgactgatgaggtcattttcattgtgttcgttctaaactcaccgcgccaagcctctccttcagcagttttcagctatttcaatcttctttttaggttgcacagtgctttccaaagaatgatcaggaggaagttagtccccagaagggttctgcaataagaaagtttcaccatcaaataagctggggacatactgcattatatagatttttggggggatagttacaatatgtataagcaaaatgaaggctctgagaggttctataaacaaatgtttttatttgctttaatctaatttttctgagggcttcgcacatagctcagtagtaaagaattggcctgccaatgaaggagacaagggttcagtccctggggcaggaagatatctaggagaaggaaatggcaacccactccagtactgttgcctggaaaatcccttagatggaggagcctggcgggctatacagttcatggagttgcacaagagtcagattcgacttagtgactaaacaacaatttttctgatatttgttgaaccaaagactaccccttttgccctcccctctgcaacacccatttaatctcacagtgaattagtcatcttttgtaaaacacagacattggttattgcaaggtcaaggggacagatgactcctttaacctttcctgtgatgagacaattggaaagtttggaggatgcaaattcaggcttcaagtgagacgcatggcagagtgcctgactcggagtcattttctaaatgttcactgaatgaataattccttctttgggaaaatggaccttacttttcagatcaggtttagatttacagaaaagttgtgaagccggcacacagagcccccatagactctgcacaggtttcttctgtattagcagcttctggtactgggatagatt

SEQ ID NO: 47469 - DNA, 1024 bp, Bovine  19866880898573
  misc_feature (1)..(1): n is a, c, g, or t
ntactgagcgcctaattaactacccaacactgaacctgccttaagataggagcaatagtatctgcttcattaacttgctatcaagattaaaaagcctatttttgtaacatcatggtgaaagcatcctaactgatacatttttctatgtcattaggagcactttgtaaccaccattaaaaaaaaaaactattacttatacaaattaatatattaacaattatttatgaactattatttatcccagacaaatctgctagattgacagaccaaaaattaaagtcattgttacttcaacttgcattacttgagtagtgaggtttagcaatttcttgaacatttattttccaacagtctatttctcagaatcttctttagaaggaacacatctgcaaaaaccaggctatgctcaactgttatattccccctagatactctggccattataatcttttaaaacaatattttcaaaataacaaaacacacacaagtcaactgaactatgagtcctaaatcagcacacaagattttctttagcacatataggggttacgagacacttatgataagccttatgatgccatagcattgcctaattttgaataaacatttggaagtgctgaggcagtatttaactctgttcctcttctggatgtgtccaggcctggcaatgtgtgttcagtgctcttgcttcagaacctttgggccccatgagatttaggagagaatttggctgtctctcacagaaaccacagaatctttgcaaccatctgggactcactttgtttaaagacaaagatcctcttggtgggtttttatagtttcattttcaaccaaaaagcctgttaaataggcttcaaatttgataaaaagaaaatccttaaaagtggccagggaggaaaggctactaagatgaaaggaaatccaaaatggctgcgccttggaactctgctctacgtggctgctcccttgcagggttcagtggcagccatgcctgcgttccttcaaagtggcaacacttacagtg

SEQ ID NO: 47470 - DNA, 1113 bp, Bovine  19866880919458
  misc_feature (1)..(1): n is a, c, g, or t
ncgaagggaccttggcttttttggcacagggcagagaaggtgggtgtgtgactgagcagtcacagcggacccagcagccagaatgtcactggaggagtcacaaccttcacacccatttctccttaggtgactttttaagagaccaagaccatctagtaaacgatttccatgaaactctaagaaggcaaatcaaaatatcacttattaaatgtttaatgttcactattgtgcttttatggccagaatatagttttcagctcatttcacgtcctgctttgatccatgcataatcatgttcaatgtacttttacccctgttacatgagttggaatgtaatttaccattttaaatgttccctgaggcttagcaccactgtttccttgctattacaatgccttgttagttacgtccggtttgtttgccaatgcatcacctaattctagtattgtttctgtgggatgatttccagggatacagggtaacaagaattaagaactactagcatcatacttagcagcagcagcagaatcttatgatgtttatcaatcttcattaaggagttgtaaaccagagagaaactgatggtgtttcctcctcttatggcttgggaaaagatggtttcttgaaaagcacactgaatggtagtttcaaaaatgccttctgtccctgctctgtcagtggccctctcctctgggtgaccttggactggtcacttcttccttctggaactggaactacaatgtctccctgtgaagtgaagagactgaactaacagtctctaagtgttcttccagctttaacagactggtattcaaaccttagctctttgcctggcaaagttttcaagaaactatatagctgatgtcataacaacctctgcctttatcatttctcaaatttgagtgaagctcctgagaaatggaaagggggcccaaggccagcaggagggagggaaccacaactgctgcctcctttgggaagtcctctctgcccccttggcattttgttctgccctccatcgtggcactcccacccagtgttgtgaatgcaggttcacatctgcgtctctctaattagactctgaatggccaagggcacagactgtgtcctggg

SEQ ID NO: 47471 - DNA, 1080 bp, Bovine  19866880949090
  misc_feature (1)..(1): n is a, c, g, or t
nctgggcttctactgttctcaagtgaagagttaagtggccaatcctcagttgaagtgagagaaaaggagatttttccaagactggtcaaggagagaagcttgttttataaacaggatcagtgactagcttggtggttaagaatgaggctgtgactctgactccctagacccaaatcctggcgcaagcacaggacagctgtgtgaccttgggaaaactccttaacctccctgtgccttggcggccttgtgctgaggataaaaccacgactcctgaggattgtgagaattaacgatctcctacaagtgagcccttagcatacagtaagcccttgagacagacttactgtaatagaaataattattactatatcaataattagtcttactatgtaattcttaatatattaatattatgttatactaaacgactgctcttattcttactaaaagagcgaacaagaaagaggctcgcccttttcaggtttttcatccccagattcagtgaaaatatattctgctcactctcctaaggaattgttcctgctttgctctaaaccgtgttgcttgatttctggagaaaggtgtgtgggtgcacttggaaatagtctggcatgtttattaaattctaaactgaacttcatagatcctggctgtgttgggtcaaacctagtcagaacatcatgttttgatgaagatactgcaataataaatgtctaaaatagcctcagtgtacttatataaatggtaaatgagtgcatggtagagcgctttataatgagggtggggtttcattttcaatccaaacaaaactgttgcagattgaaagctttccctttctcaggatttcatgcctccgtccttacccaggctttcattatttttcaggtgcaattgctggtatagttgatcagccaatgcagaacttccagaaaacatcggaggctcaagcttcagcaggacacaaggccaagggtgttatctctggcgtggggaaaggaatcatgggggggtgttcacgaagcccatcggaggggctgctgagctggtgtcacagactggctatgggtgagtcctggagaa

SEQ ID NO: 47472 - DNA, 1033 bp, Bovine  19866880964468
  misc_feature (1)..(1): n is a, c, g, or t
nttgtaatgtttgaagggattgtaacatattagccctgtggttccagtgtaaaatgtgtaattgagtaatcaattgtggactttagattttaagttaaaatataatagaatttatccaaatatgttaacaatagtctagtgttcaagataactagcaaattcttttcatcagtcatctagttcgttagatttatctatgattgtttaagtactagatgattatccttgttaatctagcatttgagatgcttttaaaaatgtgaaatgtataaacacagcttaagatgtttacagaacttgaactaagtttcagaagaggcttgtgtttactttagaaatagtaatttactttgattcctttctctcacatcccattctgatcagcaaagcctgtttgcacttcttttaaaaaatatccagagtcctcctccctacttagcttcactcctacacccaccgtgatatagccaccgttgtctctctcctgagctaaaaaaaaaaaatacaggctccaaagtggtcccttacttctacccccatcctctattagccaggtcatgacacttttccaacttttggcacttccttttgcactcaggatgctaactcccacccactgctccgactttcctgactcatctcctaccgctctctcctttgcttacttcaggttcatggctgagacaagcatcccagctctggggcctttgcatgtctttgtttcttctgccagaaatgctcttttccatggtggcaacatgggtcatcccttgccttcttgcgctcagatgtcaccttctcagagatgtcttccttgaccatccctgtgcaaaatcctccatgccctctgctcaccccttcaccctctgtctcccttgtcctacttcattatctgtcttcacagctctaaccaccaccatctggcagattatatgctggatattacggtgattttttttttttaattttgcacacaaaagtttgccttcaaggataccaaaaaaacaaaaaacaaaacaaaacaaccctcatg

SEQ ID NO: 47473 - DNA, 882 bp, Bovine  19866881009958
  misc_feature (1)..(1): n is a, c, g, or t
ncagcccgggcgctcagcccacagctctcgcaggcggcagacaggtgctgcccgcgcaggtgaggcagcacgcccgggccttggtgcatcccgtgaagctgcagaagctggtgatacagcccgtgaacctcctcgtcagcatccacgcgtccctcaagctgtacatcgcctctgaccacactccgctctccttctcagtgtttgaaagaggccccatcttcaccacggccaggcagctcgtccacgccctggccatgcactacgccgcaggggccctcttcagagcaggtgaggacacagcagagggagcctgagcgagaaagaaaggcttcagggtggtcctgactccaagacacagggaagcggcatgggagggtgaggggcagttggacagcagtgactggaatgcagaccctgccactgcgggctgtgaggcgggggcaagttactgaacctcccacatctcagtttcctcacccgtaaaatgggttttaagatttctgacaagaaaacaatggaagtgtgtgaagtaccctgaatttagagtggcgcttaatgaacccttaagcagtagcagcctttaaatttgctgttatgtaacagaattttgattcccatttagcaagtgccttttcggctccttaaagacacaaggctctatatcagggagctagtgcagccaggaaaaccagcccaggccctctcagcccctgggcctaaaagaaatgtagttctgggctgttaactttcttcattacggcccatgaatagctctaggtgagaaattcagaggatttgtgtgctcgtcagatgcataaagagccttctacctacccagtacagccttgcctgtctagacagatggcaaagagaaggctgtag

SEQ ID NO: 47474 - DNA, 1632 bp, Bovine  19866881036825
  misc_feature (1)..(1): n is a, c, g, or t
ntaaggacaggcatgtttctctcttttgaatgacatctcccaagaatgggcttcctatgtggcactagtagtaaagaacccacctgccaatgcaggagacttaagagatgtgagtttgatcctagaatcaggtaggtcccctggagaagggcatggtaacccactccagtactcttgcccagagaatcccatggacaggggagcctggcaggctacagtctataggattgcaaagagttggacatgactgaagtgacttcatatgcacatcccaagaatagggcttgacctgtaggaggtacagggtgaatacacggtaatgaaggaatactctgaagagtgtactctgttattgctcagggattttgcagtgattctttgggtacaaagcaatcaaattctggcctgcatgaataagcaagaaactataacatattaagagaggaactgtagggccctgtgattcttggatttcagtgtgtttaagaaccataaagggttctggttaacaatgggattcttggttcctatccccagagattcagactcagtggttctggaagcgatccaagacaatgcacttaaaaaatatataaccgttgattttgttgtaggtgatctgaggcacgtactttgagaaacactgatggagtctgaaacagtggctcagatagttataaatagcttcccagaccacccagccgatgagccacagagctagggttagacctggctcttctcactctcagtgccacgtgttttccactcacaggctctcttaatatatgtttataagctttgcacgtaccttggttaccatgggaacgcaaaagcctgatgaaatcctacaactatagctggttttgaggcttcggttgacagctatctttagaaaaactcagctccacaatttactgtggcctgtgttgccctgagttcctgtagagtcttctaaaattgtaaatgtgcttttgtgatgtgctgatgccataatcctttgacaggagggagcacaatgaaagccaggaaccagggccctggctcaaactggtttgggggtggactaaaaagacacagggaggccgagtggagaaactggaatgaagctatactatttaatgtgtggtgaagggcttcgaggtggccattaactgatttagggaatgaaagaatgagggttggtttaaagatatttcgatgaagaatatttcattcattataaaccctctggttgagagcattgatcagccttagaaggactgtgtttgaggtagaggttagatcctaaagggacaacagtggttgataagccacctcccaagagcaaatccctgaagccaaaactgtattaccagctgtggcgcttaccatgtgccagggtctaagatttatatactatctcacttgatcctcataatattgctttatgtggataatattatcctcattttacagatgagaaaacaaatagactacctaaactcacacatttacaaaatatctgagctgggacttgacccgggcaatctgggtccagacctacccttttaaccaaccacttctgtccagtggatctgaaacagaacaacaggcagaactcctgtctttaggagcattgccgtaagggttgat

SEQ ID NO: 47475 - DNA, 812 bp, Bovine  19866881047051
  misc_feature (1)..(1): n is a, c, g, or t
nccaaggagctttaaggagaacccccccgggctgcggacacctgctgccccaggggccgccttgacttggagggggcgggagcgtcatccccctgcacacgggtcccttttagcaggaatacgggaggcagggaagtcatattaaagctatttgtgaggctgccaaaaggatcactttgatttataaagtatgaaagtttgccatttatgaattcacagtgaatgagttatttcccatattttgctccagaggagcttattacattctcaatcctagtgtgaaaaatgaattgcagggaaaatgggtcacttttcccaaatgttgaaagtactgcatttaaggtttcagtcaccccttctctctggtctccctcacaggctgggtggttggatccctggaaatccttggcagcccggcgagtctggtgcgaagcatcgggaacggcatcgccgacttcttcaggcttccgtacgaggggctgacccgaggcccgggagccttcgtgagcggggtttccagagggactacatcgtttgtgaagcacatttccaaaggtagctcttcaggttcctggtaatgaggcctgattttcattacttccctgtctttttagagaacgtcttaaacgttctccatgaattaacattgcctctagctttgtttggcttgttagctggcagtgagatgttggatttgtaacaaagcccatatataatgtcttatgttttaaacagatcactgcttgcctgtagctgtgtgaaaatgtttcagaaacttcagaatttgaaacctccctttgggaaaacaagga

SEQ ID NO: 47476 - DNA, 1786 bp, Bovine  19866881062317
  misc_feature (1)..(1): n is a, c, g, or t
ntagcgaggctggtacggtgtgtggctgggccctctgcacggcttggggtctgaaccaggtgagtatgtgccggccaggagtaaactacatctccccatcgcaatccctccctccggagggcggggtgaaagatagactcggaggtggggagggagtgcgggatgaactgccttcttagttgggaaaagaaactggggccctttgtttctcggggctgaaggtggcgggtgttggggcaaggtctctggtagcagccactagttcttgtgaacaacgccggggactagagagaaattgttcataagagtcctgaagtgccccctgaccgttggggttggctgtagaagctccgggatcgcggtcaggccctgagcccgctgtcctctccggtcgcgctgtacatagaaaccgttgctacgggctggaggatgccgtttcctttccgtctccggctgcaggtggcgcccagccttgtggatgctgggaagaacgtgcgaaggtggaagtcaaaacagtttttcccgttactagcgcattgcagtttgcgctggagatattactgacaaactgatgagtaaatgtgggaaatggatgtgagttaggatggtggagaagttaaccccaactaggaccacaattttcctaatcagagacaagttgcaagcagatgtggaagaattctaacgagcaaataaagtataacttgtgttttggagtttgagagttaacattaattgatcttgagaatgtgtatcctccccaccgcagtcctccaaaaaagttctcaaaaaagattctcagaaactttaaaacagggtttacgttgaaattctcttaattaggtaagagatgtctttatcatttctaacgtttttcactatgttttattcaaatcataaaacctcaggggtttcaagattcctttaattgaaggtaatctattttaatcccgttagatgcttaaatcctcccatcaaatatcctccagctcttgggaaaaaattctcctacagacaactcattctattctgggcagcaccaataattttaaagttcttcacttggtttcatgtaacttccaccattaaggctacccttgtgataggaggccatcctactgggccctgctagtatggtaggccatattctcacttcttcgctggacctcattcaaaagctgacaaactgtcatctatattctgtacccaagtcaaagccagcaggaatatggagacgctgacagtgcatcctttttctgcagacgtatgatgtatgaccagactcagaaggcaggcatgctgaagggaatattccttatggattagacttattgctacttgttttaaaatttatcacccagtgtgttttagtgcagtgtttaaaaaaaaaaaaaaaacaactttgacaatataactcataatatatacattttactttgcaacatttatatacacatttgtgtgtgcatttatatatacctgtatttatcatttgtttatataggcatgaaataaaagtttctgtaaaacagtatgtaatggtttgtgtcaggtagtctgattttactcctgttctaccacataaaagaatgctgattgcagctgactaagttgatttcatgagttgtatgacagttaagtatgtgggctctgtagtggcctgaggttcaactcttcagttcactacttattagttatatgaccatatgcaatttatatacttgaaatatcaccttcctcatctgtaaaaaggaagtaatatctttcatgaaagtggtcttgagga

SEQ ID NO: 47477 - DNA, 1911 bp, Bovine  19866881066756
  misc_feature (1)..(1): n is a, c, g, or t
ntcctatccctccacccctgccaagtagaaaggtttaagcatttcaagtaactggagacctttagctgaaaaatagagatggaaagttaagacttgagttaaataaggaatcataaaaggagatagaactgtcttctgaaccatggtttgggtactgtttaagctagagatcttttagttggttaactaatattattcagttatttctatgaactgtggagcgtgttattttcacaaataatacctaatgcactagagcattggaaattttctttaaagcaaatactttaccatttgcttccattataatttgagagttattttctagtggaaaaaaagcgtggctcccacacaatgaaaatcatcttcaggagtcctatcattctgctttcaaaatatgtgaatgcttggtacatttaattccttgatatattatacaataaaatgataaaatgtgcttaagttactattaggattgaatatgtatgaagatggaacacttacatagtaaacactaattattagcatacgaaaaagtttctagacaaaataccctaacttttatggttatcagaattcacagtcattaaaatatttggttagtattattaaaggtaatcccgtttttctttgtaatttgtttagattgaatgggacttaaatgtttagctatgcactaggaatatcttagcttttctatttaaaagaatactgcagagtatcatgaaacaagtttgatgtactttcattctaacatttgagtacatatgatgtgctgtgactattcctttcttttcctcccccccacctctctcttctctctttcttaccctccctccctccacacacacgttgttttatataaataccgtaactctttcttgttattatgtcctaatttttgaaatacatcaaaacctgcgttttcacaaaagtcaagtggccagatgtttaatcaatgctcgtctcatcaaagtgtaataaagggatgaacttctggaatacaagaataaatataaaattctaagaaataatttttttaaattagcaatcagatattaaatgtttgacatcataatgctaggactgattattactctaacatgtcagctgttagttttctcctgataattactgcatatttttaaatgttctaaatagataagcactatctatgagcagtcattttcaacaaacttaagtctctagactcaaaactataagaaattttcatcttaaaggaatttataaagctgtttggaaatttgattattgagaagaaactatgtttttgagtcctcactttccttggtatagcatgtttttatggatattttgctagattttggaacttgtgaaattttgaaatggcaaaattgacattctgcttttaattctcctcatcatgatgtgaagaattcccaaaaaaggctttttcttgaaaggctatctctagatagcctacatcactagttagaaattgtcagttcttaaaagttctgcttagtgatatactggtatactgaatggcctctacaaaggttagaattatgatttagcccaatttctgctaaactgcttcatatgttttatatgtttgctcagaaagaatattttcttcctaaatttatctagttaaagcaatcttgacattcatatttcctataaatctgttccctgtttaataatttgaaagctcttaagtttgtatctaaatttggctttcacaatcatcactaaatattttacattttcttcttgccgcatagtgtacatttatatacttaagttgtccagtaaaatttcatcatttaaagcaattagatttctactggggttgtcttagaaaggctttcagcatttatttaaaaatgaatattcacatattaatgtttaaatgacatacattat

SEQ ID NO: 47478 - DNA, 858 bp, Bovine  19866881078773
  misc_feature (1)..(1): n is a, c, g, or t
natggatgtgagagttggactgtgaagaaagctgagcgctgaagaattgatgcttttgaactgtggttttggagaagactcttgagagtcccttggactgcaaggagatccaactagtccattctaaaggagatcagtcctgggtgttcattggaaagactgatgctgaagctggaactcttaatactttggctacctcatgtgaagagttgactcattggaaaagaccctgatgctgggagggattgaggacaggaggagaaggggatgacagaggatgagatggctggatggcatcactgactcaatggacgtgagtttgagtgaactccaggagttggtgatggacagggaggcctggcgtgctgcgattcatggggtcacaaagagtcggacatgactgaacaactgaactgaactgaatgaggttcaaacaaacaagttctctggagaattttacattttatttcctaagattaaaaacaggttaattgaatgatgttgaggcacccacagagagatgctacacatataaagacatgatcctgtcccacagcttgcaatctaaaattagatatacacaggcaagctggaaaaacatagcatgctttttttttaagaccaaaaagaaatgatgggagagaaaaatgagagtggtaaatcaaaaaatcaaagggaactgacacatattctatcttctgccttttatttgtagccttaattatctttgtcagaaatgatcacactgttgaagtcaaagagggaagctgtctgatagcctctaaagggtgacaggacactaatgggattgctatgcacagtgtcctctgctttggaggtccccgaactccttttatc

SEQ ID NO: 47479 - DNA, 903 bp, Bovine  19866881086303
  misc_feature (1)..(1): n is a, c, g, or t
ncccctcccctccccagttaccataaccatatatatttctctctccacttctctttcatttggggcgagatcagacagtgtaaaaggccattgggggctttgaagtgtgttcctgttatgtgatgagaaggggaaacaccaaggccagtgctatctgatgtcccaggatcggcagcctctgcatagcttgtccagttcagaaaacagaaaaaggtactgacattacagccgtcacaagaatggtccgagcatagcaggaggacagtttcagagagccagaggggaaggaatgaaggattatgctatcaacagaaatctctctgttgagagagagagtgcaggaatcctgcattatgaaaaaaaggattaactccccccccaactttatcaccctgatatataaaatataaaaagcctactgaaataagtcaaggaaccaaactatatcagaaattgctgaacaattctaatgtgttttatttttacatagggagaaggaggggaaggagactaggagagagaaaaattccaagaagtttcccccaacttctgtatttcactgcacaagactacttacagactatcatgtaatgctgtaaaatgataaaataacaaaacacaaggcctcggaacattactttctcatttatcaagacctaatagtgattttttaaaactatcgagataggctgcaaatatatggacatctctactgagaatactgacccaaaggaagtcctatgtatccttcaaagcgatatattttacagaaaaattaagttaatcatagttaaaaattaatcctcttgtgcagtaccgtgttatttatcccacttattttgtaatgtcctgctttatataggggacagatctcagaataacaagcaacttagttattcaccc

SEQ ID NO: 47480 - DNA, 1228 bp, Bovine  19866881125174
  misc_feature (1)..(1): n is a, c, g, or t
ntgtttgtaaggctgtttctaagtacctgtggggatttgtgagagcgccagctgtactggtgactgcagagactggccagcaggatattttcatcagtatccacctggccaaaccgcagtgtctcctgtgtgtcattacagatcacaaaatggctgaagaccaactcctctacctcagggcatttgttctgaaagaaaaagaagacgaaagccaacatgcatcagattaattgcaagatgtttggcagctgtctgcccagtggcgattgttacaacacagaaatactaaaagatctgttgtcattagctctggtatacaaagtattctgtacttccaggataagcaccaaaaaataccttaaagagaccttaaatgttccaagaatatgttttgatttatattcctgcaaaataaatcatatatacagaagaggaaaaagaacaatgagatccctcaaacgtttaatgttttaaaatgaattaacatgctacaaagaatgctgtactgggtagtgcacgtttttgagcatagtaccagaggctagaattaccatgttcccggccttctaaacttgacaatcaagaccaattaccaaagccacagtttgtaccctacagaaagcaaggatcatttaggtaatacttccccagttcccttaagggggagggtggcgtgtgtctgtgtgtctgtctgtctgtgtgtgtgtccgtgtaaatctgctcaggcagagatgtaaataaaaccataactttccctctattgttaacaggctgaacacacacaacagatcaacttcagagtctgtgtaagccaagctgcagttttcaagagaaaatgttagttgaaaaccagttgctgatgtctatttcagctaataatcaatcagcaaatgtctttcattaatctactgaggctcagcaaattagtaatatgctcctaatgtgtggatacctccttctccactggttgctgttacatcaaagcactggctgagtcatagagcatttctgtgtttactctttttatcacgctgactaggttatggcttaaaaacaatcaacatacctttggtaaacagaatagctaaataaatggctaacttgagaatgcaagaaaaaaatctttattagccaatgatttttcagataatgggaggtaacatgtcactgatagggcttccctgtggctcagatgtaaagaatcctcctgcaatgcaggagacctggg

SEQ ID NO: 47481 - DNA, 890 bp, Bovine  19866881153347
  misc_feature (1)..(1): n is a, c, g, or t
ngctagcccagttccaagaaagcatataaatctgtaagagaatagggtacatggaattcctaaataaaatgtttttctgatatggaacaatttgagagtccttttcttttagctccagtttataaacatctttattcaattgcatttttttcttttttttttttttaaataatcatatgatgttaccttatggaattggaatgttgacctgcatgtacctaatattgcatattattcttttatcaaacaaaatgaaaccttcagtttctaagcctttggtatttatagggtagtcccagtttgggttgatgttttttccctccttccataaatacaaattccactgtgattcaaagaaggcattgggaagtgaaataaaatgtatgttgccattaccaaaaaaaagtaaaaaggacgtcgttgcctaggtagacctataatagaaaaaattcctatgaattgaggtaaaaatatcaaagttaagaaaactattttataattgaggaattatttttccaggaagcttttcaaattggaatatactgggcaaatacaaacactgtgcacaagtcggcggctgttaagctggtccataacctgacgtctccaaagtggaaagagggaggtaacggtgaagttgtatctttggacgaagaagggtttgttcatgctgaaataagactcggtgctttcccaggacatcagaaggtagggtcaaagtctctcaaagtctgcttggctcttggctgggacagggagtagtggggggtcggggtggagctggggatagcatgccatcccctcaacttgtttaaaatgagccttcccttttcttttctaatccctttttagtattatatgttccaaacagtttataatagtgcaacaca

SEQ ID NO: 47482 - DNA, 810 bp, Bovine  19866881177615
  misc_feature (1)..(1): n is a, c, g, or t
ncctctgggtgcttcacagttgaaacaatccccagttgtgcccttttgtgaaggcttgtacaaaactctagaaatcagtcctgggactggataaagtgtcttatcacaaactgtctttgctactttcttgtgtaagacttcacaagtcttaacaaggtcacaatgcaaccatttctacatagtgactgaaatatacaggaaaaagaaaaaaaaaactcgactccaaacttcttcctctcatttaaatagagtaaatgtatttaccaacagaaaatgaagaaattccaaacatctctatccactagatatttaatgaccaaaactgccagggtcccgtttactggtgacttcaacaaggcactataaccttcctcagagaatataagtttcttggaacctctcaggaaaccgaaaatatttgacgagagaaaggtgaagagacagagtctataagtcttactattttgctgtttcaatgactgcttagaactaaaataaaaaagcagttgatggtgactggatagtaggtcccgggtactcaaatggagttagtgtttacagaatattttggattgaaatccttgccagatggtcctaagaactgtttacctcactgttgattttagctatcttaatgtcagcaacaataaaagaagcttgttactgccactggggagcaaaggcacacagtccttccatcccaaacggaactgctcgttgtggacagctgtgcgctacgcaacagtaagggcgataatgtagtttccgggaatctatttccagattagagaaagagaaaatataaggcaa

SEQ ID NO: 47483 - DNA, 664 bp, Bovine  19866881208832
  misc_feature (1)..(1): n is a, c, g, or t
ngcagcagaagaaatcaaccccaaagtttttttggttgtttttggccacacttgtggcaggtgggatcttaagtttcccaaccagggatagaacccgtgccccctgcaatggaagcttggagtcttaaccactggatggtcagggaagtccccgacagctatcctgatcttggatttttagcctcaaaaattttttctactgtggaagccacccactttgtggtattttgttatggcagcccaaccaaagtaagcttcatttaaagatggaagacaaggcatctggagaataagaaatactgtccccatcacactgaagtggtagagaaaggtaagagcaagggagcaccctacagagggaatttctttaaaagactctatgagctatctacgaaaatgaaatatattttcaaattgaaaacatttttcgaccgcgagcacaaagtaaaaataaaacatacataccttatagaaagttgcaaaccccagagagaccatgaatgcgccaacaatatgaaatcgcagacgtctggccagaaggccacgcatctgaggttttgccaaagcagtggacatggcagtttttcttctcgacggctagaatgagagagagctcttagaactcttatgcacaatacattttagtacctagagacacaagcag

SEQ ID NO: 47484 - DNA, 1358 bp, Bovine  19866881210421
  misc_feature (1)..(1): n is a, c, g, or t
ncatgattcaagtcaagtacaggtcctggaaccctaaccccaaggacaggtttccaagcactgttgatttcacaggcaataaataatgagaccaggctgttctttctggtttgtgagcagaatatatgtctattttttattacaaaataatattaggtgatttctcaagagttatgtttcactgatcatatctgaaacttaagaaattgttatttttaataaaatatacttaataatagagtaacccttctctatattttttcctataaattatttcttaagattctcataagcctgtgaggtgaatagagaagttattatctgttccattaaaatagtgatcactaatctattgcatataagagtgttaaacatgtaagatttttggcaattctttggaaacttacatggacattgatgaaacagtaatattctctggaaaggtaagacagtaactcagattttctccatcaatttcctggaatttaattgtaaatcttggatgattttagagtctaataacttatattaaatggatccatagcttagaaattgctgctgtcacaaataatctattacttcacttactccaagaatatgaggtaagtgactttttaaattcatagagcaaagtagaaatagacatgccaagttcatagattagatataaaatgatatagcagcatccctttgaaatacaaagctattaagagctctgtagaccgtctctcctatatggaaatgaacatgctgctcagtcacaaattagaattccacttaacagaatacatggtgcagaatgaataatcttcattcaagcagtcgacaattatactctcaatcctctctcgctgttcattatattattacagacttgactttcaaggggaatgcttgacaatggttaaaactaataccttaaaaatgtgagtttgggtacagatagagatccatggaatagacattaatatataataactggatcttctgtcttgtattctagctaagtgtttatttgctggtgatcttatctgacaagtccagagaaacagaatggtatcaactcatcactaaatgcaattcttgtgatgcttttttattcctgagagcaaatgaggtaagcaagctttttttactgaacagattgatggaataacattttggaaaaattatagggagtaaacagatgggaaatgggggaaaagtcacatgggtaagaaaagccatgagttttcactacaaaactataagacataaaggacagttctttggggaactccataggtcacttgattcaacaacagtgatgcattttcgttccagcaaaagttccaaacttcaggagtagagggagtttt

SEQ ID NO: 47485 - DNA, 1192 bp, Bovine  19866881256760
  misc_feature (1)..(1): n is a, c, g, or t
nacaacaactctatcagatatgaaacaacagtattgccaatgaggaaaccaaggcttaaagaagtcatataaccttgattcaaacacaggtagtgcaagatcaaaggataaaatctttgatctgggaattaagggaaataatacttggaataaaaagaggaaagagcattgtaaggtggaggaaataacatcaggaacgtcatggaggtcggaataagcaagacgtgctgagggtatgagaaaatcttatggttgaaacatggcacacaaattgcagtaaaggcaagcgaaagagtgaaagagaggggcataaagagaagaatagattagggcttaaatattggaaactagattggggctttattcctaggaaaataaactggggcatgggatctagtcctgtgatctgtggattatcagtaattctggtgacagtgtagaagtattggtttgaaagaggagaaacaaagggagaccaattaagatattcttggaatggcctcactttgctcttccaggaagtgaagtcaaagaaaacaagttcttactgcctaatgaaaagaagcacacaagtttttttcaggaatacaaattttttcctgtaataaatcttgttgttgttcagctgctaacttgtgtctgactctttgcaaccccctgacttccctgtccttcactatctcctgaagtttgctcaaactcatgtccattgagttggtgatgccatctaaccatctcatcctctgtcacccccttctccttctgtccccaatctttcccagcattagggtcttttccaatgagtcagctctttgcatcatggccaaagtattggagcttcagcttcagcaccagtccagtccttccaatgaatattcagggttgatttccttaggattgactggtttgatctccttggtgtccaagggactctcttaaaaaatcattattatgtatctttatataaaggacactgaattatagaattcatccctttgtttactacaaaccaaatattcatttaggcctacggtgtatgcttgtttaaggctctgcataaagcttaccaactctatagaaactgatggttttgtagctgttaggcaacatatctcaaatatgcatgggctctttaaaaaaggtagatgaagtcactttcaaacgaggtttcgggaagactaaaggagaacta

SEQ ID NO: 47486 - DNA, 812 bp, Bovine  19866881279613
  misc_feature (1)..(1): n is a, c, g, or t
nattatttattgttttaaaaaatttgtgtcattttctctttttacaattacaagcaatgctgtacgcatatccccttttccaaaatagttgtaccaactgcacgcccaccaacagaatatgagagtacttattactacaaattcatgataacatttgatagtgtgagattcttaaatttttggctatgtatttggtatgtcattggcgtgtggtgtttttaatttgcatttccctgattattgttgatgttgataacttttcaatatttagtggtcatttggatttcagctttcataagttccctgtgtatcttctttgcccacttttcttttgagagatacatagatagatggatagatatagatagataacacacatgtacacacacataacactggggggagaggatagggagcaggaaaagaagaagaaattattagaaaagggatgtggcaagactgataattgtgaacacatattatatgttctgatttttgaggcttattgcctagattaatcttaaatctgtgttccctctaactagggcaccaagattctgtgttactcacacatcctcaacaaaacatgctagtgccgagctgaaattctggcaccttcgtcaggagcagccgaggaaggatgttgaccctttcccacaaatggcaaccctcttgccgttaagacccaaatcttgcattccacagctacctgagatgcaggtaggttgtccagcgatactttgatctcttaagtttgtactaaaatgtcgatgcttgggttttgtacactagcccgaagttttatcataagc

SEQ ID NO: 47487 - DNA, 768 bp, Bovine  19866881297163
  misc_feature (1)..(1): n is a, c, g, or t
nctctggcgccatcacccagtgctactgagacatgggtgcccggcaccgagcccgggcccagtccatccagatcctgaatgtggaggagaccgcagccagcaagtgccactgaccagcggtcaagcagttccatgaccccaagatcgagttcctgctgccccaccgggtcctccgtggccagcacaagccacgcttcaccaccaagaggcccaacaccttcttttaggtgcaggccctctgtccacaggtctgcccaaataaaacttagtgggaaaacctaaaaaaaaaagaagcgagggccccttatcactgaatcctcaatgcttactatggtctctgggtcagctgttgtcactgaccttctcaccagcttccagaagtgaggaggactctatggacaaatacttcttctccacttccccagttaactgcttatacccagggcccaccctcagcctcaagttaggggtcaaagagcctcagggagatcagaaggactcagaagcaggaggaggagccctgatgtctatcagcatttgccaagaaactactgttttctccacaattctaagagcttctgatggactgtctccaggaatcctcagaatgcctaaagactattatgatttccctttaacagaaagttacataacctgcctaaggcacacacgagtagttggtggaggggcacccaacacaggatcaaggagagaaacagggagacaaggaggggattccttctttggtatgaagaaaactgagagcag

SEQ ID NO: 47488 - DNA, 1199 bp, Bovine  19866881343780
  misc_feature (1)..(1): n is a, c, g, or t
ntgctccttggaagaaaagctatgatcacctagacagcatactagagggcagagacattgtcaacaaaggtccatccagtcaaagctatggctttttcagtagtcctgtatgaagtgagagctggaatataaagaaagctgagcgccaaagaattgatgttttttaaactgtggtgttgaagaagactcttgagagtcccttggactgcaaggagatccaaccagtccatcatgaagatcagtcctgggtgttcattggaaggactgacgatgaagctgaaactccagcactttggccacctgatgcaaagagctgactcatttgaaaagaccctgatgctgggaaagattgagggcgggaggagaaggagacaacagaggatgagatggttggatggcatcaccaactggatggacatgagtttaagtaagctccaggagttggtgatggacagggaagcctggtgtgctgcagttcatgggttgcaaagagtcgacataactgagcaactgaaatgaactgcaagtccctcaaacaccaacattatctaaaggataggtactttaaagaaggccgaagataatataataatcttgtcatttaaaattcccataagtcgtatatccttaagacaaaaagtataacctgtaactagcttaataaatgtgaaagcaaataactttgattctcattatttttcttaccaataaagaagtaagggctttaaaacctcagtctgaattttttttaagtgttcttcattccactgagatccatctagtagtttaaattttgataagacttctgcagaaaggtagtaatctccactgctcactagaaagcattttttcatcttctcaatatgtctgaaataaaacacacacaaataggcacacacatgcctggtgacacaatactcaactagccaaatattttcccttccaaaatgtttcaggcaagtaatgaactctcttagaaacaaaagtggggtcacaaagagcaggatcacgactgagcaactgaacaaagaaccgaaagtgagttacaggagtaccaatgtgaaggtcagaataattcgcacaggtatgggaatggcagggatagctgtggtcagctggacaatggccttgctaagatgtccacaccctcatctccagaacctcagaatggatcttacagacagaagggactctgcaga

SEQ ID NO: 47489 - DNA, 2455 bp, Bovine  19866881366814
  misc_feature (1)..(1): n is a, c, g, or t
nttagcgaccccatggactgcaggcccaccaggctcctctgtccctggggttttccaggcaagagtactggagtcgggtgccattgccttctccgattactctaggaggtggatcaaaaaagatcttgctgtaatttatttcagagcattctgcctctcttttcctttaagagttctgtagtgtcgggtcttacatttaggtctttaattcattttgaggttattttcgtgtgtggtgacagagaatgctctaacgtgtatttttaaacaacattagaatggtctgtggcgggtgtggggatggagaccgcaagagtaagggatggtgtacttgagctaagagtggtaaagtgggttcgcacagcagttctgcccttcacacctgagggaccacagtcactgagtccttcctcgtcttttaccctccctagatgacttctaatggcacactgtctctaaaattcttagtatttattaaagtttatttttcaggcttcattcaaatgattcatgaaaatgctagaatagaactaggacactggacttccagggtttagactacttactacctgcttattcagcggaactcaaatactttttggaacagagacatgtaaagaaggtaaacacaatgcagcaatgccaaaaaccataattgcattctgaataggaggcaacaaactattcttccaattgcaaaaggtcaatacatttaatgccattagtttccggaaaatgacaggtaattttgtggtagttctatcaatccaaactaataactgcctaattaacaaccatcccctattatgatccaaaagtgacggagggcttaaataatacagaatagcataaattcaaagtgaacatttagaataggaaataaaactaaagatgaggctataaaatgaatcaggaatgtggtcctaataaatcaccataatgactaatattagaatcatttctgatggaactcccatctggcattaaacttgacagcgtccaatgtggaagaggaattctacttgatcaactacataattcatagagaacataagatggaagcaaagttcggcagaaatgcagttttttgtggctgtaaaaagcactcacagatcatcatacagcagaactgtaccaacagcatcctcaataactttctttagaatagatgcagtggttaatacagtgctagtcctagagacaattcaaaccccaagatgatggcaccatgattgaggagagggcggcatgacggcacaatggttagaagagaccccagtcctatactgtctgacttcaaaccccagctctgccagttaatagctgtgggacctgggacattgttccaacctgcctcaggtgactcagctgccctaactgtgaggtgcagctacaagagcaatctgccgagaattgagttaagcagcactgcattgtgttactatttgttaacaaggagctcagtaaaagcagttgtggtggaaactgccttcattccattccatagctagttctatccaacccaaagagccctagggagatttgagagtactgctgtccaagagaagtttctgcaaacactgccatccaaggacttccctgtggctagtgactttccaaggtccagtggctaggactctgcactcccagtgcaggctgcccaggtcaagccctggtcagggaactagagcccacaggcaaaactaaagatctcatgtgccatagctgagacctggcacagcggaaaaaaagtgctgtccataacagcctcttgtagctaatgagcactagaaatgtggctagttttgtttttaaacgtacagtgcatttgagtttcaggctcggataactgtgctaatgaaggactggatttctactttaatttaaatgaatttgagcagccacaatgatgagtggctacgacactagacacatacacagaaaatctccattgtggcagaaagtttggacagtgccaatctaaaacagcttccaagcaacactgtgaatatggttatcagctaagttttctgatgactgttagacaacaaggaactccagactgtattccctgacatctaactagaacatgaccaaacctctgttgcccagtgagtggagacccctaatgcctgacgtggagctgtctgttcatgatgtaaagtgaagagaacaaacgcatgaaggactggacaaaatgccagctaccagcactttgaaggacgccaaggaagtatccacagcaaggctgagatcctccctagaaaactgttttgaatcaacttcagagcccagaggaatgggcttgatcccaaagttccacttcatctagcacagctgggattgtctcagtttgaacaattttaaagggtgctttagccagtgctggcctcttttcttctccccagtgttccattaactttgagaaatgctacttcctggtataccctccaaa

SEQ ID NO: 47490 - DNA, 674 bp, Bovine  19866881413488
  misc_feature (1)..(1): n is a, c, g, or t
naacccattgctgaatcccattacatttgtacacttattaataagttgtgattaaggccttatgattttggctcaacaaaatggaaaatctatgttcctggtcaacagaaatagttttggaggacaattcaatggcaaacaggatttttcaaagattgattatgttttgagcaatatcagttaagagaagaacagaaaagaggtagagatgaggcttaacagctaatagtggccgtttttctacccactgaaagatgcaaggactttgttcaccttgtttgccatttgtcctggcacctaggacagtgtctggcattccacaggcacccatatttgctgaatgaatgggtgagtagatgaatgatagttaattttattcaataaatcaccttaataaataacaaagttttaataatatataatactttagttttaaagtatctcccacattgcagacatttgtagattattatgaatacctaaaaaaagatatcagaagtatctaactgataagtcataaaagcaaaagaaaaaagatgactttcaggttgttagcaaaaagaaataaattactagttttcatacttaaaatgtagaaaatacgcttccatgttaatacctggtcctgttgatacacagaagctggactgttgggcccaaagaaatacttttta

SEQ ID NO: 47491 - DNA, 745 bp, Bovine  19866881517051
  misc_feature (1)..(1): n is a, c, g, or t
naaatcgttcttattttattggaacacagatgagtgtcaagctgcagctcatcaaatggcccctacttatggaaaagatgctttcccaaagactgtgctcacctttggcacagtgagagtactttgctgggtgcttctacagcatgataattggaatctaaccccagagctgtcatcgtttagtctttggtacaaaaagaaatccaaatagcacagatagttttggaagttgtttcatttttttttttttacactgtaaaaaacaagaataaactcaataaaccccaaattctccttcctcaagtatgttcatctagactttatgatgcagtaagaaagcatcaatatgttccagggtccatgagaatcaataaaatattggaataccaagcctggaatgcattgtgatatatttaaaaggagattggggtctactttcatccaagaatatgctcataacacgcttgattttgaaaactattaagtggcaattctgaaatcttgcacagaaaatatcttagcattggaaaaaatataaattgcaacgggaaatgtcatattttaatttgagccatctcctatgtagtgcagtacagctgttgtgttcaggatattagctctaagtaatgaagcatctgcgatttccttgaagaggcaaacaaacatttttatatttttccctataattccaaaaagctaatgtgtattcagagtaaatctgtttgtcatctcactatcctttaaa

SEQ ID NO: 47492 - DNA, 1531 bp, Bovine  19866880566040
  misc_feature (1)..(1): n is a, c, g, or t
naatctgaaaaagatttctggtgtttcatttgtgaactgattaggcttgcaggtcagttgccagcatgcccttttttcttatctccaacttgtctgtttcccaggaagcatcattattcttgagtggcaatctcccttttggtccagaagtgtcacattgtggaaccagtaggtaaggaggagcttgtggtacatatacagggcagacattactggaactcttttgttatcaggaagacatggctgccttaattaatgatatgaaaaagaaacgcaatggggtctcatattttcccttaattaaatctactttgattactgggcttgttcttttaagaattaaaaaaagataaaaaaaaaaaaaaagaacaaaactgtgttgtggaatcaaaagccattagtctaagctcttctagttgacggtatttacagtacttagctgcacaccatggctcaccctcttgcgattactttatccttctgcagtgaataaattcctgtcgtcggtgaaggtcatgaataagattatgagtcttgactctgcagtaacatttttaatggaggctaaggtgggactctgtaaagggcatcttgcagtgagcataacttgaaatgaaatatttccgtcagttggcttcttaagataaaatctgtgaatccaatttaagccattattttgtaatgagtgccctctcattccttaattcatccatttccttcataacacttacattcgatatgcacctcaggtcctcttcctgtgcttccctgaagtgtgtgttttgagtttctggctttctcctcggctgaggaaaattgtcaagtgcagcttgatgccacagcctcatgagtttaggagagaagaatgaactcatcactaaatccatttttttttaatttttatactggagtatagttgattaacaatgttatgttggtttcagatgtacagtaaagtgattcaattatacatatacatgtaacctttttcaaatcttttgccatttaggttgttatataatattgagcagggttccctgtgctatacagtaggtccttgttgattatccattttaaatatagcagtgtgtacatgtcagtcccaaactccttaactctccctccctccaccaccctgcccctttggtaaggataagtttgttctctaagtctgtgagtctgtttctattttgtaaataagttcatttgtatcgcattttttttttaagattctgcatgtaagtgatatatgatacttgactttttctgcctgacttacttcactcagtatgacaatctccaggtccatccatattcctgaaaatggcattatttcattcttttcaatggctgagtaatattttccacatcttctttattcattcatcaatgggcatttaggctgcttccatgccttggttattgcaaacagtgctgcaatcaacactggggtgcatgcatccttttggaccatgtttttctccaaatatatgcccaggagtaggattacaggatcatatcactaaatttg

SEQ ID NO: 47493 - DNA, 821 bp, Bovine  19866880632356
  misc_feature (1)..(1): n is a, c, g, or t
ncggatgtgggtgcatctgcgtgaatcataagatgtgaaaaggaaagaagctcagcttaaaaagtgtttggcaaaataactagaaaagtcaattagcccagtgcttcctttttgagtcttcctattacagttttccctctagacaggagaggaccagtcagccacctcggctccgtttccttcttctgtttcctggtctataattgggctgcggaccaacatccctccagcatctcagtttggctacctgggagacctcggcccagctgctgacttaggacagacagaagccttcttctccagcccggagctcctctggatttctcttcaaacatctccccagggacagactgggctgggaggttggccacgctggctggtccgttacccttgcagccagggctgttaaccagatttgaatgctctcctggttcgtttagaattatttcttagagcagaattcctttacaagcccagaagaactgccccagagacaatttttcctgatttcagaatatcttggtgtgcttcatgcccccaggaaatgccccaacttcacttagaatctagccagaccccttggaaggagaggcagagtggcctcttgtaattcaacatcattagggaaagaacagctctttaccctttatatgctgtgagaagaaagctgttattatctctttactctggaggtacaaattataggcttgtctatgccttaatcatactgatgtttaccagtttttccaaagattactatcatagttggttattagtggtactgctgcctttaaaaccccagggaagaaagcagaagggat

SEQ ID NO: 47494 - DNA, 1260 bp, Bovine  19866880352318
  misc_feature (1)..(1): n is a, c, g, or t
ngatggggaacatgtgtatacctgtggtggattcatgttgatatatggcaaaaccaatacaatattgtaaagttaaaaaaataaaataaaaaaatattttgattcatgcaaagaagatagtgaggtacacacatgtacattataatataaacatacacatatatacatgtgtttgtatgtggtatgttattatatcttaatttaactctgtggcctctcctcacagtggtttgaactacatgtgatgtaggatgagaagaaaagaaaaaccggtagttcagttaaatacaattcagagcaaataattcatcattattatagcaattactctttaatttttttctatccctctaagcaggaacacaaatcagttcattttgagagtggaacaacctgattatctcatattagatcctttcttttgttattaaaaaaataaactacataggctccttccacctctctccccatttataaagcagattttatattctccttctgctcttcatctctcccaaaattttgatgccagaccaagagatccatagcagtggatggtccaaagtggttgtacatccattttctaaaatgtatagattgttttgatagtagttcacaaataatttttccccggctcagttaatacatggacaagtcatttatgttcaacacatttatcataatcttaaacaatcagtatgtttaaaatcgataaccaagggcctactgtgtagcacagggaacttcttcctaatactctgtaataacctgaatgggaaaagaattaggaaaaaagtagatacatgttacgtatggctgagttgctttgctatgtacctgaaactaacatggcaatgtaaaataaaaatatttttattatccttcaattaaaaacaaataaagtggaaaattttttaggtttttaaatggaaaagaaaacaattacttgagactcataaaatacttatttgaaataaaaatataaattttaaacaattacattattgaatttttataatatataagtacatatcaaagtattgcaaggctgcaacgtatttgccttatggttcatgccttctaggggctcacatttctaatagctgacagtacataaagatgtaagacaagttaaataacataaattttatttcagcatttagcaaccattacatagcatgcatgggtattttaaaatgaaatgagaaacaaaaatctgagtgagagtttacatcttaaaatggatttttctttactttt

SEQ ID NO: 47495 - DNA, 928 bp, Bovine  19866880386731
  misc_feature (1)..(1): n is a, c, g, or t
nccttttgaaaatacatgtccttatctgttctggcatattcatcccctgtaggagagttgtgtgattcaaagaacattaaatagtaaaaaaaaaaaaaaaaagcagttgagaaaacacagcacttcaaaaggcttaaatctggaagcatttcaaatatgaggtttaggattgccagtacagtttgttaatctcctaattatttgagaatgagggcacttttatgtatctctctgtttggaatcactggaaatatcaattaaacataataaattaagagaatatcccttgggaagtgaaatcatcttatacacatcatggccttctgctagtggttagtgattctttaatcaatccagaggggtttcctaaacccaagaaatttggtaaaaatgatttagggctcacttagagatgctactatcattagaactacatttatctttggaaaaagagatgatttctatatataagccatgttcttcatagtaataccaacaagatctctcaacttatatagagaacatccaattttattccacttctgttctcgctaccctttcatagtccttctgtgcataaaacattgagaaggcatctcaccagagtcacagcagccatatgcaaaccacttatcaccagataccactgttgccattgggtgtcatggcaaccagagacatgtactacagcctctgttgggtaatagtgaggctatgatcctcaagtaaagccacagatgttctgggtacatgcagggtaaattttgttttctccttttctctaatatgttgctagagagatatcaaaaactattgctgaaattcaatgaatatggttttattaccttttattaagagtccaatctctttcaagaactgggatatatgttttgagggagataaactatagaaatattcaactgacaga

SEQ ID NO: 47496 - DNA, 2989 bp, Bovine  19866880389513
  misc_feature (1)..(1): n is a, c, g, or t
nggagggattgggggcaggaggagaaggggatgccagaggatgagatggctggatggcatcaccaacttgatggacgtgagtttgagtgaactccgggagttggtgatggacagggaggtctggcgtgctgtgattcatggggtcataaagagttggacatgactgagcaactgaactgatgtacccatcatgcagataaagacatagccctccatattccctgtactaattcctttcaaaagtggactgttcgtagcctcttttaacctatagactaacttgactgcattgcattttatataagtttgataatatagtatgtattcttttgtgtctggttcttttttgttttttttgctaatatgtgtatttaagaaagtcttactgttgggtgaagtgaagatgattcttattcattgctgtttgttatcttcttgtttgtgtatatcacaatctattaatccattctactactcatgggcacttgggtagttttcactttgggtttattagaaataatcatactcagtgagtcccacattttcccaaaggagcacacaaatgaaaaaaccaaagggcacggtgtctcatgcttgctgtcttcccctatattccagtccttcacatttcactggacttattcttaaaggaaagaaaacaaccagaggacacttggcatccatcttctatctggttttacactgtgtgttttagcatttttattacttggatactctgtatagatttacctttttgaatatgctaaatgtaggaagtctaattttaatttattttttatataaaatacacaaaaattaataaacatttcaaagttgaaaatatcaacttagtatagagaaaagatcatcggactttgaattctggaaaagtagatttaatttctatctcagggactttgtttcaaaaaaccatcttcaagactaaaatttgcaatatgtatgatggagttatattcctgctgcaaaaactttttattgtgtagatattacatttgtgaaggcctttggtaatcctaagggcagtacacaaatattggtcattattagggataaacttgcaaagcaagtgggtgctaagtctgagtgttaataatagctaaaacaaatctagggtctaatctattgagattttcttcatttaattttctttcctctatctgtgtgtgtatgtgtgaatgtacttttaggtctacttttattttcttagacaacgagagagtgaaagtaaaagagagaagggaaagctatccaggaaaaattaagcttaaaattcttgccaagaactagacatgctccccacagagtgaggtgttatggttaggttatggatatccattgcccctgtctctggggactcataaactggctagatgtcctccaattcctatcctggacatttaacagctcgggtgcattgtcagcatgtgattataccctccccaagggatctgcagtttcaagcacccacttctaatctccctgctacaacagaagtgcactgcaatcaaagacaaatttgtaggtcaatgagttgaaaattggttgtctttaactttctgatttttaaattcattttgtacaaattggttccaagaaaaaataggatgggatggtgaaaaataagagctgccaccttgcattaatattcacaatattgtctacttacttttggtttctggattaatgtagctctgacttggctcctgtctctgtcaataataaaaagataataaaatggataaatggaaaccagagaatttgcaagctgcatgataagtgtgattttttcaggttaaaaaaaaatgttcatctgggaacaaactaacttaaagattttaaaagccaatttcagcttagcggcgggggttttttgaaatcttaaccactgactgaggtgtgaaacttacatttgatacagtaaatcttgtcgactgttattttaaaggactgaaatgtgcttttattgcaaaattgtctcaaataaaaaatacatttttacaatctcactctgtcataaactttcatgtcaggttttggctccacaatgcatgcgggggaagcattatacagaaataagaaggaggcatgcataataacttgttttattttccattgtaagaaacagagatggtcttatgccattgttgttatcaaaatactaaatattacatacttgatcagaaatgatcagtaagcatatctcaggtcataagactattgcttattgttgcagaattgttttcttggtttgatatactataatgccatatatataagaagttctgtgaaatgtgtttataatttctttcacttaacatatttcctgaaataattattaaaaactccaggccagaattctacagagaggggagcctgatttatatgattctcacactaacatttcaaaaattgagttttctcagaaaaggttttaaatgaattgtactgtaattaattaaattgtagatttctcactattataagtactatgatttcaagtttaaaagtagttaaaaagattccatttgtatgaataatgtgtctactcatgtctgtgtttgagaatataaggatacaaatttgaaatgacattgatagcataaccattggcatattatgttaagtgtcaatagatatgatagaaaacaaactagccagcagtttttgtctcagggccatttctttttagaatatattgtttgtttactgactttagaaatctgggcacacattaaatctattaaaaataaaataatgatgatgggaaaaataattacaaggcattgctcacatgcttcagaaataccaaaatgacataattctcaaagagaagtcctctgcccttagacttaggctttttgggcttcagtgtatttgtatgtaggtacacctcagagattcttaacggtcagttctagaccactgcagtaaagcaaatatgataaagtgaatcacagaattttttggt

SEQ ID NO: 47497 - DNA, 1502 bp, Bovine  19866880449276
  misc_feature (1)..(1): n is a, c, g, or t
ntcggacacgactgaacgactgaactgaactgaaaactaaacagggcgcactgggttctcaagaactctacaatgatactgacattttactcccacccaacaatgatgatccaagcaggaagctgccatcagaataattactgcggaacaatcataaactagaaattagtgatgtaatacagtcttcacacattccccaaattgaagacttcttcatttttcctggaaaggaacttttttttttttttaaatgaaccacatttctccttctgtgtcactcctctactggatttccctaccactttattcttaaacatggcctgagctttaattctccaatcctctgaatatttgacctacagtcctattttgcagcacttggtttgatatggcatccttcttgacttccttctcttcatagccctattttttcattttcccaacagttttttcaggaaatacttcctaataaatcattttcacaggaatccttacctcagcatctgcttttgaggaaccccaactgagataagtatacaaaaacgtgaatacatctgctcatcacaataacctaatttgaccatatgaagcacctactttattttatttttttgtcactgtcaagaggcattattacatggttaatagcttatgttctctgtgttaaatgttttgtggggttgatttctctggggtatctctcctttggtttttcaaatttagcttgtaagattacaatcttatacaatttagtgcctcaaagaccttttcagactatctgacttacctcagcctttcatagacactttgagagaaattaaacagtttagccataattgtacaaccagctagaggcaaaagctggagtgaaaagcttcttcagtgctttttctagccagtacacagtgatgtcttcgtgccacactatgaacattttattccctttatctgcctttagtagagacacaaaacagctggtcaccatccttcctattcggatagaaagtgcaagaatgaactattaaagaaatcacctccttctctccagtctagtgggtgatgactccacttagaggaaggagcaagagaggggaaacatacaatgctgctggcctgtttccatacagtctgtggataatagagctctttgatgtctggtacattcataaccaccaaactcggctttccagtcaacagaaaggctattttacactacttttgatgtgatgaaataacttaactagacatggttaatcacatagctggtgattatgccatgcaaggaaaattcattaaaataagccaagtgcctctaaaaagaacaaaggaaaactccttagcaggcatacacatagctgactcaagtgctctggcatgactcagtttttcaccattcacattcactttattttcataacatgaaacataagcataagcgctttgacacgaattctgcgttacctgcctaacttgcttattgcttattctgtgaggcagtcata

SEQ ID NO: 47498 - DNA, 2141 bp, Bovine  19866880489188
  misc_feature (1)..(1): n is a, c, g, or t
nagtttggtaattagtatagtgaaacagcttttttatttgaaaaaaaaaaaaaatatgtcaatctttgtaaaatgtgttattcatgttcctgccatagaaaatggtgtactttgaaaacagaaacctttcttttttatgaggtcaagatgtaatgcacatcagtgtagtattgtgttgtagatcaacaaagacttcagaggtaactgcggtattgagagaaaagtagtgcttcatggactagtcagaagaggtatgctatttctctgacatgccatcgctgtgtgaccttaataccaggaggatgtttaagtgtgccctttcattacatatacccaaactgtagttctgcttttattaatacattttcttttcttttccccagtggcatttctgggctttactgtcattttatatggctatcagtggttccaagtcttgccacttcaattgtttttatttttgcttgtactgaaactgtcaacaattacttatctacaaagtgtctaggttcactttttttttttttggtctttgattgcctttaaagcttttcttagccttcaaaaatttaggaattaaaattcacaacgctggttcaggataatgccttttaacagtccaagcacaagttaacctttttcatattttggttgtcatgtttttatgggcataagacaaaatcaggattatagtatacaactatcattgctatatactatatatacaaccattcaaccaaccttgaagtaatataaccttcaaaagttcaatatggaaacaccttaattctgccatcttctccactggcactgcttatttaatagaagagaaaaaggaaataactcacttctttcctattttcccagcctgtacttccgctctcctccctagcttgccaagagaagtttcttatctttagggtcatggaaaaagatgtaaggagcagtaagaaacaataaaaattcttgatttttactcttcgagctactgcaggcttctcttaacccaggcttgtttaaagtttatttgtcctttcttgatacttcagtgggttcctaggctaccttccttcacgggtatagtagcaagaagaagagcctcccaaagatgtccatgtcctaatccctagaacttgtggacatgctacctaacgtggcaaagtgaaagtcgtcagtcgagtctgactctttgcgaccccatggactagacagtctacgaattctctgggccagaatactggagtgggtagcctttcccttccccagggaacatggcaaaaggactttgaaaaagtgattaattaaggatctcaagaggagagattatcctgtagtatctggctgggtctaatgtcaatcataagggtccttctaagaggaagagtcagtacagtccaaggcatggaaggtgaagtgatgatggaagaaaaggtacagagagaaggatttgaggattctaagtcattggctttggaaacagaggaagaagccacagacaaggaacgcaggtggcttttaggagatagaaaaggccaagaaacagattattccctaaaaggctccaggaggaatgcagcttgacctcacttggacttcagacttttgacctctagaactgtaagagaataaatctgcattcttttaagccactaaatttgtggtgatttgtttcagcagcaataggaagataatacaaccaacactctgatgaagatgaatgaagcttttacagaaaattgcttaggattcctgcctcagtccttgagtagccattaatataccaacaggctatgtcggctgaggcctcctcacctctctagttagaccttttgggcaagatttaggaccatcccagcatacacacccgaaacatatattttgacccaatgtagtgacttcttaactgcaattttccactttatttgtacagcttggttcagacaccttctggccctttacctttttccagtggcagtaactcactgtgtcccccaagctctatggaactcttatcaaaacaactctaacagatctacagtaaagatttagcaattctctcccctccctaacaacttccactagagaaaattctctcttgagactgtaacttctcttttagtctcttcaatctcagcttaaaa

SEQ ID NO: 47499 - DNA, 2144 bp, Bovine  19866880495064
  misc_feature (1)..(1): n is a, c, g, or t
ngagcctggtaggctgcaatcctggcgtcgctaagagtcggacatgactgagcgacttcactttcactttaggaaactataaagatacctctactctggatgttgttatctttcttttgaaaagatctctttttgctcatagcagacagttacgatggggactggtaaccttagtccattctcagtttgagctcattcaaaggggttctcagtcttggtaaggttggtctatttctggcttgtccttcctccatgggtgctgccctttgaaattaccatgtgaacattcccaagtacttgtactggtcaggctttatatgcaatggttccctcagccctgttgagacttagcttgtcattctcttagttgttgctttttgcttgagttttgccacttggcttctctgcttgcagtcttttgaactccttggcttctcagcccctagactgtaagatttgaatcagcaaatgccccaaggagaaaagctgggccaaatgttattcctgtgtctatttcccttctctctagaacttggcccacacgtctttgtgtctctaacattctgatgccttcaaacagatacttttctactttatccaggttttctaacatttcttcagacttcatctgatcttattttattactgaactatcaccacaattatccctagaaagaaaattttatgttttaagttactttgttttcgatatttactcagtttcatatatataccttttacctgatccttccaccttattcctgtattaccagtaagatggaggtaaggtggaggctaagaatattgggaggaaatcactgatgaattatttgtcttgttcttttatttctcctctccttgtctactcgggcagcctatattggcctttcttgatttgacccagttgcccaaataaggaacccagtctggcaaagaaagatctgatttcactctcagagatgtctgcatgttaggattagctagatggtgaacaccatgccagatttctttgggtgagacattggcagaattgtgcaagctctttaatgtgccttctgccaacattgctcagactattcagattttctaaggtgctagaggtctaacctttctacttgcatatcagatgagcccttctctctttcctgagcttatttgtaggaggtcagcccttggtttttctctttgcccatccaatcatatttgttcatgaatttcaaaaagtcttcaagatctctctcttccctccctttctctcttttctctttttttaaccaatgctgttaaatattaactatatatttgcatatctcttaattacaaaggaatattagaaggctaaatcattaaatatgaaccccaccaatctatgactcgcacagcactctcccccaggcctaaggttgtgatatccattggctttattatagtatcttatatgtttctaaatttgtaatgatttagttaattcctgagttatgtgacaataagaaatcaatcaaattagcattatagtactgtggcttagacccaaggaccagaaccaagggctacaaaaacctgtaaaccagtaagttccatgtatgctttatgcttaatgagtgctgagcgtgaatgggaagtgggggaaatggatgttaacttcatatcacagacccttgtacgaaaatgaaaaagaaaatgccatagctcctagttaaagtcattaaaacctttttatataaagaagaataacacataagaaaaacaacataccctatatgatggggtcaatggataattaattaccaggtcagggaggacaaattagacttgctatgggatttcatttaaagaagggtttcaaaaagcactgccttcttctgtgaggaccccttagatgaggtaggattgagtcttgaataagtttataagaaggacagcaaagagccttcagggaagggacaatacacaacatcaggagtgagcacagagggcttatggaatagggaacaaacctggctgaacatacgagtaccacatgttgggggacctgagggaaaggctgggatgaggttaaatgaaatacaattagattgaagagaaatagagggaaagacagatgggagactgtgaaaagctcctgaaatgtaggtccacctagt

SEQ ID NO: 47500 - DNA, 2424 bp, Bovine  19866880529008
  misc_feature (1)..(1): n is a, c, g, or t
naaccgcttccccatccccccaaaagaaagaaaaacagaaacaactccctttgagaatggtcacatccacctatgcaaagtcttcaaagtcgcctcagaaactcgttcttttattggattttaaaaataaaaggatcatgctgttttatttttttgagtgttgtaggggtgtgatgtctatgagggagcagggagattagtatggtggtactgaacctgaatgaaagctgataaatggaagtcagacttcacccagcatcccttaggtcagagcgaaacagagcaggaccctgtggccctggcgccgccgtgccctctgcctgccttttgtctgtggaaatatcttagccaaagagtaagtttcatcagagaggtgaggacatgcaggaacaaaggaaaagaggagatcaaataataataattaggtaaagtcagggacttttagttcctccccaaggtctacagataatattctgagccatatcctgtgtgctgtcttgtaaagactggaacccccaacaggtggaagaggttaactacatgttgaccggcgatgacaccccactccagcactcttgcctggaaaatcccatagatggaggagcctggtgggctacagtccatggggtcgctaagagtcggacacgacttgaagtgacttctctttcacttttcactttcatgcattgggagaaggaaatggcaacccactccagtgttcttgcctggagaatcccagggacgggggagcctggtgggcctgccgtctatggggtcacacagagtcggacacgactgaagcgacttagcagcagtagcagcactaattaaagagtttctgaagcctttttgagtgacctgagaggtttgggcttatttgtttctaggtttgtattttgataaaatcgtatttcctggagattttgtttatttcaaatagcttttgtttatattcaaatagaataagggaactataatatgactcattccttttggttgtacataagacaagctttgaaaacaaagatttcaatagcaccaagttccaacctacaatctcttacatgaataatgagactttctttccacacatagaatattaccaactttccaaacagaattaaatataagtctctggggtcattgttcactctccaaccaatggctataagacacttttatataagattctcatctaaaacaaagaatgagacaaaatctgtccaacaatagcctatgactcaacagtgcttcaaccattcatttttagagtcgggcaataatttttttaaagctctgtcaaagcttaatacacacataattgaaacagtaaaggggcaaagagaatttaattttctgattctcaacatgttttgctgcagtgaggaaaaattacaactattgttcagttatttagtgtgttattgcaacattatataacacagaacatttattgttatagaaagtgcttttcacttgaaagtcccaagtcataaaaagttgtgcaccggttattatcatttaccttttctttaggtacattacttttcatatgctttcattagtgctttgctccctagtgtgctagtaacttaaagtctacttgccaaaactcagctgaggagggaaaaataaagttattcttgcttcaattctttaagttggaacaaagcattttgcaagagacggtagttgtaaaaggtccagatggaagagcctataaactgtggccagtgagaatagcattgctctcctagatctgcaagatttaataggcttcagacaattaatagaggctattagagttttacgtgatcttaattttgcatagtgccctaacgatgactactctaaaatgcttggttaatcttttttctccccacccccatcaaagcttgatatttggttttagtacataatggttttttgttaccatttttcttgggacaagggaaaacaatttgaggtaactatcttgagtgatttgcctaaaattagaagactgagcaaatttatttatctttttctgctgccatttcagataatctaatgactgttacttcattacaggaaatgagttaaggtcaggaataagcagaaacaatcaatatgctttcaaaatacgagatttggggatgaagcactaaagtttggattttactatctgtgttattttattttagtatttagaaaaccgtagtataaaaagacaagacaatagaaaacctgaataataacatccaggtaactcaatgattttcctgggtcttttttcaaagtttatgaagacagcaaatggatgattctgaaagacaataaaaacactgaaaatgacttaacacagaaagaaataggaaaaggagacccagaaaattccctggcagtccaggggttaagattttaccttccaatgcaggggatgtg

SEQ ID NO: 47501 - DNA, 2247 bp, Bovine  19866880537510
  misc_feature (1)..(1): n is a, c, g, or t
ntcacacactagcaaagtaatgctcaaaattctccaagcgaggcttcaacagtacatgaaccatgaacttctagagttcaagctggatataacaaaagcagaggaaccagagatcaaattgccaatatcagttggatcatcaaaaaagcaagggagctccagaaaaaacatctatttctgttttgttgactatgccaaagcctttgactgtgtggattgcaacaaactgtggaaaattctgaaagaggtgggaataccagaccacttgacctgccttctgagaaatctgtatgcaggtcaagaagcaacagttagaactggacatggaacaacagattgattccagtttggtaaaggattacatcaaggctgtatattgtcaccttgcttatttaacttatatgcagagtacatcatgagaaatgctggactggatgaagcacaagctgaatcaagtttgctggaagaaatatcaataacctcagacatgcagatgacaccacccttatggcagaaagtgaagaagaactaaagagcctcttgatgaaggtgaaagaggagggtgaaaaagttggcttaaaactcaacattcagaaaaataagatcatggcatctggtctcatcacttcatggcaaatagatggggaaacaattgaaacaatgagagactgtagttttttgggctccaaaatcacatcagatgatgactgctgccatgaaattaaaagatgtttgcttcttggaagaaaagctatgaccaacctagatagcatattaaaaagcaaagacattactttgccaacaaaagtctgtctagtccaagctatggtttttccagtagttatgtatggatgtgagagttggactataaagaaagctgagcactgaaatatggatgcttttgaaccatgatgctttcttctctcaagagaagattcttgagagtcgcttggactgcagggagatccaatcaatccatcctaaaggaaatcagtcctaaatatccattggaaggactgatggtgaagctgaaactccaatcctttggccacctgataagagaaactgactcatctgaaaagaccctgatgctggggaagattgaaggcgggaggagaaggggacgacaaaggatgagatagttgaatggcatcaccggctcaacggacatgagtttgagtaggccccagtagttggtgatggacagggaagcctggtgtgatgcagtccgtggcattgctaagagtcggacatgactgagtgactgaagtgaactgataccagatggaaatgatacctcttccctcttttcaaggtattatgaagctcagtagagataaggaatgtaaaagtaccttggaaattgtgaaattcattgcaaatgtgtattgttcgtggaattatactccaaatttcaagctctttaagaacaaagactatttctctgtccattccaagaatatccttacattgcaactgtttaaaaatattttctttatttggaaaccaacccaagatcacttttacataagttggaaaaaagtacaacacatttccctcacacctcaaatatcacagatggaaaactgtcattttgcctcactgttttctatgctaaaatgatttttaaaatgtagcaaatgactaatatatgcctaaaaaaatttaagattttaactatttctgtttgtgactatttttcaatgaattaataactatttcttaatgaattgaatgtgccaatgtcaatagagaacccattttttttctttcagttttattgagatacaattgacatacagtactatataaccttaaggggtaaacatagtgatttgacatacatgattcatgaaatgattaccacaataatttttgtgactgtccatcatctcaaatgaacagaaaaaatacagaaatagaaaaatttttttccttgtgatgagaactcttgggatttactctcttaataactctaatgtatagcatagttagttcagtcacccagttgtgtctgaatctgtgaccccatggactgcagcaccaggcttccctgtccttcatcaactcctggagcttgctcaaactcaggtccattgaatcggtcatgccatccaaccatttcagcctctgtcgtccccttctcctcctgccttcaatctttcccagcatcagggtcttttccaatgagttagttcttcacattaggtagccaaaaacagagaagtgttaattatatttatcatg

SEQ ID NO: 47502 - DNA, 1299 bp, Bovine  19866880603121
  misc_feature (1)..(1): n is a, c, g, or t
nttgcacagagaaaatgccatatggaaagggagccccggagcctagattctaggtttagctactcttctgcttcagtttataatcttgggcaattcgtggaccctccccagggcttctgtttcatgggaacagtgatagtgataggaaaaccttttaactcaattgctggctggggatcctctaagaagtaatgagatagtgtctatagagcatattgaagcccttagacaaaatgagacagataactaagaaatactttaaggtattttaaaattggactccaggatttttaggattttaggattagactccaatttggatttttaggattagactccagtttggatttttttttaaggtaggctgctcaaggctgatttatttctcagtccaaaggtaacaaagtcatcaagctgagttgcactacagattttaaaataatacagttatctttatcaattatgagattgattctggcaaacaaaactaatttctatttataatgaggaaatatgaaggaaattatgttacacagaaatggacagaatgtaatttatttcccagacacaaatttatttttcagttcacttttggtttaaagatgtctatgttaagtgttcacgcttcaaaaattcagtcagcaattttttagcctcattttattgttttgtcatgaactgcctttgagtttacacagaattcaatatttgtgaaatatttctaaaatatttaacacacaccaacttattttaatagtagtaataaagaatacccatctcattgtggttggttatttaacaactcgagtcttctaaaacagtatatttaaacacttattgcattttagatcagggggggagccatttaaaaactgatttagatatctaactaatggacataaatatgctaatgatatatgaataaaagcagcttgcaaatcaatatatgtagtataatcctctatttttgaatatcactaggaaaagtttttaagtctatacctggagatatttacattggttatctgcataatgagatgtctagaatttctagtgtaaaatagtttttctgtatgttcagaaattccacacaatagtaaaataagctaattttattttaaaatataaggtactttatacagaaaagtggattaaagattcattgaacatgccccggcccatcagaacaaaacccagtttcatcctaagtcagtctctcccatcaggaagcttcaataagcttcttatctacatccatcagagggccaacagaatgaaaagaacaatcacagaaaacta

SEQ ID NO: 47503 - DNA, 1015 bp, Bovine  19866880829889
  misc_feature (1)..(1): n is a, c, g, or t
nttaaggtgtgatgagcaaaaaaccttcagcctgtgaccaaagtcattttttaaataaaatattgactataattctttactaaaataagtaaaaatgcatttgaagagaaaagaaaccaagctttgtccagcttaagccatccggttcccccaagtatattctccccacaaagaagtgtttatcacaggcttgcacacagtttggaaacatattaagaattctatttgtttctcctctattatcctattccttttacatatacttttttttttagttatacacttttagagtctataattagtgaactgtttctcaaaaacacaaagccaattctaagtaaacttaatttgttatagtttcaaagtttccaacaatataaaaacaaaccaataacataaagtaaaacactatagggaagattacctaaaaaatcaaatggttcaggtaaatcaggctactgtgagtttaggtgggcagacatccatcacacacccatacacacatacatgcatgcatatgtcatatgtgtatgcacatatgtaggtatcttttcttaatgtcatgtttatcttttcttaatgtcatatcatctgcacacacatacatatacatgcacatgtgtcatatatgtatatgactatatataaagatattttgcatatatattttttaatgtcatatcatctattgcactatgttttaagatggcaataaattcaagttggaggaagaagttttccatagatgtccctgaggacagctgattataggtctgaccttttgagattctgtgtatttcccacttaatcagtgctggaatgagcttctgctaagtgggacctataggattcctatgggaaaagtgaagccatttaaaaaataatgagcctctcttccaccccctctgcctttccattttgagctctattaggccatgatgacagtcttcatctgggctacacaaaagcatagcataagcatatactgttttgcagtatacaggggaacagtggg

SEQ ID NO: 47504 - DNA, 916 bp, Bovine  19866880867518
  misc_feature (1)..(1): n is a, c, g, or t
nttgttcaattttttttgtacttttaatccagtcttctggtatttgaattcaacttatttatatttactgaagttaactttatattaggatttatcttggctatttaactttctattttctatttcttatactttcatttctttctgcttttccgtctcctcttatatgatctttcattgtatagattgttttatttggaagttatatagtgcattatagttttttcttctagcagttaaatgtaattcacaaagacccacacttaaagtcatttcttactatgaatattctaaacatcaataaacatcaatatttttcagataagaaaaatgagctaaaatgatctttcctttctctgggcttcccttgctgctgctgctgctgctgctaagtcgcttcactcgtgtccgactctgtgcgaccccatagacggcagcccaccaggctcctcagtccctgggattctccaggcaagaacactggagtgggttgccatttccttctccaatgcatgaaagcgaaaagtgaaagtgaagtcgctcagttgtgtccgactcttcatgaccccatggactgcaacctaccaggctccaccgaccgtaggattttccaggcaagagtactggagtggggtgccattgccttctccttacctattcatatacccactcctcactgaaaattttatagcatggtattgaattaattagttagacatagttttgtaagaagtgttttcaaagaaggtttttatatggtaacccttatgatgctttgtctgtctgatatcttcattgtgatttcatctttaaatgataatttagcaggataaaaaattctaggatcatatttattttccttcaaaggttgaaattattactccgttatcttcggccgcattggatcaagaaacct

SEQ ID NO: 47505 - DNA, 1049 bp, Bovine  19866881041294
  misc_feature (1)..(1): n is a, c, g, or t
nctcaatgttatgtggcaacctggatgggtggggagtttaggggagaatggatacatgtatgtatgtatttatggctgagtcccctcgctgtttacctgtaactatcacaacattgttaatcaactataccctaaaacaaaacaaaacaaaaaagttaaaaaaaaaagagaatattagtagttagtgggaaaaatatatgatcttttccctcttattccaatgtgaaaatacatgattcactaatcttacatagatgtaagacctgtgttttaatcgccactgtatatctagaacttagcaccaagaatctggatcaaataggtgatcagtgaatattagacaaaatagatgtcaatgggtttttaagagacagctaagaaaagtcaggaacctttgctacaaaattattgaatttttaagcaaactagatacatacattttgaactatcaaagtcttggaaagtgttctaccctaaatccttcactttacataagaggaaactgaagctgaggtaaagagaaaactaacacaaggacacattggtacctaatagaagcccttgaattaaaatccagatctctggctactcacttgtgtcttttgcctggattcttcatgccaatagcttgcttttctcagaaattaaatggcatggtatttaaacagaaaacctcagcctggctgtttaagtctcttgtgttcttttctcttatttgctctcccttatctgcctactctctttcttatctaagcagtctcactctccttatcagaggattggggcacagttacttgacatgtaatttacatccactgaaagcctagagttacatggtatcccatcttacagataagaactaccaatcaggataaggctttagttcttagcttgtactattaaagtttacatctgattactaacttcaaatatgttactacatttgcatatttgccgctgcagataaaatgctttggtgaggtatctcagggcatcagcgttcctaagtctgtattgagacttaattaggaatttttacttctcctaga

SEQ ID NO: 47506 - DNA, 4157 bp, Bovine  19866881068897
  misc_feature (1)..(1): n is a, c, g, or t
natgtatttggagtgaaatggtgtggacccagtaaagcagtaagcaacaccctgaacagacctttgtagaaatgactgaaggccagggtgtatgaagaacagattaagttggaatacttattcgataacactcctgtggactttagcctgattcagatttgcaatttgtgtgtgtgtgtgtgtgtgtgtgtgtatgtatgtataatgtttagcagttaatgtatcatgataggcatgacactgaatttaagggactgagatataattcaggtctggttttagaaaatgacttcattttctagcataaaatgttttcagggtaggtaatctcccatctctaaacttcagtttccttttcttgcatatgttgtccagtcacttgagttgtgtccgaatctttgtgaccccatggactacagcacgcaaggcatccctgtccttccctatctcctggaatttgctcaaacttacagtcatcctgttacttgatctttacgtagtaaattctattttttatgaaaggttttctgttttaagtggactaaattaaactttctatatacatcacagagcctctttatacgtgagctttctttcccctgtccaaacttttgcaattcctggtaacctccaaggtttgtggcctctggagaattcaaagaactacatttaggaatttggtttgttgctctttcttccctcctacaactcaatttttttgctcatacacacccagtgtcacaaatagaattggtgtctacaattggaaatgcaaaagaccttgggatataaattgagttgaatatgtagtgattgggtattttctgttgatgaattagtctttataattttgggggtcaagatgtgcttgagttctcagtcttagggttcacaacagttttatagattggaattctactactactctattgtttccaatacatttcacaggagcaaaatatcttcagaccactaaacaacatctacttgcaagtgaagagggaacaaaagctcataaaactgcaataaaatatttatttgtcttcagcaataggattaattttatcactgtagatttatgacccaagaaattcgttggtggatatttaatatatcaaaatagcagaacaaggagcttgtattaagaaatgtgttgtgaaacttgtgatttaccagagagaacagatttttttccatagaacttaataaaacagcaacaaaattgaattagcttggcataaagtttaattgcctgacgaaagatttgatactgctgttgcattactgtttattatatataacatatcttggacttgtggatcatcatcccccatccccacccccagactgactgggaaagctgatgatggcagtaggattgtagtgttagtgtctaggaatcttctttttgatttcctcttcctaacataaaggaggaagagttcactgcaatgatctttccaaaaaggaaaacagaactgtatagcttgttgcctccctcagtgcaattcctttattgaaagcctctctcttcaaaaattccatagctcttcagtgctatagtaccttgtgagagtgtgccttagtgacatccagcttatgcatctgggtttttgtttttgtttttgatagaaatagcctgatagcggaaagtcataaaagaatatagtaaatctacaaccttccaattttctctattttgagttgtggctataagtatgaattactgtctttctgttcatattgtgtctgactctttgtgacgccatggactgtctgtggaattctccaggccagaatactggagtgggtagcctttctcttctccaggggatcttcccaacccagggatcaaacccaggtctcctgcattgcaggcggattctttaccaggtaagccacaagggaagcacatatatatatttcttatcttttgaggtcctatacgaattaggtacacacttaggaaaaaaacacagtctcttgagattgtaatatgggagctagacatctttatgttcagaaacgttagaggtatatggtctgacagaggcagaacaacttcagtccccataattcagctactacagaatttgagaatagagccactaaattgatgatatggccatagcgtttacaaccagagaccgtctaagttcttatccatgaaattcgtaacagctaaccttcttgaggactgctttgtgaattttcaatcagaaggacagtccccaaagggtggctgagtctggatcattgttatggaaagtgattgagtaagtaaaaatatgtgtcatgagaagaagcagccagtagcttccttttagttttattcgaatgagggtaaaaagaggatttctttttttgtttgtttgtttaatcctagtgtctcctggggtcttgacaatttgtgtttttaaagtatgtcatcaagaaagcattcactttctgtcacagatctgattaactctctcagccatttgcatgttcttgatagtagaagcatatgtacatttgatggagtctacaggagtccagaacattgaagcttttgggcttagtcatatccagtgcttttaggccaccttcagccctgttactgattatctacctagagaagatgctaaaaataacacaaaatataaatttgactcaacaattagccattcagactaaaaattctgttcagacattaaaaaattaagtccataaaacctgagtgattttatggcataaaagagattatcaattaacttcaaagtaacgtggttatatgaatgctagtgtctctctctctctccctctcagatcctgattagaataaccaaatatatttaataatagggaaaaactcacatccgtgcttcttactaaaagaaaagattatatgactacaccatagaaaagaaaaagtatacactgttgcaaaaaagtattcacagaagttgaaagcaaagaatgaacaaagagatacaaactcatttaaataaaggagtcattatattaatgccaaataggtagaaataaatgcccaacatattaaatgtaccaatactactgcattattgatgaaggacacaatcttccaagaaaatataaataccattattccttgcattaaaataaccaacataaaaatacataaaataatcaaaatacataatctgtataaatctaaaagaagttgaaagagcttccttggtggctcagatggtaaagaaatctgtctgcagaagacccagtttcaatccctgggtcaggaagattccctggagaagggaatggctaccaactccagtattcttgcctggagaatcccatggacagggaagcccagtgggctataggccatggggttgtaaagcatcagatactattgagtgactaagcgtgcacacacacacacacatacacacacacaagaaaagtgaaaagaacacaatactaatagatgagtatttttacaggcctggggatatcagtaatctacaaataagctagtaagtaagccaatacccttcagagtaggattcttaccctcatctcttataaaacactagaaaaatttggttttattttgagctataatggaagcatcaatatactacaaaatgcagccatttaagagaaaatattgtctgaccataatacagagggaaataataaaacaaaatgaataatactcaataacttgaccatctcccaagttttgcaggactgtgttgtgactttctttctgtagaagtatatatatatatatatatatatatatatatatatatatatttcttttttgtatttgttttcagagaatttcttatctaaagacattctatggccatcacagtgacatcatttagtgcttttctcttgtggttcataatctatgtactgtaattctttcctaatagctctagttctggtaacacaagacaatgggttaaaatctgagcctttcacacttgcattgaatacagtgtgccattgtcagcactaaaatgccacttaattttgttcctttattcttatacatatccctattttcaaagcccttttcattttttgacgggtaaaaattaaactgataatcttcctaactggttcttagaccaaaaggaaatataaatgtaagttatataatatataaaaaggtcagt

SEQ ID NO: 47507 - DNA, 2527 bp, Bovine  19866881078260
  misc_feature (1)..(1): n is a, c, g, or t
nttttaaaagatatatcaatcaatatgaactataagaaatctaatatgagtgatttaaaactagaaaaaatataattcatgataaaattcatcctaaaacttaaagaggttatgctgctgctgctgctgctaagtcacttcagtcgtgtgcaattccgtgcgaccccatggacggcagcccaccaggctcccccgtccctgggattctccaggcaagaacactgaagtgggttgccatttccttctccaatgcaagaaagtgaaaagtgaaagtgatgtcgctcagtcctgtccgactcccagcgaccgcatggactgcagcctaccaggctcctccgtccatgggattttccaggcaagagtactggagtggggtgccattgagtaaaagaaacaatagatcaagaatatataacaattctgaacatataggtacctaaaatagactgtaacatatgtgataaaacagctgctagaaacataaggtaaaattgaagacaaaaaatttaaaatacaagattactattttactgcaagtttcttaaaaccatataggtcaagcagaaaaaatcaaggagagataaaagtttaagtaatgctattaataagttcatactaaatgatttaggaagaacttcatataaaacaaaaacaacaacacattttttcaagtcgagaatttcacaaaaattttcagaaagaataaacacattattttaaagaaacaataacatcatataagatagagtctcctatgataatgtgatatgcataaaatcaacagcaaaattttgtttatatgattattaaaaacaaatttaagaattatatacaatcacccttgaattaacgaggaaatcaggagaaatgtaaaaatgcttaaaaccaaaatgaaatgacaaaacactattgctttaagttagagtgggtatttttgcaacgctccctttcagttcagttcatttcagtcactcagtcatgtccagctctttgcgaccccattaatcacagcacgccaggcctccctgtccatcaccaactcccggagttcactcagactcacgtccgtcgagtcagtgatgccatccagccatctcatcctctggcgtccccttcttctcctgcccccaatccctcccagcatcagagtcttttccaatgagtcaactctccgcatgaggtgaaagttattaaaccaaaaagctattgtttggataattgaaggtgtatgtgtgggtatataatttttttttttttttttactttgctattatgggacatttcaatggtggcaaattagagtactcagaggatgaccttaaaagaaggaggctaaaattgggagacaaaaagagttacatgttgtttagaatgagttatatttaatgagcttaggtaaggttatatctacaaagccatataaaggcacacctcagagatattgtgattttggtcccagaccaccaaaataaaaacagtatcccaagaaaatgagttaacacagtttttctgctttccatatgagttatgtttacactatattgtagtctattaaatgtgcatagcattatatctaaaaagcaatctgataccttaatttaaaaataccttgttgctaaaaaccatcatctgagtcttccgcaagttgaaattttttttttaatactaacaccaaatatcactgatcacagatcaccatggcaaaaataataatgaaaaagtttgaactgttgaagagaattaccagattgtgacatagaaatgaagtgagcaaatgctgttggaaaaataatgtggataaacttgcttgacacagggtggccacaaatctttaatctgtaacaaacacaatgctgtgaagtgcagtaaagcaaagtacagtaaaatgagatatgtctttaaatgtatgtgtatgtatatgtgtatgtgtatgtatgtgtgtgtatcaggctaaaggttagttataaaatgtcaacagttagtttcaggggcttttacactttctttctgtttaccctaaaaccgtctgtatgtcagaatcacctgtggaagcaaaaaaataaatgaaatccggatacccaagacctacctctgaagattctcattcactggggactggatttcctttatgtttaaaagtctctacaagtgattctgatacaatcatagacacagtgtaaagcttttgctttatatgaaataatacctgattattttatagttgtattaacatgttctatttttgatgggtaagtctgctgtcaaaatgcactccccactctgaaaaaagaaggaactagtactctctactgccacttggtggcagcatacatatattgcaagggcagttatactgtaggagtccaatttaatggaacctttagaattggaatattataaacagatcatgtagtcaagcttccaacttttatagctgcgaaaactaaggcccatataaatgaaataattgatctctaaagagtgttaggaaagagtataaataaaaaatatctagaacttttaattt

SEQ ID NO: 47508 - DNA, 1315 bp, Bovine  19866881164044
  misc_feature (1)..(1): n is a, c, g, or t
ntgagattctccaggcaagaataatggagtgggttgccttgcccttttccagttcttcccaacccagggatcaaacccaggtctcccacattgcaggcaaattctttactgtctgagacaccagggaagccctcaacccagggtaggtcatctgaaaaaaaaaaaaataaataaataattagcataaattcaagttttccctgattttttccttttattttgttagatttttatttagaagtataataaaaacatcttaaatagtgatagatttactatccccctgtttttcagaggccatgtcagcattgcatatagcattacattctagacctttccagagaacaatttggaattaaaatacttgatatcctcatttgattggtaaatataaatttgtgtcattgttaggttttttttctagctttctagaagcttaaagtttcatagatgtggtatataaatttaagaaaataaacttctggaccctttaaggaatcaaataatcttaataggctatcactgcctcattagttaatagaacaggaactccagaattcatccctctactttacatgtcactatactgttaaaggactaatcttgattatgtgaaggaaaacaatgttctttcttcttagatgtttcagagaagacttttaatcagggcagcatttttatctaacttcctgtacacagactgtgtgatgccttctagcacatcagatgccaagcttacattaatatatatttcatcataatactgagttacccatttaaaaactacttatgtagagaggacacctattatagaatcctggttcccacatttaccagctgggtggctttgccaaagacacataacctctctgaatattagttttctcatccataaaatgaggggggttaaaatggagtaactctgaaggggcttcttgctccgaaattcaaggactcaatttcgaatcattttaggtttcctactttgccagcttaattgactgtctagttatagagtgcattttaattctctaaatttatcattctcttcagtttcatttagaagactgcatcattatttcttaaagagcatagtgctttcactctgtcaggttccaatgtgaaagaatgtggatccgtcctttgaccttaaggagcaagtatcagatactagatcttaatttcaagctccacatacttaaaaaaaaaaaaaaaaaaaaaccttatagataggatactgatgccaaaatcttggctctctgtgcaccagtgctgaacaagagtacagggacagacttacggaggggaaagaaag

SEQ ID NO: 47509 - DNA, 1423 bp, Bovine  19866881408459
  misc_feature (1)..(1): n is a, c, g, or t
naacaatggtaaatactactgtttcttccccagaacatgtagttgagagagcaaatacccttggggaggctgaatttagtttctttaataccagtttggcacattaaaagtgttacccatgaaacactgaataagacacttcctcatgatagtatttctttacatccctcataactttctatttcccagagatctggaaacagcaacaacaaaaatgttggcaattcaacttctatttattttttagacttttcaaaatggaactcttcactaactagccttagggtgcaactgaaataagtaaagaatacaataaattaaaattctcaaaaaatagcttaaagcaatattaaaacagcatgacaagaatcattaaaatagtgaatatccattatatcttgctgcatcgctgcatgtggcaatctgcgaaaattcttttgcatgattttatataaggtcaacatatggagaatttatcaatttctagtaggcactcagtaagtgcatatttgggttagtgaataaatatgtaaataaatgcttaagcattcagggacaataatggaaaggaaaaagttttatagactgattagatgtcttatggaacctgaaaacctagttttcaaagagactgaagtattgatttgtatcaatggatatttaatttccattaaattttataaattagaaatacatgctaatcttgttactgattggaacatataaatttttttaagtatacttgatttacaatgttgttttattttaaatttttagctatactctgcagcatgtgggatctttgttccacaaccagggattgaacccgcacccctggcattggaaggtaaagtcctaaccactggacaaccagggaaggcccttgattggaacattttatgagatatgttttctttaagggaaaaataatagcagaagcaatgatctgtttgtagcattttatagtcttaatcactcttgtcttagatataagtaataaaaaccagtattattaaaaaaggcataaaatgttttgattaaattcagaaaaaatcagatatatcatgaaagagaaagaatgaaaagcaaaatattaatgttgtataagctaattctaactaaacaacccatttaacacgcccatatttaagatgatgtatgttatgtatctttcttttttttttaatcatgctgaatttattgacatagggtcactaaccagagattcaggattcaaggctttagctgaagcagttaagaagagctctaaaatgctggttgggtggccaagtggctggactcaaaatgtggcctacattaaatggagctgaatttatcatatattgtagaggaaagtatttgaaggcttgaggagattgcaatgttaagagtatatttatcctgtaattccagctctccaacc

SEQ ID NO: 47510 - DNA, 2649 bp, Bovine  19866881531278
  misc_feature (1)..(1): n is a, c, g, or t
ntttctttcttaattacaaataaggtcacgaaaaccacttcaaataatcctcacaactttgcagatattgctgatgaccaaagctgtcaccaggtaagataacataaagaagagagatcattttcctactggctttctttataaggggcttccctggaagctcaatcactaaagaatctgccagcagtgcagaagacccagattcgatccctgggttggaatcccctggagaaagaaatggcaaccctcttcagcatttcttgcctgaaaaaccctattgacaaaggagcatggtgggttatagtctatggggtcacaagagttggacatgacttagcaactaaaccacataagggcagaattttatagatatttgagagggaatgtgtttttgctgtggctccagtaattgcttctaagctggagggggcctaactgacaagaatagtttgttctagaactgtaattttgggtttggggagtcatactttcagtatcctatgctataggccctattgctatgtctgtaaagcataaattatgagagcagatatatatttataagttcatattgtcctatctctttattttatagttgaggaaattgaagccgagtaatataatatgtcacactcttggacacatagctcatttctagctctatccaaattaagtctagattaaactcagttaggtgctttggcaggctgaatcacagtcccctaagaatatccatgtcctattccccagaacctgggaatattttacttatgtagtaaaatgaatattgtagaagtgattatgttaaagatcttgagatggagagctttcctggattttcaaggcaaatctgataaaatcacaagagttctcatgagaggaaggtagggggataagaatcagtaataggagacatagagatgaaagtgagattgacacaaggcaggggccctgggccagagtgcaggcaagttctaccaggtgaaggcaaggaaacagattctccccaaaagcctccagagggatcgcacccctgacaacaccttaattttcaacatctgaccttcagatctgtgctaacaacacatctgcactattttaagccactaatttctggtaacaaaatttatccaggggctctctctacagcatcccattcctatcatcttgcatccatgctgtatatttttaaatgtcttactgtctatattcccagatatctagatatccttaaagacaggcatagtatgttattaatctctgaatatcttgctctttcaaagttgaatagatattgaataaattatcaaatactcctaatgctgacatttactaaaatacatctaaactccactcatgagatggatctgccaactactcaacaaatcttttgctgagagctttttatgtataaacttccctggtggctcagacggtaaagtatctgtctacaatgcgggagacctgggttcaatccctgggttgggaagatcccctgcagaaggaaatgacaacccactccagtactcttgcttggaaaatgccatggacagaggagctttgtaggctgtattccatggggtcgcgaagagtcagacatggctgagagacttcacttcttcttcttttatgtgtaaggtgctgtgaattatatatatatatatatgtatatatatatatatatacacacacacacacacacacacacacacacacacacacatactatatgaaaacttgggcagccccatctttttgtgaaaattttaatcactaaaattttgttacaagatgacaagacaacccaaactgattaactttgaactatacaatgattttaaattcgaaggggatctgatgcaatgcaagtgggactgattctcaaagaaaatccatttcataccttggctgcccagatcctatgaatcctttttcctttgtatacagttttaagaatgtttcagccacacttgatacaactattccaaataaaacttaaaatgttttccttctcagaaggaaatgacccaaatcatgtccatttttccacccaggcctatattcattatctctgggaaatgtggttaggcctgaatgtgatttcatgaccccaaacctggactacagtgaaaaatttaaccgtccctgcaagcataaaataacaacccactcccagcactcttgtgtggaaaatcccatggccagaggaggcttggaggtggcagtctatggggtcacaaagaattacacatgattgaatgactaagcacgcacacataatacaaaggtgaagcaaaaaggggaagttcacggttaaattcctaccactgggtaaagggaagaaggttaaaaaacaaacaaaaaagcacattactggggaaggatgctcgtcatggcatagatttcccaccagcttgactacatagggttcctctgattgagaaaaattgtcatccttgagacaagtataggggagaaatttttttctggggtctgccctgctgtactaacctacacattttggcaattggtggcctaaggtttgtcattcaattttaaaatcacaggtccctgcttgttactcattttaagagtgagctaatttgtttgatttcacgggattatatgctagaaattttgttgatccat

SEQ ID NO: 47511 - DNA, 875 bp, Bovine  19866881544103
  misc_feature (1)..(1): n is a, c, g, or t
nactgtaaataagcaggggaaatttgattcctgagcatcatcccattggtaaaactgggtctaataggtggaataacgctatgaagtatgactttgtttgatagtaatgttggatgacatgcttggctgaccaagtcaaatgttaaatgtaagaaagaattgtttaagaacgtttccctacttcactttggtggaataccatcgcacagaacagattcagaattaagaggcttgtgtgtatttagcttaattaaatatttaatcaaatgtcatctacctgttatttccactctacaattttccatgacacccagaagaattagctatttttttaacatttctgttgactttcttgaaatagaacactattggtttatgtttctatccatctcttaattatcccccaaagttctccctccttcatcatctttagtttcactgggaaaaccaagtgggattagtgatcactcacagtatttaaaagttcagctgaccttaatgaaaagcccaggacccatccaggttgaaaaatgaaattgctgtgccttgtgatttttcacgtttccacttcactccctgtagccacatcttattcttaatcagaagggaaatgtgaacagatccattccataaaacagtggaacagggactaggaaccaggtagaggccatttaattaaaaggtataagagaaatagactgtaaaattcagctagtcctatataaaaagtcagcttaggagaattgaatgataagctaaactaacacatgtcaatttccagaagagaaaaatacagttttgaaatcttagcagcttttttttacttttagtgtgctttaggttcaagatcacaagctgagcgcaatgttttaaaa

SEQ ID NO: 47512 - DNA, 1307 bp, Bovine  19866881589724
  misc_feature (1)..(1): n is a, c, g, or t
ntggatgttttgttcttcttgatgttccataacttctgcattttaaatttatcatgtttttgattatgtttcaaaaactggaacagtgtcaagaaatgggcagttgtatggttttgggtatattccccttttctttcctcttattaatacagtgccttatatctccatgaaattttcagtgttaatggatgcaacctttcaaaaaacattaatagaaatagccatgaaacatctacacttatgaaaacaaggttatggtttccatgtttccctattttctgcttaatggtaagttgtctcaggttggtcctataagaggcaaattttgccaaccaaattgtatttgctcccaagtatgtatctttcccgtgtatctactgcctgtctccatatggagtgcaatacgaaggaacgagagaggatggtaaaaataagatcgggtgttatcatggccagatggaaaggggcagagacctggcctagtggcaagtacacgcgtcttcgctttgtcactgtggttcagcacttccatgtggcagcgcgaaggcagggtcatctccattcactgttaattaaatgttttggctggaaaccatttctccatatggcagcatgcaccagcttgaagtagtgcttcaaatttggccacagaacccagctgcccacaaacatatgtagtgactcacaagtagtctcaaagaagttcatctcaatgcagaagatctttggcttttctgaagcatgtcaataactccaaatgcacaaatctgcccaaactatagcagatgtgttattcaaagggaaaatgaaaatgcatccagtgtaggtcatggcatgtatttggttcaagttcagaagtataatgatgccaaggcaatacattcagagccctggattataaattattgtctcacaagccagaatttgagtttcatgtgctgttgtcaaaaccatggttgaaaacagtaattttcaagagatactacttaaagttgtaaaaatatattaagttttgggaagctagatgatgcatgaatcatatatcatacctattctactcaactttttctgggggcagagattaagacttttttcaacaccaaggtgttgcttccccatggcttagatggtaaagcatctgcctgcaatgtgggagacctgggtttgatccttgggttgggaagatcccctggagaaggaaatggcaacccactccagtgtttttgcctggaaaattccatgggcagagaagcctggtaggttagagtccatggggttgcaaagagtcagacacaactagcacttca

SEQ ID NO: 47513 - DNA, 2239 bp, Bovine  19866880214983
  misc_feature (1)..(1): n is a, c, g, or t
ntggatgtgagagttgggctataaagaaagctgagcaccaaagaattgatgcttttgaactgtggtgttggagaagactcttgagagtcccttggactgcaaggagatccaaccagtccatcctaaaggagatcagtcctgggtgttcattggaaggactgatgttgaagctgaaactccagtagtttggccaccagatgcgaagagctgactcatttgaaaagaccctgatgctgggaaagattgagggcaggaggagaaggggacaacagaggatgagatggctggatggcatcaccaactcgatggacatgggtttgggtggactccgggagttggtgatggacagggaggcatgatgtgctgtggttcatggggtcacgaagagtcggacacgactgagtgactgaactgaactgaactgaactgaataaaaataaatgatgaaagtagtaaaacagaagacaaagaaacttagagaagatcagcaaaagacacatatgacagggatttgatttgaaattttaaaaatagatatttgaagaagtggactgtagagggcagtccttgacactagctctgatcagtgggatgagagggtgctgggtatggccgtgcactttggatgctcacttggatgactgtaaggcataatctcttggaactagttctccacagtggcaatactaaggcctgtctcaaaaaagattccctggagaaagaaatggcaacccactccaatattcttgcctggagaatcccatggacagaggagcctggtgggctacagtccacggggtcgcaaagagtcagacacgactgagcgaattcactttcactttcaaagagttactgggaaaggtgaccctgcaaagctcttagcacagtacctgataatgtagacgttcattggccattttccttgcctccaggggaaggaatggggagatacccttatttctaaggaacgtacccagagtggaaggcaaatttgatcagtctggaatatgaaactagatgaaagcttagcacgtgaaattatgtttgtgatgtcctagagagccaagaaaattaagaaatgaaccaagtaactcatcatatttattagatgtaagaatgaaggtgcagtattatcatttccttgtgatagtcgtatctaatagttctgaaaccaattcacagtattcatgtcagacttattttatgagacatttaaccattgctaaattaaattttctaagagaatgtgccactataacttctctggagtttcagagatagaaatctgacccatcatttctattttcatggaaaaccatttagcagaactttgttccagtagaagtgtttattgagttgtaagcctaacacagttcattggctgcatgcatttccacactgacatttttctcagtgcagatttgcatcagttcattagtactgacagcagatggtagcactttcacacaaatttaccttctgaattgatctaagaaatgtcactaaaaagatcctgacagttttgatgttcttccatttctgaaaatggtatgttaaacaaataaggtgtaggattttagattttcttgaactccaacacataattcctaaaccaactaaagatgctttcatctctgattctggctgtctgaaggagaaagtagaaaatgcagataatctttcctgatagcataagccttaaaaaatcactattgcagaaaaatggcttttgaagaatattatccagattgtctgcactgatcaaatgcctcaaattatttgtaaattctctaccttactttgtctgaattcaaaattgcttggctagcaggatcagctcattgactgttactgaaaaatagtgttagcttaagtcacaaggctaactttaaattctttcacttctgccacagtaagatatccagaagattaactacatttaaaaattatagattttttgccttttagttagggttaaatcattatataaattatcagacaagaagacttaatgtttgctaagtgaatgaatgaaggaatatataaattctaatcacattgaggaaactattttctatattatatacctattattatatccttaataactcaaagccttgtagtgttcagtagtattatgtatataaacaaggatttattttgagtattttaaaaattattttccttctgcatttgaaaagtaattagtgatttggttaatttaccagaagagaagctg

SEQ ID NO: 47514 - DNA, 756 bp, Bovine  19866880360154
  misc_feature (1)..(1): n is a, c, g, or t
ntaaaaatctgttcgtagaaaagagtattctatatagtttggacataagtaattttaaatagacttcatgtttgcaggtaagtaaccaagcaaatatgaagcatgacatttcatttctaaagaaagtaaatatataaatatatatatatatatgtaataatctgccacttgtatcagagaccaagcccataggccggtttctataacaaatgttatcactgcttgtgaatttgacaagactgctgcttaatcagtagaaacttccctagcatatcaaggcatcagaaggataagaacaatgttaacttttttttttttttaacctaatggtatgtttaggtaaattaaagtgtctatctccaacactgtcatctggaacaagtttagatggaagcatgaatataaaatagggaaaatgctggggaagagggaaatacttttgcatccttcaatgaaaaattaagagtaattttaaaaacttattgttttggcttcttttttgagtcagcctaatactttaccctgaattataaatcttacatatttattttcatacccatggtgattttttaaaactatataatgcgggttaatctgtccttgtgacttgagtcagtgatagtaggcagcacagagccaaattcagcttacataggactccagctacttgtcccacagacaccaaaaaaaagtgtctttgtgtatttatgaatataaattgatctaaaacagtttattaacgtttttatagattgt

SEQ ID NO: 47515 - DNA, 1543 bp, Bovine  19866880531721
  misc_feature (1)..(1): n is a, c, g, or t
ntcttgttagcaggtatatacatattttaagacaatattgacatagatactgacagataattcatcttataaactagatgatgtaaacttatggtattgataaatatagtactgtactgtaattgtattttcttataattttcttaataacatttccttttctctatattactttatcgtaaggatacagtatataatacatataatacatttataaaatatgtgttaattgtttatgttatcagtaaggtctctggttaacagtaggctgttaagttttagggaatcaaaagttatacatgggttttcaattgtgcagtggtttggtgcccctaactcccacattttcaagggtcaactgtgtattacatgttgattaggaactcttagatataagtcacatttacctgggtaaatgtggttagagtcttaaaaatctgttttgggcacacaacaaaatacttaacatttttaaagtatatacatgaaataagctcctaaaaccatcatttatatagactgttcttggagagaataagaaaagtaaatgatccttttaaccagtggtatgatgcactgacctctgacctatgagggagaaatgtacaactctgaattctggattcgcttctttgaaatataacattacaaaattaaattctacctcaggcagttttcccaagagagacaaagagaggttttagctaaaataagtgacagcctggagcagcatactaaaaaaatgtcatcaacagctgaataggttcaatcttggtgtatcctcctgggaaactgatagagaagtaggctaataacatctagtgtatactgttgtattacactttttcagcgagacccattttaatgtttgtttctaaatggttttctattgtttccatactcgaaatatggtactatatcatggtcagtggcattaaagacttaaaatatattttatgccacttattctgtttaattcaattagattttaaattatcttagttctcctttataataattactataattattcatatttcctcaatataaaaacagttatcttttttagtaataattactataatggatttctacccaatgtattttctagaatgtaccaagggcaaatgtggcttgatgttacatctatttggacatgtcatagacaacatatcctcaagagcttaaaaactatgtcatattaagtcttttatatatatatatatatatataatagaaaccagcagataatacagtttatttgtgtaagatgaaggcagaaactcagcctctggcttcctgcactttttacctgtggtcctaagggcaccattcctcttggaggagtcattctctgcattggcccacccatatttggatgacctaaaaagagaaaaaagtgtgacaatattagcaatgtaatgagcatgagtgctaaatcagaagctacagcctcctttctgcctggtgctacaccttatttactaaaggactaaattattgacatcacctctacttggcttccacagccattcttctacct

SEQ ID NO: 47516 - DNA, 1528 bp, Bovine  19866880540166
  misc_feature (1)..(1): n is a, c, g, or t
natataatgtctggggtagagaaaaagggagcaggtttctttctgtggttaacattaaacagggatggtcatagatacatcaagggtgtaagaaagtgccaacagaaatatttttaacacagatagttagaaaagacattaaaagaaactgcacatacagtcaagttataggaagataactagaattaaattgcctaaacatttgcttactggtggcgtccttatctggaggctctctaaaggcaaaagtactgatagacacccatgtttacatggtgatatggaaattggcctccaagacagttgtaaggctccccagagaattttttggaacccgcatctctgggtgcagtgtgatgtcactttttagagtttctaggcattgtgccaaaactcagtttcaggaaaataattgcaaaaatgtttaaataatttgcatgaggtttgtgaaagctaaggaaaagctgcctgttccattcccaaaggagatttcaagacacaatcaatgttaggccgcaaaaacactgtttagacagaataattatcagccctttcccttctctttcattattaaactgaggcttattccctctgagggtttcacctggcatatggaaagactgttgttgctaagtcccctttatggatgttcaaacaggctaagcaaattcagagtttactaaattcattcatggacatgatttgacatgaagttgcttctgtgtcatgattagcttttttgtttctattcatgttataatcaagtatgatggaattatatagaatggttccaaactacatggagaattcttgaaaatatatcccaatgctgagttaatttcagtcattgttggcaccttaaaactgagctcaaagaacccgaagtgacaggatcatcaaaacaacacacagaaggatgcagtgggtggaatagtattaagacaaaaaaagtgaagtcatgtttaaattgtgttacagctatcagtgcccaagttacagtacagttatttctttagggaactactcaaagtattgtttgagtggaatcaaagttattttcacagagactcttaaaatgacatcttgtgatttaaagagacctggtactcttcatattgtagtttattgattttgacagttcaggaatgacattgagtaactggcacaacttcactcttgcccctccccttatactgcctgttcaaaccactctgtgcaactagtttttcctctgcctggtctgtggaaggcactattatgtaaataggtaggtatataactgcatatacatgcttagctagcaaaaggtctttggacacttacaatctaaacagacttatgctgctaattaatgcctagttctgtgtaatagttaaagatttaaaacattaatttggggggtttctctggttgctcagtggtaaagaatctacctgccaatgcaggagacgtgggttcgatctctggtcaggaagatcccacctgctgcagagcaacaaacctgtgtgccacaactattgagcctgcg

SEQ ID NO: 47517 - DNA, 1371 bp, Bovine  19866880570548
  misc_feature (1)..(1): n is a, c, g, or t
ncttatgaattgtaaaaattgcattatgtacaatctttttagcaataaaaattattttaaccatcaataactgagggttgttattttaggagaatgaagtcaatacatttgttttcctgaggcaggcaggggcagtattgtgctattcatgaacttcattaatattcattaattttaaaagcagtttggctagctttggcaatttctatcagatattatgcctttaaataaaaataattacaagaacttcattgtttaaaaatgtaattagcatgaagtttaaaacctacattttcactagaggatgttattcattggatggtgtacattttctggaagggtctgttttaattgaattcctggggtaaaattctaaaaatcatagtgactaaaataacctaaatgtaaccaaaagaaaactgagaatacttttttttcaaatgttcgaattaatttccactttaaagagtaccatagttgacccaattagctctgtaaacgaattctgttgtttgacattctttagcatttcacagtagactgttttcacccgtccaccaccttagatccccaaagatctcagcgcacatttagtgatatttaccttatgaagtaactaaatccagaagagcattgagctcacatcactgtaaaaagaaattgtttcctcatgcttgccgctcccattcagggactagaagctgaaaactctgaaattatccttgtgcaactaggaaattgtggacagaaatgcaaaatagttttatttgtatataagcccagccatagaaaccatacaaaaccttgctctgcaaaaaagtccttcagcctttgtaaatcaggctttttacaccatgacagattaacaaccagggcaaaaaattcatgcacgtggagctggaaatggaatcttccacacgtccttcttgattcatgtccacactgaggtacaacaatgttgagtagtactttgtggattataagaaaataaataaataaaaattaaagtaccacccaaagaaagtaagtctgaatagttcagggagacttttgaggcatggccaacagggaaaattcactgtagtgaatagctaaacttttaagaaaacacacttctttgtgtgtggcttttattttttaatattttttaggactggctgctctagaaatgtatttgaatcagtttgatttatgtttgtcaaaagtaacttccagtgccagagaaacacctcagttctttaggttttatttttagctttttgtttttgttttgtgtttaaggtaagctagcccttagggactagcacaattttcctgtttagggtagtctaaaaataggagagatcgtctgcttctgttatcaaacatagg

SEQ ID NO: 47518 - DNA, 636 bp, Bovine  19866880604068
  misc_feature (1)..(1): n is a, c, g, or t
naatgagtagggacttttattccatcctttttttcacgtttacattttaattattaaaagttgctcctgcccctccctgaactattttgtgctgtgtatatcactgctttatataagttattttttaaggtgaactcagatgttatggttttgtaaatgtctgcaatcatggataggaataaaatcgcttatttgagagctttcattaaatcgcgtgtgatgcaagttatcctgtgaatgacaacgtgtactaagaaaagaagtgtgtcttcatctttatgtcaaatcgaacaatttctcagtaaccttcagtgagtatttttgtactttttatgtaggaaaaaaacttcaaatcaacagaagcttagctggggcctaacacagtatatttctgcagtaactgctctaggtggaattcttgatttggcttagatgatacagaaaatcagtaattagtcgcagttgcttaaaccgtagcaataaagtgccaggggtcatcatatttttagcaacacattttctctgtaacacgataaagcccagacgtagtaactatttgcttgaattagtcacttgtcaccaggaatgctagagctcagttttttaataagatactaatgtgaaatggtgcctcat

SEQ ID NO: 47519 - DNA, 1765 bp, Bovine  19866880700613
  misc_feature (1)..(1): n is a, c, g, or t
ntttctctagtatgaagataaaagcagcctaaaaaaataaaggtgcctgacagctgctggctttgataatgctttcctacagttgtaggagtttttccggcctcaactcttagaacaaattaaaacttctcagcatgagtaacttaagtttaaaaaaaattttagtctcaaactaaagaccctacattttgactatgatggacaacaggcaaagaggggagtaccaggggctcagagtctttacttgggtttttcagttagaacagaatgaaatactttcttgttagaaaccttacttttttgtttatttaccaaaatgagttatttatgaaaaagttaacctggctatcctagaccaatgtcttactactgaaaattattcccagaatatgtccatttttattataggtccctgggaaacaaaaaatgtatagcaaatatctaaagacagtttataacagaatcttagtgttttgtttaatgtttgttatagaaacaaaaacaaaaatggttagcattctttggggaattaaagataaagaaatgaattattaaatataaagtgaaagtctctcagtcatgtccaactctttgcaaccccatggaattctctaggccagaatactagagtgggtagcctttcccttctcaggggatcatcccaacccagggattgaacctaggtttcccacattgcaggttggtctttaccagctgagccacaagggaagcccatcaaatataaatcaaatattaaatatattgcaagttccctatataggtgggatagatttggcctaagtatacattagaataccttcagctttttgaaaaaatagcatatcggacttccctggcagtccagtggttaagactccatgcttccactgtagggggcacggattccattccagatagggaactaacatgctgaactgtgtggcaaaaaaaaaaaaaatcaccctaaaaaagctaaaacaacttatcactaggtgatattgttctgaaataatttgtcttctgtctatatcagaagtcaacaaacattttctataaaatgccaaatagtaaatatttaaggatttgaaggctctcaagtgacactactcaactctgttgtagtgtaaaggcagtcatagacactgtgtagactgaagactgtggctgtagtgaaggacaggaagcctggtgtgctgccgtccgtgggtagcaaagagtcgtccgtgacttagtgactgaacaacaaccgttgcaatcaaaccttacttacaaaaacaagtagtggttatgaatatgatcatcatgacagcctgtaagaaatctaaagggttaggactaagaacagtgtttctctaagcatgttctgtgtaacattggcaaagagtcctgggggtcacctgcctcctagtatatcagaattcttggtggtggggccatggtgctggaaatcctttggtttttgttgttgttgttttttcttttttaaacaagtgagtcttacaagctaagatttgagaacaagtggctaagatagctgatgacattcagcatcaaatactgactgcccccaccccccttacccatgctcgagttactgcagtaataagctaaatagaagcccttgctcacactcaacttagagtccactatgggaggcagtcagcaaacaagatgaatgtttaaaaatataagacatgttagattgtgatagtgataaagactagagagaaaaagaatcagaaaagaactgacaatgtagaggaag

SEQ ID NO: 47520 - DNA, 1867 bp, Bovine  19866880757132
  misc_feature (1)..(1): n is a, c, g, or t
nggaaatccaatttacttattatacattgattactagtcacactgaaggttattcttgtgtttacttaggatatcaattaaaatgatactaatttcctaagcatataggactcacatgacttatctgaattctgaattaagagtctgagacagaaattatgtttgtataacttagttctaacttcaacatcatcactttggctctaacagtatccattttctaagcagaaaatatttgatcacatatctgtgcactgaactcatagcttttcaattatttatactttaggtatccttgagtaatgggaatgtggaggctctcaaaagcctggcagccaaaagtggatgggaggttaccagtgctgtggaaaaggtaggaggcattcaggtatacatacaactcacttcccatcatgaatgaaagttgtcatggtagaggttgttctgctacttctaatgctgctttcaagaaggtaaaagatggagatcaagatggcagagtacaaggacaccgagtcaccctatgaacacatcaaaaatgcatctatatgtggagcaattcacaacactgaaaacaaactggagagtggcaggaagactcttatacaacaactatggctataaagaaagatccacacagagtcaggtaggaagagaaaaaacgccatcaggtcaggacctgcgtccctaggagaggacaccccagccctgagttctcaccccgagagaaggagtacccttagctggttttaaaaccagtgggactaacagaagggctgtataagaaacctaaactctactcttaaaggaatcaatgcttccttattcctgggaacaaggcaaaggatgcagactgaaacctcccacggctctgctccactgcagttctcaactaaggcaaataaaaattcaggactggaatagggaattctatcaaacatacaacaaagaggtaatacctagcattctcaaaataaattgaagggaacactcccaaattcattctataaggctattgttactctgacaccaaaatcagaccgagacactcaaaaaagagaaaattacaggccagtatttctgatgaatataaatgtaaaaatcctcaacaaaatattagcaagctgaatccaaaaatatataaaaaagggatcatacatcaggattaaatgggatttattctagggatacaaaaatggtttaatatttacaaatgagtcaatgtgatataccacattaacaacaggaaagataaaaataatatgatcatctcaataaatggataaaaagcatctgacaaaattcaacatccattcatgacaataactctcatccaaattggtatgaaaggaacatacttcaatataatacagatcatatatgataaaattaaagctaacatcatactcaataataaaaaggtaaaagcttttcctctaaagtcaggaataagacaccatttatttaacctactattggaaattctagccacagcaactagacaagaaaaagaaataaaagacattcaaattggaagggaagaagtaaaactatctcttgtttcagacatgatactacataaagaaaaccctaaggtctccaacaaagtaactattggaactaacaaatgaattcaggaaaagttgcagtatacaagactaatatacagattacattaatacagatataagactaatactaataatctttgctgtactcaaataatgaactatcagaatgaaaaatcaagaaaacaacccattaaagtcacataacaaagaataaaaaacctagaaataaacttaattaaacaggtgaaaaacatagtctctgaaaactataaaacactgaaaaatttgatataaag

SEQ ID NO: 47521 - DNA, 1470 bp, Bovine  19866880786396
  misc_feature (1)..(1): n is a, c, g, or t
ngactgagctaccagggaaaccctttagcaatgctgactaaatactacaagtgaatctttcttaattcctcatttccaaggccgaattttttacttgaatccataaactttatcagtacatgtgaatacattatcatgagatcctggtaattttctactaattaggttcattctttcagctaattaagtttttgtttttttgttttgccaccctgcatggcttacgagagtgagaagtcctaatcattgaaccaccagggaattccctaagtcaaataactatctttcaacaaattttcaaagtaagaattgcttaccaaaaaaagtttcaattttctttctagttcataaactttgacaaaactcttcactggacatttactggcctttatttagtaataaacagtggaaagtcgtattccaatcccatttcttcacatgaagccaaaaatagatgtgagtgaagcagcttcagctacattagattctcccttttgatacatcacactatgtgaagctcatatacaggcaaacttttacacaaagactttctctttgaatcatattctttgaatctcagtgttttcatgactcttgatgtgcaaccattatagcttcctgtcgctgcagtcattctaccagtaatacaaattcaagcatgtttccataataccttatttgtttcatatcttaaagtatgaatttaccacctgcaatatttcatcctcagtaatttgttttggtacttctttacagagaaccaatattctccctagcatttctctttaggaattctaactgggctggaatttggcagttgctaacgtgtagattcattaatctgcaataaaagctcatttgacttaataattatctgggttagttttgtctttatgccatatgacatatcatcaatacatttacaaatactatcatctgacagtgctacctctacctcttttgctttatttgcaaaagtttccagcctggctggtcaaatgagggcttccatcctagtgcaaggcagcttggcttcaacttttaatgatgtgaccactcaactgtcttgttttgatttttaccttgacctaaatacattgaaatagttcattgttagaaacaatctcaaaatagctttgatttttgcattgcttttgcaaaattttaaaaagttcgtctttccctgaacaggatgagtttcaaagatgaagtgtcagtgcagtttgcttgatatcttgtcttcatctgataacttttctttccagaaaggcatttaggctaaggggaaaaaagttacagagcacacacatcaaaggtggagataattctcatttcattacctaattagtgacttcacggagaaggcaatggcaccccactccagtactcttgcctggaaaatcccatggacagcggagccggtaggctgcagtccatggggtcgctagaatcggacacagctagaacttc

SEQ ID NO: 47522 - DNA, 920 bp, Bovine  19866880928637
  misc_feature (1)..(1): n is a, c, g, or t
ntcagcttattgtattgtttaactgtgattttaagaattgaagatgttttcttactacatgtatttaaatgttacttacaatgtcttcctggaaaaacaattatttgtaaggtttttataaatgcacaattaatgtataaatatagttggaatctgggatgactcttcgtaatctactatttttcattccaccatggccaccagctacctgatacattttgtaaatttagcatcttcctgtgtgcacacatgtgcattattacattttcaaatggatttatctctgtttgtgtaaaaatatctgagctattcatgtagtgggaaaggttgccataaagatgtacataaatatccattaatttcacacattttcacatttaatgttaaaaatgcactatttcatttacagtttctaccttttcattgctagactaactttattacttattgaaaaagtaaaggaaattgttcatataaaactagcagaaatgctttctgaatgataagaattgtaactaatgtggacatctgtgtctctaattgaattagacgttctgctttatgtaaaaccagcagtcttgtatcagagaatttatttatatgcatttaaataggttatgataagtgtctagctttttatagtcagataactaaactttgactaccacaaagtaagtaatattattagcaaaattaatggataaaagttcagtattttattccaagtaggattatacataatgcagaaatctgaagttattatgcacataattcatgtaacattatgcttcttctcaagtacattcatctttctaatgaattacacagattgtcacctcagttcaccatgagcatttatttacccacataaaaattctgaagtaggttctgtgcacagctctatagataagaatatagaa

SEQ ID NO: 47523 - DNA, 1474 bp, Bovine  19866880945358
  misc_feature (1)..(1): n is a, c, g, or t
natattgcacattaacatatatttagaatctagaaaaatggtatagatcttatttgcaaagtagaaatagagacaaaaacatagagaacaaacatgtacacgaagaggggaaaggagatagatggagtaggaagaatcaggagactgggactgacacatatacactattgataccacgcaaaaaacagaaaagtgatgagaaaacaccgaacagaacaggaaactctactcagtgctctgtagtgacctgaatgggaaggatattaaaaaaaaaagtgatacatgtatacacagagctgattcactttgctatacagcaggaacattgtaaatcaactatataccaataaaaataaaagaagattcatttatagcataagtaactagttaaaccggagttccgtttagtaagaaagagaaaatataagaaactaggaataggtgaaaactgagctcctctggttaacacagaggaagccaaggaccttctggcaggattctctcactcatgctcctaggcacctgcaatggtccttccactgcaccccgaagtccagggaactcagcatgaaaccactgcaaaagatgactgagagttttaaaatgctaccatctgttagcgaagcattgatcttgagtttgatttttctactctggtcaaacaggtcttcttaccattccttaaacatccctagcattatttcaacatcagccagtttttcaaaaatctccaaaataaatttatgagtttcaaatctctaatagaaagtttgatatgcatgctacttttgaaagagtatcatatttctgtcatttatgttatgatgctattggcaacataatcacaggcagtgcaacatctgcctcaaaaacagttaattaaggcctttccatcttcatttttccatattcaccagaaattagactttaataaaatcagtgggaggaaaagggcctaagatgaatccatgaaacaacatactttgatgaaacaatacattatttttcacagtgaaacaaactacgaagtcagatctgctctgctgttttacctcttttccatattaacttcttcacttatctttttttgaaatttatgtctatatggtggtttagtcgctaagtcatctctgactcttgtgaccctatgaactatagcctgccaggctcctctgtccataggatgtcccaggcaagaatactggagtgagctgtcatttccttctctataggatctccccgacccaggaatcaaacctgggtctcttgcattgcaggcagattctttaccaactgagccaccagcaccctgtatctctatataacgcagtaaataattctaagagattaggtaaagtagaattcttccccaatgcgtttatagtttccctgattgtcttctgttatgcatatttaccactgaagactaagtaacatatgccctacaggaaatctcaggatcaaaagaacaggg

SEQ ID NO: 47524 - DNA, 1702 bp, Bovine  19866880972749
  misc_feature (1)..(1): n is a, c, g, or t
natgagttgagggaagagttgttccctcttcagttgttcaactgaaggaaggttgttttagacagagggagcagcatgtgcacagacttttgtccttggtaaaactcctctcctgaggcaggcgttctcggacttcatttcccccatgtccctgcccgcttttcctttgcccctctccctctccctcctccctacctcgctgcccgcccccatccgcccctcctttctcttcctctctccccctatggaatcagtagactgtgaccactgcctgttgtttctaagcacacagctgtgagggtctctctggcttctcccagaagttagataacaaaatatgtaatagcttcaaagtccctgtgcaggccttttggtttagaaaaatgtgcttgtttttgttagagtttttttttttttttttttttaagaataaggtaaaaaatagaagcttgtccttttcagtcctaaagaaagtaaaaatgatgtgattggactcaccactgaacttttacctaatgatgtaggggacctgtggttgcctagcatcattagcctacaacttcaggcctgggaaagaaagagatgtggcgttcttcatttttcccctccctccagagaattgtcctactggcagaggctaaatttcaggtatcaggtttcaggtagtctctttattatacattcccaaatgccaaccctgctgtaaggttctgaactttttttaagactgttactttcctcagaagagcatgttactgcttagtatcacatatgtctgaagaataaaggcagagcccgatttctttacatttttggtgggacaggggtaatgattttagttattaagaatcaaggtagggtttggcccagaagggagcctctcaaattttgataaatcataaaccaatacagaagtaaaactaagtatgcaatcttaagagatttcttgtagcttgatatggctggaacaaaaggtatgagggggaatgctgaggaatgagactggattggtagaaagggaccagatcagagagaattttgaagacttaagttatgattttctctgagggcacattgcagctgatgggaatttttactttacagagggaagaacattgatcagatttgtgttttttaaaaaagtccactcaggtatcaatatggaggaaacaaaggtcaaggtagggaaatgtatgtagctctctattctacttcctgtgtctgtgtaactaaatcatccccccaaataatggtgtaaagcaaagttacaggtccttggttgaagaatttagaaagggcgtatagtaggcataacttgtctgtgctccataacatttgatgcttctgtcaaaattactgccccattgtcttgtatatgctaagttatgatgagatgtttattgtaattccaatcgttgttcctctgtatgtaatatgtctttttctttctggatgccttcaagattttctcgttatcttgggatttaaatgtgatgtgtctatgtaggatttttatcctcttgatattttctgggcaggttggatctatgttttgttgtcttttatcagttttgaaaaattctcatttactgtattttcaagtatttttttccgtccttgccctttctcttcttgtagataagttaaatggatattgtcccatagctcctaaatcatctgttcccttttttatttctttttt

SEQ ID NO: 47525 - DNA, 3205 bp, Bovine  19866881027532
  misc_feature (1)..(1): n is a, c, g, or t
nattcctttggaacatgacgagagcctagccagtcagaattcttccttgggaattcgttaagtttactactgaagaaagtaattcattcatttttggtcacaaagctgtaagaatgtgtccgagagctgctgtcagccatgcccacccccaccatgtagaacatgcaagagaatgaagaagacaaaagccaaaaagaaggaggagagaaccatggcagcaacaagcctctgcctctagacactaaggactcagagctatgtgggttctgcaacaatttcttcagttctgcggtctctatcagtatctttctaacttccatgcttctctcatttctccactcacccctgcttgcttgcttcaagtaattttagttgtgtttctgtcacttgcaaagaatcctgactaatataatcaaaccaccacagacagaggtagaagaaagaagccttggaagggcattggtcgtgggatgctcacatgtgctgtcaggctcttgtagctacaagaaacagcctcactcagatctccctgagtacaaggacacatatgtgcagatgggaagtggaaagccaccagaacaaggagacaggccagggccagctactctctaggggtttctctcttggactcccctccatgtcaactctgcttctcagagtgtctgttccattctccacttgctcctctctgatcaatactctcccacttttcagtgtaaatcccaggagaccagctgctgacatggctgttcctactgggctgagccccttattcgaggccgctggtgggtgaggcaccatctctggtcccatcagggtgtcctctgaacaacgataaccaaacctggggaattcaggacgaagcagacatccgttgtgccccgttgtaggagaagtgtttcagaacaccaagaatgaggagtcatgatatgaaaaatcaaacactaaatcaacatttgcatgatatatgtacacatatagctggttcacttcgttgtacagcagaaactaatgcaacattgcaaagcaattatacttcaattaaaaaaaaacttaaaaaacgaattgtaccaggaaaccaaaagtataccagagaggtgggtatgacacggagcaaggactcgatgaggtgatctgcgccagagccaggtgcattaggtcccagaaaaagcagcgagcccagggtgagcgctttccagatcagaagtgtgaggcctctcacagccccagcaaagccacggcctctgcttggcttgcatcccactaccgactgggggaaactagggatggtcccacattgcccactatgtccatcatctctcagagaccgctcacacactgcgagcgcactcagacctaggatggggttctcgtaagggactgtgggctagtctcttagcttccgaagcctccgtttcctcatctaaagatggcattatctgctttcataggattactgtgaacagcaaattagacaatgcctgtgaaacacttagcccagctccaggcacaaagcgttcattgagcaccagctatcattgctacatcatcatcatcattatcctcattttcattaggatactttgaaggtgagtgagtgcaatgtgactcccgggatacatctgtgaacaaagctcatctcttgacctgtttgctgatcctagtcatttctctaacaaacattccccacttccagatgaaattaaaatcagaatatattttaattggacagctatgtgtgaaaagtgaacactatactatttagaaggtctttatttttaaaaaagaaagagaggacggaagagagcaagcaagcagggaggaaaaggagaagggaagaaaattgcttgtcaaagtcctccttcacttgtaagattttatacttcattataaagagacgccaactgctacctgaggtttcaatgcagcaccaactaccaaaaaaaaaaaaaaaaaagccagaagagttacctcaaatcatttcactctgtaatacagaatatccgggtgtatttacctagtgtaaaatcattcatttggtctgacatgcccctaggattactaacagtttacttgaaaaagatatgaaaaggttgggagggtgtggtttaaatataatctgcaattttaaaatttaactttacatattgccattctgttccattatatatgcaggaaagggaagagcagtattcttcaggcttgaaaaaaattaatccatgtttcttggcatgaaaaaccaatgttatctttaaaatatacatgtataatgtgagacatattatctaataaaaatcatgcaatctagcttgttcactttgtaacacataataacagggagttgatcaaagaaaactacttccatttttattactacattgttcctatttttatgaacaaaatttaaaatgcatgataaaaatccaatatacagtaattgaaacatacagtctgacctcacattgctctgataaatctgttcatttctggccattttcagtgttgctatagtgaacagtgttgacaagtggatgaaaaaaagcttacaaatggaattctgatcatagataagactgaacataaactatctccccacatttctgcatgttgggaggcccggtgtgtgccacagatggccatctcccaataatacataaaacatttcttgctggagctcagctcacattgttgaattcacaggtcatttgaacagaacaataattcaattcacttaataatgacctcactgggaacaaacagacacgggatgatgctgttagaagaacaaaatcgtactagagttttaaaaatgaaattcttaaaaagccgccatgctctcttgtcaaaatagcacttaaatgtattcagtgtttggcggccaggcaggctcactgggttaattttagtctctggaattttgctgcagcgactctgtgccatgttttgtctatgttcaggctggtagctttcctgggaaggtcagtggtgaccactgaaccccctattggcttattggctgagctcattgatgaagaagccttgagtacatcatttttttccttctcaaatggctgagatggcagtcaatgaagaatgactgcagaaagtttcagaagggcacgtgggaatcgtttaaccaaaccaataaaatcagctatttatgtaagtaacagttattataaccttaaccatccaggccatattt

SEQ ID NO: 47526 - DNA, 1291 bp, Bovine  19866881031454
  misc_feature (1)..(1): n is a, c, g, or t
nggaagaacattaaaaacactgaaaacaatgtaccttttgcatgtgctagacttaaatgaaaataaatatggcctaaaatatttatgtgccctttatttacaatttctttgatatctacaactaagtaaaaattacttaaaataccaaaaccacagagaaagagctcccctgaatctaagagccacagaaaaaggaagagcaatagcagatctaagagctgcacctactgataaaaacgaccaaaaaaactgaagtctgacagaagcaaaaagccaaagtattcagtgaattgttatcaaccatctacagtacaaggataggttagattcatgaggaagggagtaaaagagagatgggtgcaagaaacggaattaattctataatgaaaaacttaaaatcttcattttgttagcccactaatccaatatggacagacctctaacgtggtttcttgtgtcactttatagacataataggaaacatataaaatataagggtgtcgataagtggggaacctcaattacattcagcagttaagcatttatagtctagatctagataccataaaaacagcttatgtaaaatgaaaaactgacttttaaaacattatgttacaagacatcagtcttaagccccaggaaaaagcacaatagtgcttaactgcaaatgaaccgttattccaaatacaggaaaatctctgaaccaaaggcccgcacctgttcctgccatccgtattggagactaacaagggaaacccacaatcataactgaccaagtgcggttccattcaccacgggacttctagtaaagcacgttttcaggagagagattacaaagatgatggcattaagtaacagaccaggaaaccacatccacggcactggaaaagaacttttatttttgttttttccttttaagtatgatgctgagagatgagtgtattaacatactgaacaggaaatgctcctaaatgaagaaactttaaaaaaaaagaaaaaccttagcttgtccatttgagtacctagactaatgctgctgcagaaaagtcacaaacctgggtgtattggtgctgcaataaaatttgcaagttctgatatcaactagcctttaatactgactgatcatttctgtgtacattcctaggcagttctatctctgaatctatctagaactatttcaaacttttttagactattctgaaaattcaccaccaccaccaccaccaccttcagaatcttcaggcttagatgaagtcacaagggtggggccctcatgatgcaattagtgccc

SEQ ID NO: 47527 - DNA, 801 bp, Bovine  19866881057807
  misc_feature (1)..(1): n is a, c, g, or t
nagtggaagcagggacagattttatttccctgggcaacaaaatgactacagatagtgattgcagtcatgaaattaaaagacacttgctccttggaaagaaaactatgacaaacctagaccacattaaaaagcagacacatcactttgccgacaaaggtccaaatagtcaaagctgtggtttttccagtagtcatatatggatgtaagagttggactgtaaagaaggctgagcaccaaagaattgatgctttcgaactgtggtgttggagaagactcttgagagttctttggacaacaaagagattgaataagtcaatcataaaggaaatcaactctgaatattcatatgaaggactgatgctgagttgaatctccaatattttggccacttgatgcgaagaactgactcactggaaaagaccctgatgctgggaaagattgagggaaaaagaagtgggcaagagagggtgagatgcttggatggcatcactgactcaatggacatgagtttcaacaaactccaggagatagtggaagacagaggagcctggtgtgctgcagtccatggggttgcaaagagtcagaaatgacttagcaattaaacaagaagaacactaagagcaaaaatgactgaaatagacatctgttgaaattttaaacccaaatcacctgataaaatagaaaaatcttagaaaccgatgtgtgagtgcacctgctcttcacacagcagtgcataaaaatatttcaaacccagacagactgtagaactgaggcttcatgagcttttatttgactataaaa

SEQ ID NO: 47528 - DNA, 1308 bp, Bovine  19866881062363
  misc_feature (1)..(1): n is a, c, g, or t
nacatattccctaattatagctttctgtgtgaatatacaaatcagtttgtgattgatttcctagttctaaagtagttaggattcatgatcagtgactgaagttaagagctccccagtaatatagaagtatatttttcactcataaatatcttggctgtaatgacgggcccataaatatcagagaattaggcttctcttttcttgttgctatgccaccttcaacacgcagtttccattgagtggtccagttctactcaaacccagtcagctaaaaagaggaaagaagggaaagaagagagcacacccctcactttgaaaagaatgacctcaaagttgtgcatgtcacttatgctcaagtcatgttgatcggaacttacttgtatgccatatgaagcttcaaaaggctggcaaatatgatctttagctacatgaatatgtatccaattgaaaattttctatagttttgtaagaaaaaagatttttttggcaggggcagggtggggtggggaggagactaaaaatccaagaaacaagaattacctttttaatggaaaatacaattgcctttataatgactgtacaaaaaaaaattacagaaaaatatgctggcatttattaatagtttttctttctttattcttatggtaatattagttatgttgttcagaaattagaaacttataattaaactatctggaaaggcctagtgttcatgcaagttttctatgcttacacgatagaaggatataaatacataataaagctttgcttacttatatctggttaaggatataaattgctgtggagaatcaggtttttaaaaattaaaatagattttaggtaatatttggtaaaattctccatttctctgtgttaagaaaaacatgtagaaatatgaaatgtcttgccaaggttagacatctagcttgtggtagaggcaaccataagcccagaggcttctcttggttgataaagagcacagactctggagcctaggttccaatcttctctctttattatctttgtgatcttgatacttgaactctctgtgtttcactttctctgttaataaaaaagtgataattatggtacttatctctaattctggttatgaggattgaacaagttaaaaggcataagatactttagaatagtgcctgacatacagttagtgccgtatgtgttatatactggttaatattttagcaagttaagctcagatatttcacttgagtataaaattagtccagagtaaataatgcatttgaatttttaagctttaaggagacaaagtccatgcgactggca

SEQ ID NO: 47529 - DNA, 2542 bp, Bovine  19866881069105
  misc_feature (1)..(1): n is a, c, g, or t
naataatcttttaaaaatgcatatgcctataaattaactctgtaaatgacagaaaaaggtccagacgtctatacaacaaattatacatactgatttatttgggggaaagaaatgaaacaggcatgaagatgataaggaatttttatttttctactctttatatttctgtattgttttagggtttttgtttttttaatgtaagtgagcctgtaattatgtgttccttgtagaacctaaaataaaacatttttcaaagagacttagggatatgattagatatttaattatatagagttaacaaaaatgattcaaaatattcaataggggacttcagtggggactggtaagcatcagagaaagagaaagaaattcagagacagaaaaagactatattttgatgtagtgcctcctccatcaggtgccttagcaattctcttttcaaataatttctgtctggtggttaaacttgaagtattgaacataaaatgtcttatattctctggcgaattggaaaggccagtagcttttttgagtagactaatattaaaataaaccttgaatcccatatagaagccggatcttagtttgtcaatacttagtgagccactcagctcaattggttaaacatggggtcagcgaaagcgagcttcacgttgtcaaccttttagtcttcaaggcgggtgggggtgggggtgttgtatgcatgaatatatgcacatgttggtgagagtactttttggtgagttgagctaagaaagaaagaatagaaagggacccaaccaagatcattttcccacatgttccacaaagtaataatttcttaacctgacaaattcctttaaggacaagagtcatcaatatcataacacaaactaatttagttaggcaaatgtcttctttttttttctttacaacaaaaacttaaggagtcaaaaaattagagaaaaggaaagaagttttttgtagtatggggcactaaatttgggtagagagaaaggcccccacagcggtttggtggaaaaggcagccttgatgtgaatctgggctttgtaatttgctagtattgcttcctagggcaaatttcttaacttcttcaatgccaaatttcctctaccataaaatagagattgtataaaaagcaagatcattgtaagacatctatgtgtgtgtgtgtgtgtgtgtgtatacatatatatatgaacatgggacctgggatagagcctggtacatagagattatgcaataaatggcagctacaatttggacagaaagaagggatagtcaaaaagtctggcaggaaactctctgaattaatacatttaaataagcttcaactctataaaaaacaaacatttttatttaagcacctactagttagactgtcattcagacatcaaaagttggaaccagccactttctgaaaatggggtacctggacataccagaagctgcaaggtacagaaagggctgtagaaagaagctgaaggaaaatactattctggggtgacagaagaaactacaatgcctgtttctcaactgtatgcctagggacaagaggatacaggagagtgtgggtgatggctcactaccattctcctgtaactcagaaaacaactccagtggccagcctgggagggttggtccccagggccagctttctggaacaagaacatggtgttaatgtctacctgcttcactcataaatagcaacgatggtaccgataacaaattagatgagggaagccagttcccttcaggaactctcaattcaaacagagggcatttatgctgagaagaatggaagatatgaaaggcagaggccaacagacaacagggacagagattagctcctgtcatcagtcacgaccgacactgggcatttctgaggttgttgatggttaaggaaagaaccttagaggagaaaatgaatctcttagaagatgtgaggttgcttaatctggaagacagaagagaagtttgaagaagacgactggagtgatgggagagaaagattactcggggagaattttgaactgactgaatcagagaggaaagaagatgagtttgcagtagttgaaagtaccatgacatcggggaaggtggtgtggtgatggcaacgacaatgatttcagagagtataagagtgcaacacaaaactaccctcagagataccaaattactttcatattcatcttttcatttttcccccataatgccctgggggtacatagagacatacaagtcagaattcatccaaaaagctgtcaagatcagaatttggggagaagggatgtaaaagtaccaagtttttacatacagatttctcctctttgtgaaagtacagcattcctaagaaacctttcctaagctggaatgacgtgaagcaaagaagcaattacctttttaaataaaagtgaaaattctcttttggttcatgaaaacaggtactaaactaggtctttcatgaaagagaagtgatgtaaatcaaactttcaaaacaaaaacaagggaagactgtctttcagattcatcacaactttaa

SEQ ID NO: 47530 - DNA, 1522 bp, Bovine  19866881081061
  misc_feature (1)..(1): n is a, c, g, or t
ngcagctttggaatagggaaggaaacatttcttccttcgcaactgaatgtctgttctttctcaggatccgttttattattggtctagggaataagagtagagaattaaaaatgtaaccctgatatttcatatagaaaatttacctacttgttatatgcctaaactatgttcaaatagtcaaagaataattcactcttaaaagcagcgtaaccaaaccaagataaaggccagctcaaaagaataaagaaaagattggaattagagcagtgtttacatcatcagggaggaggaagaagaggtttgtccctggtgcggagcgagagggagtctttggactgtgtagaagaaaatgacaggaaaacaggaaagatgagggttggaggaagctggagaataaaaataaaatatccatagccctgatccaacaattttcaaggaaacgctacagactggcttttctgaagaggctgggaaaagtactagggaaagggaggtgggtgagtgtcgagctgtagggctggaaggcatggcctgtttggggaatagtgagaagctggtttgaggaaaatctctacttcaaagtgttcaagatggttggaaagatatgttaagtcacattatggaagagatgatggaatgggtttggaggctatgagaaagaaatgaagtgagaagtgaaatgagaagtgaaagagattgagcaaaagtgaatgagatcaagggagggatttttctagaacagaaactatgactgagtaaaacagaaagagaattaatgaaggttgagaagaaattacgaagaatgaaattttgggaaaaggaattttgactttttagtgttgttgttgcaaatttttttaaagaaaaatttaaatcatctcttagagaaaatgaactggaaagaacatattttcaggaaaaaaaattacccttccagtagagtgagaattaaggctgcttgttaaacagaaaagataggtagattagagaaattaaggcaaaagtgattccagttaatcaccatcatgaaaatagaaaatgacttggcagatttagagtcttatttgaatatagagaatttttaagaatgttcataattatgcaatggaacatgacttttagtgcattaaaaagagattctaggggtaatgtgaagagcaaacaatgaaagttatttttcttaattacaaataaaaattaattatttaactaatataaatatattcaaactttttgaaaagtttaaatgacagagggaatttaatgaggattgtttgttgaaccaggtgaatgtttgaaacattatggggatttaaggtataaacaggatgctggggtaaaacacatgatggggatagaatcccactgaaaaatcaggtctgattttaaaccatgttaaagaaaggggaaacaaaactagagggacacctaatttgctaaaaggtttattctaacctatgttagtgcaaagcatcatgtatacaaagtaacagattttatgtggattcagaggccaggaaga

SEQ ID NO: 47531 - DNA, 1169 bp, Bovine  19866881145924
  misc_feature (1)..(1): n is a, c, g, or t
nacaggaatggcccagagcaattttagctgaatctttggggtaaacagtgccatttcctgagtgcaaagtgattggacttcaaaatgaaccatcaaacccacaggtaagcttagtacagcaagcaggcctggtttccaggctaggagttaagcttttctcctctgattcaaatatcagaaataagcctttcccatttatatgtgatactagaataaatagaggtccctcacaaaggaagccctttgattcagcacagctcgacagatggtgatgggaacgtattgtggcattctgaaaagagagcgggcttcaggcccaccagagctggattcaaatcctagccttagttataccgcctgagagaatggtttatctgcttcaaggctctttctttgcctggaaactaaagatattaatatctccatgggcagggtgttttaaggactagaaataatacacatgtgatctgaccccccatgttcctatcttggagaagaaatagcagctaggagcagttagaagcaaatgacatccttcacttgggtttgtcagagcgcaatgaaggaggtcctatttgtcatctacaatggcattccctaaaacaaattccccactctcctccccaaagtctagccttcataggactatcctttctttctctccctcttcctcccacctccttagttctgtttctctggctcccagtctgttaattcagtatcacaaatgtcctggaatcaggcaaaagtctttgattcctctcagagtgcagagactacaagctgtgggcaaaagccagcattctctttagagagcagcagggttgtagctggggttgtgaacatacactatgaagaggtttgctctgtctcacacgtgtagtgctcacttcagtgcctgaaacctagtaggtgctcaataaaaagattctccattaaggattatctacaatgtgccggatacttatctcatgaatatgaggtttggagtaagacaagatccctgcttcaaggagtgcagagtatcaaagtcattattgaattttggtgactggtttcagtggctacatcatcactaaaccaatgaacatgcactagattatttccatcaaatatcctaagctagtaaaacatctccatggtataaatgactaattaatatattgggt

SEQ ID NO: 47532 - DNA, 1259 bp, Bovine  19866881173817
  misc_feature (1)..(1): n is a, c, g, or t
naattatattttaaaataggaatcagtctatatcttaatttaataatttaaaatttatattttaataatttgaaatttaaaataaacttgtatcttaaaggagtagacctgagtgtgggttttaactttttcaaagtaattcacgccagcaatcctgggccaactctgattcttccaggagcatccaatacttggacaacccttttttgtacttcatccctgcaagacgagtgaattcatgactcctgtgttaaagaattctcaaaaaatcaataggtaagaaatatcatcaagatacattggcttcagtcttattttaaaagtgtaaatctttttatgtgattctaaaagctaaactaaaaaagaaatattctttgtcataataataatggctaacatttattgaatttttttactgtgttctaggcattgttctaagtatttcagatatattaacacactggatttctataacacccctgtgagctaagtactattattttacctggtttacagaggaggaggctaacgtacagagggcctaaataaccaaggtcacatatcttgttgagtggtggaacctggggtgggaacccaggcactcttgcctccgagccatactcttcaccactgtactctgctaccttagctaatgctgtcagctgggtcaaactggaatcattgaggaaagtcaagagcatcagtgccttgaccccccctcccttaagctgctttagtgggggctcctcagcctctttggcccccaagtccctgtcaagcaacagattggcattgggaaatgctgagattccaagtgaccagcacacttctttgaagaaagcctcatttctcggattgttagtaaatgattttctaccactcaaacaagcacaatggaaacagagttttctgtgtttcacttacttcccaggaatgtcaactacatcacgtcgtggctgagcatggtagggccagctgttgggctgaatcttcctctgagttacgccacagcagcctctcaggatgaaggcaacgtcgagtggacaaggtaaaaagagaagcctgcgctccacgtttcctgttgcaaagatcctggagcctcttttgcatttggctatgtcgcccctgctggccccagcatttattaagtcggctttcatctccgacagactggacgctgactttggtttgtcctagttttccaaccaaccagcgtccactcatttaggaagctcttgactttcctatagtaacactca

SEQ ID NO: 47533 - DNA, 747 bp, Bovine  19866881176403
  misc_feature (1)..(1): n is a, c, g, or t
naactttggggactctcagaaactctgctactggcctagctggcttactctcctgggattacattcaatttggggaccctgggctttttcttttctctttgaaagggctgttgggatggtagccaacctgcagaagccacagggtggactaaaaagaaaaatatgacaagaccagtgtcttttgagaaagattaatctagcagttaggtatgggatgaaattaaacagtgggcactaggcggcaggaaaactaattaggagacagttgtaaaagtacaggcgtaataaaaatgtaacaggatactggatgggacctttcctgttgtctcagagtttccgccaaagcaccctggccaaggacaatgggcagtgggaggccacacattgtaaagacagttgctaaactcatccagcctagacttgctaactggttctttgagtgtccattcaattatgctcctctcctacataagagaagttagtgaatcattatgagaagaatctggggtagaagcggaaaggcctacgattcatctctcttctcaaattgcatatttgtttggagtttggggaaaagagaggctgacgcctgcttcttacctagaggtggacaggggcagagagaatagccctgggatagcctcgcttctaaaatgtgatgggaaaagggggggtaaatttcccataagctaaatagcatggggaggtagctgggggtccatggcagcatactgagcccaagcatca

SEQ ID NO: 47534 - DNA, 1139 bp, Bovine  19866881197827
  misc_feature (1)..(1): n is a, c, g, or t
nttccccttctgctaaacattattgtaaaatacttgaaaatctaaatgaaaatagttgctgcaaaagcagactaaaggattaaaaaaaagatggcaaggacaactgctatcaaaagcacggtagagccagcaaataatacatttaactccacatgaattctctgaatgaatttaacacaatttctcccattctaactcaaaaattaatttctgtatattgtccttgagatttggattgggaatgaaaaggagaaaaccattgaaagtgtgaagattttatgtgaattaatcaaccaagggctcagacactggggagtgaagattaaactttatagtttagaaacccaaggacaatactcttctcatgagtgtacctcacatcaaaaaaaatctctactgatatctatgtctcatttacaacattcaagtgaagaggtaatttttatgacatcccaatgagaagatgcaaagaggttaaacattttatagaaaagtcaagggagagtcaaaattagaacaaaatgtccctggctctggcactgtcttgcattccagatgaaaagataatttcgtccctctgtccattcacattaaagcctaagcagataagacagttcagcctcaaagaatcagagtaagaaagttgtccatggggtactggtattcagaaagaagctgctatattatttcagaagtaatagtggtttcccacccattgaccacctctgtccactgctgacagcctgttaaaaccgtcagttactgcttgaaagaattcagtttgcaagataagatacagatacaaggcttgtatataggttcctccttggttttccccaggtctattcagaagtactctatgggactaaggtatgggtgagcctacacgcctcactgtgtggcaaagagcttacttttaaaagttgccgattccagatatcatagactatttagccttttctaggaaaaaatctgaaaagaaatatgtgagcaaatgaacctataggatctgccagctttcatctccctcaagcaccagtaaacttacaagagtccagaataccatatgctaaaacgaggagttaggttctatatcccacagagtgagcaaccttttcatttctgtcatatgcaatcaa

SEQ ID NO: 47535 - DNA, 2189 bp, Bovine  19866881213428
  misc_feature (1)..(1): n is a, c, g, or t
ntagtaagtattgtgcatggcacacaatggggatttaattaattgaaactttatctcttgtcctgatctccaatgaattcttaaccactacttctaaatatctgttgattggttttaactcagtgtctactagagcttttgaatacaatatcagacattccccaaacctgtcccctgctttctaaactccctatatatgaattagtagcaccatcatccacccagtcagcatgttggaaaccttggaatttccttaacttctcacccagtttgtccccaagccctgcagagtacatttgcaaagtctgtcaaattctcttatccctatttatcttaatcagcattgcctagaactctttttatcatctcttgcctagactttttgcaatattctcctaacttgtattcatgctccacgatgcctgtagagttatcttactaaaatacgtaaatttgaacatgtctctcaaaacctgctgtttccaacagcatagatttagcctgaccatgtagcctcatcacttaccacaatcgcctgtaagtcccacactgcaacaactgtaaaactacataccgtttccctaatgaactgtgagtactttcacatttgtttattaaatgccgatccttctctttgtccttgtaatggacccccactctctctcctattcccagtttcccagctcagatacatcttctgtacccacagagtactgcttctgtcattgctgtatttggtttctcagactaggctgacagacactgctgttatttatgagagttcagattccgtaaagtgctagggataagagcccaaatgctcctcttctctgaatgagggcaaggactacgaggtagaaaacagtgaatacaagagcttgacagggcaaaaatggaaataaactgaactggagggggtaacaaactttttaaagtagttttaaatgtttattatatttaatggtgtttgaagaaaccatgaagagggagaagttggtacttgtgagaatgagatgttcaagaggggctaactttggaaataaagacttcttttccccctacctgagatgaatggacgaaattttaaatctataaataatgaagtgtttagttgaagatgaaggcatagcaataatttcatggctttgatgtatgaccaaaggacaaagtactaactcaggatagtcgaaccaccagtaaagggccagttcacaaaagtcaattgttaaaaattcaggaactttgtcagctgattgttaaaatcattggtagcttgaaatctgccttataggaatatttacacagcataaattggcacatactacagatttggagtttttcccccaagtttacagcacacctctagaatacttcggagcttccataacagctgagccaaaatgcttccagctgttcgtgaaaactaggttaaagctggagaacatgatcacgtgttggatcttgtcaaccttgttttgttttccttgccaggcactctctactataaaacagaaaagttggctagaggatgatcaaaaaagagttgggaattaacaaagtagacttcaggataatgaatttaagatatgagagagagaaagaaaatgctggaattgtgatgggataagattctggttggaatatagagtgttgtttgtgagtgtcatgaagaacaagaaagatgtcagtcaggaaagttgtttagatcttagatctctgtgcaaaacttttaggatgtagtcatgctcatatatggaaaaaaactgggcttgggggaggggcacggggagggtatttctgtaaagtaaaggcagtgagtgtgttcctaacatctaaagagtggtttttttgatcgctaagtcatgtctgactcttttgtgactccatggactgtagcccaccagtctcccgtggacaaatggaattctcaaggcaagagtattggaattgttagatcatatcttgaagttgcttaaggatgatagtaggcaatagagacagaaagaacatgagcctggtggtttaagttataaggagatgaaaactggagccggcagataagttggtgatttggagacagcagggacacgtatttaaaataaatagcagaggatggatgattgatcatgaactgcaaaagacccaagagagcaaagctgtattcattcacccagtcaagtaaatgtaca

SEQ ID NO: 47536 - DNA, 1270 bp, Bovine  19866881230088
  misc_feature (1)..(1): n is a, c, g, or t
ngaaaacttagaatgccagtgtattaatttataaatatgtgttgtaattgccatgtgaatgggaaagctagtgtcagctaataagcattgaagaggattattggaagccaccttataataagaataatatctaatgagcctggaacctcagcaaaggagagttagatgattttaaaggtaacatctagcctcggtgtggccaattgcaccatgcatatttctgccagctatactggtcactttgtcatctggtctaataggatgtaggattcatgagaatagagtctgtatctttcattctcaccattaaatccaatatctaacccatagatggatatgcccagaatttcctattctggttggtgctatatgagcactgccaaactctgctctctgttttccatttacccctgatccttgctaattctatgtcttctgttgatacagtctttctggatcattcagatgagagttgtgctttctccactttgggctttagatactgtcttttaaggtatgtgtgcctgctcagtcacgtctgactgttttttaccccatggactgtagccctccaggctcctctgtccatgagattaacctagcaagaatacttgagtgggttgctatttccttctcctggggatcttcccaactcaggaatcgaacccatgtctcctgcagctcctgtattgacaggcatattctttaccactgagccacctgggaagccctgttttttaaggtaacttttgtacaaatttaattccaaacatttaggattgattttatgagtttaattatgagtttctgcctcactgtcacctaaactacacattggcctaattgtgcatcagaagctggaagcataagatatctgttcatatccatggatttccacctagtaatctttgaacactgcttcataatccacagatatttaaaatatgaatgccttatgatatttctaaaaatgtaactaatcttcaagaatactgatttaccaccaaaaagaatgtgccacaaaatctgaaggcattgagaatatagttgacttttttgataggtaaaactagaacaacaaaaaaaggtatgataatgagctaaatgtatgatattttgtaagcttgataaagataattttgtagaagcagatgaagactactaatttacagaagatttgcagttgcattgttgttgcaacaattataattgggttccaattataattattatgattagactaatagatacattttttaatataaaaaaa

SEQ ID NO: 47537 - DNA, 1587 bp, Bovine  19866881244024
  misc_feature (1)..(1): n is a, c, g, or t
ntccatcgagtcagtgatgccatccaaccatctctttacactacctgatcttgagcaaattacttaggcgggtcaaaaaataagttttctatagctctgtattttttaagattgacaaccattaatgggtcatgaaatcaatttataggtccaacaaatatgtttttaaaacagtaatagaacagagtataagtattttccatgaagcttgttttatatgtgtgtgatgtgtatgtgatgggggtgtatgcgtatgtacatgtggggagtggagtatacactcctgtgtttactggttgcaatgttagatgcattgcttattgtatgtggtgatcaaagaagtttgaaaaatcctgacaacttcttttctaactcctattcccactcagaagtaggaaaaaaggtggaaactgtacattcaacactactcagcatttttcagtttccagtttgaagaggttttatgtccattctcccctccccttctacttccttcttctctcactcacgttccactgcgcttccttaggctgtgagtctccatctcagtgcatggtttcgatggagtcagagcttcagagagagacaaactgcccaacaataaaccccgaacttaccaagatggggaaagacagcagaaagtgcttttaatataacattccccactacatgtaggattaattcaaggctcagttcctttatctattaagtgtggtgaagatcagataggtttaccatttaaatgcctatcacactttaggtactggataaacatgaaggtcttccctcttcgggcgcttatttgctgagagggtttctctaagccagccctagtcctctgggaacttaggctgcgatatggatgctatggtgcatagagacagcaaaacgaaaacaaatcaatacatcaatggagcggaaggtatttatatcatactcaggtcaagtgcattttatggcccatggccaaaggtctaagatacctcaactgatgaatcccccaggaaactagttccagcatgcctagctttaaagataaacaaatactgactacaactgcatggacacagacaaccctaagcaaacacgagagtggtgaaatgtctggatctgagccctctgtctgcctgccctcctccctcattcagagcctggtctcctcactgaacatgtggttgcccatatgctcccttcacaacccgatcctcaaccaccctcagaagattctgatagcatgtaacataattgacactccaacctattctcactgaaatgtttctgtggaaatatatacacaaacacacactaacacatatttttcccctaaagaaatttccaatagaatcaagggacctgaaggaaccttaatttagcccctgagtgtggcacagcaggtaaggaacagagaggggaacagggcctatagtctggcctgcccatagagaatgccatcctcagctaaagaccctctgacctggccctgaagcaaatgaggtagagaaagatgcctccaccttccatggatggaagcttactcacttgttcagtcactatgtctgactctgtgaccccaaaaactgcatcgta

SEQ ID NO: 47538 - DNA, 919 bp, Bovine  19866881257884
  misc_feature (1)..(1): n is a, c, g, or t
ncaaattctctgccccaaacaagggtgcatttcgatgtctaccaggatttagtagcattaccaatttctaccttgtattccacttagaagtgattttattatagacaggaattattagtaacctatttttatttctccatgtctcaaacactaaattgatattgtattttggcttagtgactatgtcataaaacattttgtaaaagaaagccaaccattccaaaatcagtgacaccacacttattaaattgtttaaatgaatccaggacagtttcataaatgaaattaggtgatcaggaaagtagcagaggaagtgtgactattgagatgagcttctagttgacagtatagttaactaattaatccaatttagagcagcacttcagaattggtagtcaactttgatcaaatgtgtaaaaactaaacgttttttaaatgtttaaactggaaaatccatttaagttttgccagctgaagttgacactattacctgaataacccactgtttctgtctatttaaaatgatctcctaagactacgttaacatgagaacacagtgagcaaaaagccaaattcctgaattctgaagttctcattgatgtgtccgagtctccaaaagagaaagtctataccacataaatttgttataattttatttttcagatgctgcttgtaaaataaccctagaaaatatgtgtagccatgaactgcaggtctaatttctaaaaatatttgtagaaagtattattaaaatggaatttagaattatgtgaattactatagaattgggttgtacaagtcttcagtgaattcattcttaatattttaattaatattcagcccctcagagttgataatttgcttacattacatgtaatcaattatatatatataaatatatataatcaaacaatattta

SEQ ID NO: 47539 - DNA, 1024 bp, Bovine  19866881262902
  misc_feature (1)..(1): n is a, c, g, or t
nttcgcagcttgtctagctggagcccctccctttcacttttggcacaccctacatcattactcaaacttaattttggttcttcccttccactgcatctcttctccttcctcaccatccttctgagaaagaagtaatcagggtgtacattggtctatacaggcagtagattaaactggaaaacggggctcagtgtcccattagacaatgtaagtcacatccatgtgagcatcttggactgattcctcccgcatagttaagcatttaccaccacaccactgcttacatggtaagttgtgaagattcatttaaatgaattgtgcctggcacataataggtgttcaacaatatgttaattcgtttccttgtttacataaagaagcttcagttcagaatggtttagtgacttgcttcaggttgcacagctggttactggcagagcaggacctgtgacctgtgacctatgactcacagcaagggtagttctctgaaacaagtgattctcaaagtgtggtctgagtagtcccgggcaagtcttccctttttcagttacatattcatataagcctaggttttcttcatatattttaattaaaacagcatagcacaggttaaatgcagacaggtatgagaatcctaccatattctattaagccaggcattaaagagaaatgcagagatgtaaatgaatgatacatttctcaccaattattttattttgaaaaacaactactttttaatgaaaaatatattatgctaacatttgtttgccttattattttgaatgaaactcataaatatatatttaactatctcatctttatttctaatatgatgcatatgtttctctaaagcatagtatctaaagatattaccaacataaacaaaacctcttttacattcttaatttttaagagtataaaaagatcctgaaacaaaaaatctgagaactgtatgtatatatgaaagcatcttgccctctaatactttacaatggtttctgggtgtcaaataggggagaaggaa

SEQ ID NO: 47540 - DNA, 729 bp, Bovine  19866881628521
  misc_feature (1)..(1): n is a, c, g, or t
natttttttcctctagaattctttaaaaatatgatagaaaaactgaatatagatcagaaactccattgcattaaaaccaggaagaattaatagggaagagtttcctttcttaatcaaaaagctttcagtcctgttagaagcacttgaaaacccttaccatcaagaagggcatgaaatctcaagtgttcctggaggatattttagcactccaaaggagaaagtaagtctgactacatttttatgttccctctgtccttaagtctccaggggcttgaggatggctgctgatgaaccagcttcactgcttacccttggatcaatcatgtttgcttaaagccaaggcaccaaagaaagccgaggaagattgtactcaagtcatctgtttttaattacatttcgctctattccagcctctccagcatctgctttccctggaatatgccagaaacattcccatctcaaagactttgcatgggccagtcattctataggaaacatgctacatccagaaatcctcatggggtcagtccctctctgcctccagatcttcactcaaatgtcccgcagtagagcctactctgaccaccctatttttttttaatttttatttttttcttaatgttttctttattattcctaaataatctatcaggccatcaataaccaaagcccaaatcctggatgtgtatatttctgtattcattatatagaatattaactatctttcaa

SEQ ID NO: 47541 - DNA, 1155 bp, Bovine  19866881672360
  misc_feature (1)..(1): n is a, c, g, or t
ntgagatggtattcagtcctatagccccaggagctggttgctagttcagagaggttaacacatgcttttagtcaatgtttctgaaaatgtattctcacagagtcaagaacaggaacagcaaaggaaatggaaacaagatgtctttacatagtatttgagattacagaatatagacagaaataaaaatacacatgcaattattttcccctttccctttcattctaaatctaggctagagtttaatttaggattaaaagtctctgtatggattctcttctaacttctcctccagttatcccatccacattccagttctggttttgggcagaactgcaattgtcctttgtagggaattgcaggaactcctgtgctggttttctaatgtgggaaaatgtctactggggaggcaaagaccaccaaactagtttcattatgacccaaggaacactaaatccagcccttcggtggtgggcgaccagcctaacacactcttcctctacagagctcattaaaatgttacttacattttacagtatgatctcaatccaaaagttggaattttatctcggcaaatagaaaaagaatactcttgtgctatctgggtctgaaaagttttaatttcttctgtggacctgctggtgactagtgaaataaggtctgtattacttgagagtgagcatttcagttcagagaagttggcaaggaagtaaacaacagattaaaaaaacccaacccaaggacacaaaatcagacttatcagccaaatagattttaacttttaccttcctcgtaaaagtgaatttattgtttgccaaaagtacaaaatcaacaactctgaagaaggcatgtttcctactttggtctccaacctacagcaaaggtgatgactcttcataactacaccaccttagaactctcattcatgtgaccaaaattattccggatcaaaaataatatcataaatcccagacacttttaggtgaaccaaactgtctggatgctaacttcaaccaaccaaattaaattaacattttaacgatttgtttccggcattgttcatgcttcataaagagtcactcactttattttgactcaaggcaacaaggctaaacaagtgattctaaaaaatggatcacttccaggtctggaaattaa

SEQ ID NO: 47542 - DNA, 1110 bp, Bovine  19866881740980
  misc_feature (1)..(1): n is a, c, g, or t
ntttaatttggagtctgtacactattaagcccaagttcttgcaagtgtctgggttagtggtgatagctgatttccatattggtgttaataattgtgattttcatgtgccttaagatcctgaaataccttctgaaattctggcacagtgggaagcaaattcaggaaaataatggtggcatcttctctcagattattcagtcagcaaattataatatagaatgagtatttgtaaagcttggataaagaataacatgaaaatgattaaaatcctatatattatcttaatattttaaaagggaaaatattgctttgtcatatgtgtagggaaagtattattaaggagtgtttaatatctattttattcattttagataagatgggaaaagaacatcactttgcgggagccatcaggattcttacattcttggtggtgtgtattttggggtctctactgtgcagctccagaaagacgggaaacgtggacattcaagtgaagcaaaagccttccatgattacagtgctgcagcagctcccagtccagtgctaggaaacattcccccaggagatagcatggcagtaggccctgtaccaccagggttctttcagccttttatgtcacctcagtaccctggaggtccaaggcccccattgaggatacctaaccaggcacttggaggtgtcccaggaagtcagccattagttcccagtggaatggacccaactcgacaacaaggtcatccaaatatgggtaggccaatgcagagaatgactcctccaaaaggaatgttttgggtggccccggaatgcctggaatgaacatgggcccaggtggtggtagaccttggccaaacccaacaaatgccaattcaagaccatactcctcagcatctcctgggaattatgtaggtcctcctggaggtggagggccaccaggaacacccttcatgcctagtccagcagattcaaccaactctagagacaatatgtatactttaatgaatgcaatacctccaggacctaacaggcctaattttccaatgggccctggatcagatggtcctatggggtggattaggaggcatggagtcacatcacatgaatggctcttta

SEQ ID NO: 47543 - DNA, 787 bp, Bovine  19866881999585
  misc_feature (1)..(1): n is a, c, g, or t
natgatgctgtgttcgatgtttccctttcaccaggtccctgcagtgcactttgttttagatgttcctggccaaactgtggacttggatggaagccaagcagctgagagtgcatctaggtaggatggaagctgatgctgctcaggagaaaacagttggctaatggtattcaacttatcttggctcttctacctgggtaattttccatttctatcaaattgcaatatttgatatctcaatatctgggattgtttttgaggttttgaatgatagctcaaaaaatcaagaatacaacaccatgataaaaaaaattatattagaagcatcatatgcatgattttggggcttccctggtggctcggatggtaaagaatctgcctgcaatgcaggagacccaggcttgaggttggaaagatcccctggagaagagaatggctatccactccagttttcttgcctggtcagacacaactgagtgactaacactttcagttttcatgtatgattttatgtttgtgagaaaattggtgtatatgtgtatatgcaaacaactgtatatatatcaaggtcactcaagcataaaaaagacaacatggatttaaaaaaaaagttccttaccaggaccactaaaatgaacaaaaggtgatggcggttctcattatgcagataaactgaaaagattagggctcttcatcccacaaggggctaggactgcagcctacaaatcaagaagcagtgcgaaggctagtgaagatatctctttgtccctcagatctcgcagtgctgcta

SEQ ID NO: 47544 - DNA, 1874 bp, Bovine  19866880530822
  misc_feature (1)..(1): n is a, c, g, or t
ngttaggaagatcccctggagaaggaaatggcaacccactccaatattcttgcctaggaaatcccatggacagaggagcctggcaggctacagttcatggtgtcccaaagagtgggatatgactgagcgattaacacacacacatgtctaactcctgccacccctactctgggagtgtgcattccctgggcaggtgctgactggtgagggccctgaggcccagcttcagctgctccttgtggggagggctgtggggagccctgcatgtgggttgcaggctgccccaggggcatggagctgtgcagggctggcaccactgtcccaggactgctcatgacaggtcctgctgtctgaacaccacccccaaactgggcctgacccagaccttcctaatccctccccttccctgaggttctagattttttccatcctcactcagattccaaaaaggttgtgattctcagcttctaaaagctcttgcctccccatcacttttctctctctctttttctctctctgctcctccctcattccctttcagtcccagcattctaagtgtctctgccgcttgaggtgaccgtggttgactttaatggcaatctagaaacatgctggcactgcccctttttccaagagctggtgctgccggccaaagggaggtgtgatggggctgccgttaccccaggttcccccaggacctctggcctggaagtgtcaaagatggtgatgagttgccctggggaacatcacagcctaaatggctcctgtagcccatctcctgctagttaatggcctttgggacagctcagaggggaggagaggggaggcagctggagggggaatgctgacagctttcttatctgtgtggtgtcaagatttctgagcgctcctcttttcatattggtaacaggtgttctgcaaaaaaaaagctcgcaccatcacactgggctgggaaactaagctcaaccaagctctgtggattttctttctgcagcacttatcagagcctttgatatgttaattcatatgatcaagtaggacctgcagtatttctctagcttgggaactagtgcttcttagggaggaacttccctgtagctcatacagtaaaaaaatctgcttgcagtacaggagacctgggttcgatccctgggtcaggaagatcctctggagaaaggaatggcaacccactccagtgtttttgcctggagaatcccacggacagaggagcctgatgggctacagtccatgggcttggaaagagtcggacatgactaagtgactaagcacacacagcttcttaggaagtgcttggctaagttacctcatagtaaagtcagggagatagttccagagaagggaaggaaggggctctggtgaccgtaatggctgaaatcacgggctttgatgtttggtagactaaagtctgaatcctggcttggctacttacttgcctgagtatcacttagcctgtttggatttccatttcctttttacattggggcaataatagtatttgctttatagagttaaggtgaggattgaacaattatttgtgaaaagtaccttgcacagttttgggcaccaagtgagtgcttgctcaatgggaactgtcatcccccgctccccttcttggattccagctcctttttgctgtgccagctagacctctgtttattgccgtctgctattctgccaggcactgcaaggctggagtgcagggcagtcgggggaggatgtggaggccgaaggccagtgtatggtctgggatcccactggggtctggtgggggcacctccttcgtttgttgggtacatggcatttctaagttagacctttacagatttggcacaaggttggcatccagtggggag

SEQ ID NO: 47545 - DNA, 2474 bp, Bovine  19866880550749
  misc_feature (1)..(1): n is a, c, g, or t
ncctgatgctgaatgggcagggtcggaaaagctcaggactggaaagagccgtgaagatccccacatggtatctgaggtccccctacaacttccctgtcagacttaaataccagcaggtgcggggaactcactacctcagttgggaacatcatctgcggggccacaggcaaagatccaggttcggagtcaggagactatctctgaccggccaggggaccttggcctgcttcctcatctgtgaaatgtacagattcaaaactccgagggcagctgcaccacgactgaatgaaggtctttgtaggcagtggagctgtacgcaccagggctggggggttggttaggagtcgcccagggcggttgacacacactgaactggtgacaaagcagaggagcagtgggcagagggtgccaggccaagcatgactcagctgccccctggggtcacccctcacatttgtcaccattaaggcaggtgggtttgggcagttgtgcccctgccatagggtcagaaaccaggatgccagccacagagccacacccctgagggccagactcagccagggacccccaccctcactgcccaggggtcaaggggactcagctaccccaggagaccagcccagctcaaacccaggtctcccctgcaggtttgggacagtggtcaagccaggcaggccttgggtctccaggggcaggagggaccctcattctgggactgttcctcaggccagcagatcaagaggccattggatgagggtgtccagggggcctctctggggcttgggtcctttcccagtgatgtcatgggaagacagggctaatgcttgtgataagctcactgcggctccctcagagaagggctcggtgatggcccagaagagtggcgatgacatcgctaatggtgtgccaggccctatacccagtggttgagatttcttggctcacttaaccctctcaaggtgccattgctgttatttattattgttgaatcattaagtggtgtccgactcttttgcaaccctatggactcctccatccatgggatttcccaggcaggaatactgcagtgggttgccatgcccttctccaggggatctttccaacccagggatcaaacctgcacctcctgcattggcaggtggattctttaccactgagtcaccagggaagccccaaggtgccattattatcctcaatttgaagataacaaaaataggcacagagaggctaatacacctgtccaagttcacacagctgggccagaatggggcaacccagagccacccatcttgtgctgcctcccccagggggacagctgagctgggcaatgggaaagcaaaggtccagaacagctgggaatgggggggggggggtctactgttcaagggcccctacagcccggggctgactcagatgattcccacagggtctcacttagggattcaggtatccttctgcccgtttgacagcctaaggaatgctgctgctgctgctgctaagtcacttcagtcgtgtccgactctgtgcgaccccatagacggcagcccaccaggctcccccgtccctgggattctccaggtaagaacactggagtggattgccatttcctcctccaatgcatgaaagtgaaaagtcaaagtgaagtcgctcagtcgtgtccaactcctagcgaccccattgactgcaggccaccaggctcctccgtccatgggattttccaggcaagagtactggagtggggtgtcattgccttctccagcctaaggaatgaggcttagagaaattaagccacctgctcaaggtcacttttcaaggatgtaaactcagttctaactgaactaccgtgtgaccaaacctgaagcccaaacttccagcagaggtttagggaagacccatcaatgctgcacactgtgctgagtacatgctttgcagccatttcccccaaattccagcaataatcctggggtgggggggtcacctcgatgcacaggtgtgaacactgaggtctgggaggttgtgaccttaggcagcaggatacaagcccgaaagtcctctgctctcacccctgggcccagagagctaagggcagggcttctggaaggaggaaggcaaagacccgggactggagggaagtcagaggtggctctgatcgctcactgctgctcatcttggaggtagtgtgagtggccctgggagccaggctggagccattagctgtctaaccgccggcctttcaggggaccagagctgggctggctcccggacagagaggcccccacccttaggccatctctctctaatgcagaagcctgtctactggtgcccggaagccctgccagctcctccagggctcagcttttatctcagcctgcctgaactgccaagtgcgccacaagctgcctgagcctgagccagcgccagcccaagagcccaactcccaccaccctggcctccccgccaaaacacaagtcaag

SEQ ID NO: 47546 - DNA, 1197 bp, Bovine  19866880566944
  misc_feature (1)..(1): n is a, c, g, or t
ngcccggctccctgacttccttcctcctggcaggacatcacggagaccggccagaggctccgaaacaggtaccacgagggaaagctggctcccatcgcaccgggcatcaacagggtcgactggccctgcttcacgcgcgccatcgaggactggtcccgattcgtgtcctccgcgggagagtttaagctgccctgcgcgagcaagaagggtcagtctaaccgcgcggaggatgccctagggcgggagagacaactgagccgctgggtccatagagctgggaccccgagcgctgaccaaagaagagcagggggcttcctgggtgaaatctgaaaaagacaggggactagcagcagccgcggcactcagagggtgctgcacgcggaccggttgaggtttacagaggcggggcttatattggggagggggcggtgccaggtccgagcagtgggagccagtggggcggaggtggagggcaggcggaacaaagtccggaggtgggactggttcctcgagcgggcgtgaggcgtgtcttgacctaggggcggggatcaggtaagagccggggcgccggcttgctcagggcgggtgtggggccggagaccagcggtcttttcgcagtcgagagcttcagcggctatgcggtgcggtacttgaagccggaggtgacccagagctggcgggtaggaagggctgctcgccgaccggtccctgaggacgccggggtggaggaggagctgctaacacgggggtcggggagggggagaagagacccggctaaggtctccgacagcccagaaggccaagatctccggcagtagcaatgtttggggcgtcggagaggggcgatgtccgtgtcccccccctcctcagtagacaccccccatccctctggcccgccccagttctgtcttaaccagaatcccagtctggaccgctatggacagaagcccctgcctttcgactccctgtaagtgaccccgcacagaccccgggggaccccatacctgggaaggaggctggggtcttggcagctttcaccagcacataccaagtggcccttgaaaatgtgagacctcgaaagcatcgattggctccaaaataccacaagaaaattgcaatttcaaaatgagtaaatgtttaattcctaccaaacggagcatcttgtcatccagtccctagcaactccaccctttcaga

SEQ ID NO: 47547 - DNA, 1415 bp, Bovine  19866880573840
  misc_feature (1)..(1): n is a, c, g, or t
ntgaaataaaaagaattagcaagtcagagggctttcccggtggctcagtggtaaagaatccaccggcaatgcaggagatgcaggtcggatccctgggtcaggaagatcccctggaggaggtaatggcaacccactccagtgttcttgcctggagaatcccatggacagaggagcctcgtgggctatgggtccatggggtcgcaaagagtctgacatggctgcagctactgagcacacactcacagcaattcagaaacaaaagatactttctaatttagatgaaggaagtaaaataaaacctactttcaccacgagcaataaatgccgcctcttgcgttttatcttcttttcacagcgaggcctgcctagtggcctctgaactggaaggaggtaaggaaaggaagttgatactttctgaggccacctatcttattatccatgtttgtcagaagctggactgaggagggggttgcttcctggaagaccttgacaggctaaggcagtgacaggcagattgccagggaggttgggaggccttgccccaaattgaccacgtctctttctcctttgatcctagtttgagagcctagagaaaggttttgggaggtttcctactctttaactgctcatatctctggttaattgcacccatccccactccactcttttcttccagtgaatttgtatctatagtgcttaaaacttaatgaagaagaaaaatcataattcactaagaaattaattcaatttgtttttaaagctctggcagcttgtgatatgaccgtacttgcttttcttctttgaggattgaactttgctcttgggcatagctctatttagactcttctcaccactgggcaggttaaaactctagagaaactggtgggtattccttcaaaaaaaactgccttttctcctctgggtttttgagtttttatgggctgcattaactaattttgtaagaattaagtttgtgagtgtggatgttgatgtgaaagaaatttctcttaagaagctctgacagtccagctttaacttgcctctgggccagaagtctgtaagaatacacaaagtctgttttggcttttagtctgttggcttctgcttgcagtataaggcattgttttcttctgtaaagacctgagtggtcacatttactggagtgaagtcgtatgctgtaaactttgagatgggcagaaggcaagtttcctaacatttccctccctgtgtaatctggcagaattttctgaagttgagggaagcttcctgtccactgtgatctgagagaccatccaggatgtaagatctgaggtcacgctgcttcttttttcttttaatttggctgtgccaggtcttgtttgcaacaccagggacctttcattgtggcattcgaactcttggttgggagttcacat

SEQ ID NO: 47548 - DNA, 1416 bp, Bovine  19866880713821
  misc_feature (1)..(1): n is a, c, g, or t
naaatcatcagtggtttgatttcactgggcgcgggtgtcccagttgtagagctcagcggcagggacaggctgccgtaaggatggcgtgtctcatgtgatgctgagggcagcaggggcccgcccgtacctccttgggcttcatggtgagtgggcacacctcccgagttaggtccatgtggcacaggtcctgggagccgtagccgttgacacagtaggcatcgtagccggcgccgatgagcatggagcagagcagtgtgctgaagtcgaagcagttccccttctggtacttgagcacagtggtcgaggagtacaggtacaagggctgggcacagcaggctggtcagtacagctgccccctgcccctcgccagtctccccagggctgggcgccagggccagtgtgcaggctcaaccccaatggggctcctcccctttcctggtttagggagtctgctaagaatggggtgaaaaccacagcccccatgtccagaaagtgcaatccacatttgcctgtaattccaaagggccatggacttcttcctggtgggaaagaccgtctggatgttgaggcttctggcctgaggatctttgattggatgttttatggttttattccaaattacccttaccttctacctctgtctctctcttctctttctccactgtgtacatattcccttttctctccctcctttcaccctccattcttaaagagattaagctggtcagaaccccaaaaatgtggccttgaaacgtgggtagcaggtccccctctttccttttccacctcctaaagtcctgaaaagaagactctgaaagccgaaggaggcaaaggagtcaaagaggtgggagtccagagatcaggcatgctgtgtgacctcaggcaagtggctgtctctttctgggcctattcccatcctccctcccagccagggggtcggtgaggggttcagccccgacagactcatagactgtggcccgaggctggccaagcctccttctcccgacctgcctggtttcccatctctggcttcgtggcctaaggacgcagccccaggtggtacttacaggtttgagggggtcaggcaagggcaccatggacaggaagtcggagatgaactgggcacaggtgtcccagttgtagagctcagggtagggcatcagtgtgggccggatggttgtgctcacgaacttctgcaaagggagagaccacaggccctggggcgatgtgccacttgggaggaaaccacggtgctccaaggaagctggagacctcaggatggggttgggggccgctctctaggcttctctgggccgcaggttcctactcagggccttgggagttggaggaagggattccctcaaggcccttcttgcccagatctagcataatcctgtgctagtgatgtgatcacta

SEQ ID NO: 47549 - DNA, 1350 bp, Bovine  19866880765950
  misc_feature (1)..(1): n is a, c, g, or t
ntggccagacactgagcttgacttgcactcatgactgggctcctgcacgacacttcataggcaacatcccaagcgtctggggaaactgagccttggctccccaggtcacacagctatcaggtctggctccacagcctgtgctcttagccacagacactcagcacatatctaacagtacatgttctgcaaataagggctcaggtggcagacggccagggaagcaatctgacctgaccacccaccacctgtgtggtagtgaaaggccttaaccctcttgtgccttagtttccttgtttgccggccccctggggggagaaaaaaattttccttcctgtctctcctaggagcgtggttcttaaagcacaatgttgttgatcaatcgctaagtcgtttccgactctttgcgaccccatgggctgcagcacgccagttttccttgtccttcactctctcctggagtttgctcaaactcatgtccattgagttggtgatgctatccaaccatggcacaatatctgaccctgatactaaagctccgctactatttagcatttatcatgggcctggtccttttataagcacaaatcagcttatttaattcccacaatcaagaagtaataaaaactgttatcaatctcattttacagatgaggaaactctgggaaaaaaaaaaaaaaagaggttaagtaagtggcccaaaataacacagctacttagtgcagagccagagttcccaccacccaggcagtcttggcagcagagactgggtgctgtcgattccatgaaataagaggatggaagtaagggcctggcctggcacaggaaatcagtctcaggtggaagcttgtgaaatggggtggggcctggactagatgttctctgacataccccagctctaaggggagtctgggggagagagccactcttggggtgttgggatggggtgggaggcagagcatgctgggtgggccccccagacctcctggtcctccctcactgaggcagatgggtcctgtctgcagctgaggggtccgggctgccatcagggctgggatcccacagaccccagctggtccagagtcaccccagcctgaggaccttgtaggctgcttgtccttctcatcagagactgcccagatccacccgccctccctgctgccccgcgttgggcctgacttctttggctgctccctctatatccgctgactgcaggacacaactcccaggctcccagctggtcttacttcctgcactcccttccctggtttccgagccctggcccttcctgcttggaggggacaggattctggccccaggacgtccggatctcttccttccctgtcttcccct

SEQ ID NO: 47550 - DNA, 813 bp, Bovine  19866880798857
  misc_feature (1)..(1): n is a, c, g, or t
ntccccaccccagcccggacctggcccgttagatcctaccaagcctgggctgccaatggaagatgtggccacagtgacacggaatggggctagtaattctaggaaacagccccaggcatgtggccctgagcccagctggggttcatgctctgggcagggaccactttctggaaatgccccagctgggtgtgggggcagggatgagggagcccttgccgggcctctatgtcctcctctcactcccagcagggtcctggccttgcccggactccacatcgggtgcagctttcaggggcttccagacttagcaggaagatggtgtgggttgtgtctgggcagggccgctgctcaggtccagagactccgaggaggcacctggtgagggatgacaagtcgatgccagaaaggccacagactagcagtttctgtgttgctttgctgtttttttttttttttttcagaaaggcatagtgtgtgtacggggggaggagtattgaatgagggttgtccaataaagcacaagatgctcgatctgggggacagatacaaaaaaagttcactgtttatctgaaattcaaatttcaccctgtagatctccatctgcttattttttctttagttcttttgctaagcctggcaacatgctttttttttaaatataatttttggctgttctgggtctccgctatgtgcacactagttgtggagcactagtactagttgtgcacgcgcttctcgctgtggtgacttgctgcggagcacagactctagagctcttgggcttcagtagttgtagcacgggggctcagcagt

SEQ ID NO: 47551 - DNA, 3055 bp, Bovine  19866880865692
  misc_feature (1)..(1): n is a, c, g, or t
nttcttgctcggttacctacacataaaattatggatttagatatagatatagcaatgtgtgtgcttagtcactcagttgtgcctttgcagccccatggactgcagaccccacaagtctctgtccatggaattttccaagtaagaatcctgaagcgggttgccatttcctactccaggggatcaaatagatatacttaattatgttttatgaccctgttagtaaaaagacaaatataatctaggcatgattgtattctttttctattgttttaaaccaattccaacatttccatgagcccctggacctcttgtggaccccaggcacttcacctgctctgcctcatggggagtcaggcctgagttggccacaggtggaccccatattgctgtgagtagagccccaaaaggagacaccccagtgtttagccctcaccttggtccttaccccagcagtaggggttgcatgggagaagttttgacagctctgaagggaactgttcaggactcaaagtgattgcatacatttcttaggatgaaaaattgcattccctttcaaatgcctatattttgtatttttaaattttcaattagtttggtgggataaataataggtgcacacaggttaagagtatgttgaatgcccccagcgatttgcaaaagaatataaggctctcttctactcctgcaccaccacccccttcccatcgctggtgtgagtccttccaagcagactgcattttcaagatgagtgcacagtttaccacacagactgttccactcttggcttttttcccctcttaagtctacattcttatgcatacattcatcttgtctgtattgaatagctctttagtatgccactgaatgaatataccatagttagaatgtgtgggtatttccaatatttctctctctctttttttttttttttctgatttcttcatgtagcttgcaggatcttagttcactgaccaaggattgaatccgggcccccagcagtggaaatgaggcgccctgaccactggactgccagggaatccctccagtatttttctttttcttaaaacataattttatttatttatgtattggctgtcctgggtctttgttcctgtgcaggcttttctctagttgcctcaagcaggggcttctctctttagctgcagtgcgtaggcttctcattggggtggcttctctcgttgcggagcacgggctctagagcagagtcgatgtctgtggtgcacgggcttagttgctctgtagcgtgtgggatcttcccggagcagagatcaaacccatgtctcctgaattggcaggtggattctctatcactgagccaccagggaagccccctccaatatttgtctattacagccctagaacagagaatatgtctgtacagactggctatgcctgaatattaggcaacttttttcccctccaaaaaatctctctcagaaaagaggaagtccctttactgtatatacaagttctgataaaggctcccattacctgaggatttctgattcctttatttcaaacaaggaagtactacttgtggaagacacaacagcctgaaatgacctcagtgaattctaatttgagatatttatggcggacactcaacagaattggctgtgggggagagaggaggcagaggcatttaacacacatgctgtaatttttcctggggatatgacttcacagttgcaagtgttaaaataacactgtaaacaaatcttcttcaagattactttagaaagcaatgcttcaaaattaagaatgtccctcaccagacaccattaagaaaatgaagaggaagtcgcagagcaggagaagatacctgcaatctgtatatctaacaaaagatctgtatccaaaatgtataaagaacatctgtaaagcaagaagggggaaaagatgatccagaagaaaaatgggcagaagactaggtcagcacttaatttaaaaaaagatatcctgataaccaataaacatacgaacacatgcataacttcattagccatcggggcaatgcaaataaaatcaacaatgcaatcctgccatctactcaccagaacggctagaaggaaaacagaagataatgccaagtgttgacaaggatgcggagcaaaccagaactctcattccctgttgacaggaatacaaattatacaactttggaaaactgtttagcatcatatgggaaagctggacataggtacactctctgagccagcagccttgctccatatgcagcaaaaatgctcacatatattcatgaaaaggcatgtttaagaaaattcaaagcagtactatgatattgtgattgataataaaaagtatacgtttggtcttcctctgggttcctggcacaaggcttctaaatctcttggaatttcctaagtgatgagagtgataaaggtatcttgttacgctattgaagtgacttttggaaagcccccaggtaagctaagattggggcaggttgtcaagggaaccagccacaggattggaggattggagctttcagtcctaccccagtttctggtgaaggaggaggagtcagtgattaaggtcagtcaccaatggccaatgatttgctctatcaagccaacgtaatgaagcctccacaaaacccccaaagggtggggtttgcagtgcttccaggctggtgaacacatacagatgtgggcagagtggtgctcagagaggacacagacgttctgagtcccttcccatatacttgccctatgcatcaagtccacccagctattcctgaattgttattgagtcactcagtcatgtctgactctttcgcgactccatgaactgtagctcaccaggctcctttgtccgtgggattttccaggcaagaatactgacatggattgccactcccttctccagggaatcttcctgacccagggatcaaacctgggtctcctgcattggcaggtgggttctttaccatctgagtcaccagggaagcccaaaacaagtctagtaaaatgtaaattgcaaagcttacatagtgggtcaatggatggtcatt

SEQ ID NO: 47552 - DNA, 1923 bp, Bovine  19866880873903
  misc_feature (1)..(1): n is a, c, g, or t
ncggcggggtgggcgggaccgcgtcctgctgggccgggagaccctcctccctcatcccgccgccgaagtgctggggaaggggagaggaagtgaggatttaggcgactcttggtcgtgggaggccagaaagggaatttctggaaggagttgggacaggtggagcgacggcttagtgtcatgagaagggagtgggcctccgttgtcccactattacgattgtgagaactggtgatatcctgcaagcctccttccccaccggggcttcagtttctctgtcttaagtgtggattatatagggctgttggggaggtaggattacttcgtgtcggcacagattctgcccactgtttagacaaagcttttaggtatcttgttagtgcctctctccatcttacaagtaagaaaacagcatcagagagggcgtggccttgcaggtatcaaacagcatcacagaggtacaattggggctcctgagaagtccgctgtactagagtgtatagttcaaggagttgctcagagccccggggctggggtccaccccatgaaaacctcccatcctctcccagctgtgcttggcctgactgaggaccccatagtgtaggtagtcccaggggcaccttgcccctcaggtaatcatgacccaggaggggaggcatccaatcccagcaatccagcgaccccacccccccacctgccaacacacacccaggtttgctgctgatccttgatgtggaccaatagctgtacctctggatctcaggtggcccatttgtaaaaaaggagttctgattagtggtccaggatatctttggcttctctgtctgagatggagttacctgggaacagattaggggtgcctacccaccagggctcaggttcagcctgcaggctaagcttgcctccctgtcctctcctggaggtccagtgatgggagcacgggtgacaggtcagagggacaagcgcccacagtttgtgggctgaccagccttgggccctgcacttatccaatcaggctgtcctctgtggtttcctgctgggctctgctccctgcccacagccaggcctgtggccacaggccagccccacagccccacctgaaaggttctgggaagttatagagggtttctgagctggagggaggagttgggccatcccatcccaccccagccccctaagctgggccccatctaggcctcagcactgcttactcttcttactaggtatgagccatcaaaacacggtaaggacaaaataaacttgtccccctgcgagtcagttagactccttcaggtaagaggcctgatccttgacctggccatgagatgacctctgactttgaccttggctacaggctttgacacctacctgtctcagagcctgaccctaaagtgactcctgatccttagaatggtgcaaccctccccgattacagagaacccctagctgtccatcttctacccatcagcctgggaagcattagtgcagcatttgctgtatgctgggccctgtgctgacagccagtgagtccaggatgcccttgtggtttctcagtgtggccactgctgaagaacaaggaggtgccatattgggagcactaacatactctttgtatgaggttggagaaggctacccaggggatcattacccagaggtaggtcctaaaggatgtgtaggaggtactgctagagaaaggagaaagaacattccaaacaggtccactagaagcaagagccaccggtcactttgtctagacgaggctgatgaaggccttgcctgaggcaaacatccagtcaaaacattcttctgtcctggccagcagctgcctggagcagtgaggatgactgtggggcttggggttcaggagctcttgagtcccatgtggacctgtgcatgcttgctaagtcacttcagtagtgtcctact

SEQ ID NO: 47553 - DNA, 828 bp, Bovine  19866880886685
  misc_feature (1)..(1): n is a, c, g, or t
ntgctggatgaggtgacgtttgaatcggggccttgaagttgagtaagaattgttgagctgaacagtgcctgtttcatgtaatgtatcttgttattgttcagtcgctaagtcatgtgcaactctttgcgacgtcatggactgcagcacgccaggcttccctgttcttcacagtttgcacaaacttgtgtccattgagtcaatcttgcctgatttaattgctgaggacctgagacatcagaggtgcaacacaagcaagggccctggggcaggaaaaagcactcagtcacttatatctgactctatggactgcagcctgccaggctcctctgtccatgggattctccaggcaagaatactggagagggttaccattcccttctacaggagatcttctcaactcagctcaaacccgggtctcctgccttgcaggtgaatattttaccttctgagctaccagggaaacccgggaaaaggcagggcatgttcagagcagggagtggacctgtggtggagggaagggaagtaggagatgagaagttaggacagccgtcacccagccccgcacagcgttcgtggctgatggagcacctgctgagcccagatggagcctcagagtcctcacgctatgtctggcaggctctgtcaacctactggattagcacgtgaggtgacccattcagtgtccctgccccagagaaaaggcaggctgggcccacaatgggatctgtggagaaggcccaagtacagtaggggcctcccctgggaagcggccattgtggcccataaataggttaggcgggcaggaaacaggaaatcctgacaatacaa

SEQ ID NO: 47554 - DNA, 1619 bp, Bovine  19866880913911
  misc_feature (1)..(1): n is a, c, g, or t
ngagaaagcccttatgcctgtaatgtatgtggaaaatcttttataactctggctgacatttgttatcatcagaaagttcacagcagggaagtgccatataagggcagtgactatgggacctcctttaatcaaatgcacctcctcagttctggtaggaaaatccacactggagaaaagtcttataagtgcagtgaatgtgggaaatcttttactgctaactctggcctttggaatcatcagagaattcacagtggagaaaggctttatgagtgcagtgaacgtgggaaatcttttattgctaggatgagccttctcaatcatcagagagttcacactgaagaaaggccttataagtgcagtgactgtagaaaatgttttattagcagtttgagccttctttgtcatcagagaagtcacagcggagaaaggcctcacgagtgcagtgaacgtgggaaatcttctcctgctagctgtggccttcggtatcatcagagagttcatttgtctagactaggccttatttgccagatggggaaactaggctcagagagaaagaaaaacaataagggcaaccaggcagtgtcccaaacccttatgtgcatttatcagtcaatcctcccaagcagttagaaaactgagactcagagccgttaagggactttacctgagctggtattggatggagactccagaagcccctcttttaaccaaaggcctgtggctttgtctcctgcctctgcgggaagtgggtggggggggtcatatgggacagggcgtggctgtcctcgccaggtaccaggtgggtagaggggtagagctgctcctcctcctcccctctgtctcaggtcacaccaggtcagatctccagcaccgctgggggagctgacaagccaccttggggggcttggccctggggggtgagagagtagctccgacctgcctgtaagtcagccctgatcagaaggcccagtcctgatcagaactacccaccccacccccacctctcccaacagggcaaggaggatgaggataagagcttcgacatgccgccctcgtgggtggagcagattgagatctcccccgaaggtacagtgtctctggacctttgggggcatctgtggcggcgggatgcctgcagaggctgcctcggcccctcatttccaaaccccggccccatgtttcctgctgcaccctcttcatctcttccttcccaccatacacgctcagctctgcggccgggggcctgatcctagtctggcacacaggacagggctcagttaccagacccagagtgatggagtgtggcaggtgctggaggactggggaccgggacacagctgttcccctccctcagcccactctgccaggaggagactacacacagtacccagggcaggcagggaaagcaggggggcagggcatgcttgtgccccatgccaacctctgctgattgctgagatttccatctgggagtggctggacccatggggaggacctaggctgtcccatcagggcgggaagggctggagagggtgtcatgggaaccccgggggttggaggctggggagtgggtgggcagaaagggcttctgggaggaaggctatctaagctaagtttta

SEQ ID NO: 47555 - DNA, 1064 bp, Bovine  19866880939798
  misc_feature (1)..(1): n is a, c, g, or t
ntgcaacagaactgttggtaaaaaacgtacataattgaaagctatcattgattattttgcccaaccgctccccagaaaagttgtgccaatttgctgtcctaccaggaatgaaggggagtctcttgcttacacgtggtagggccattttttcatttttgccaactgaagggttgtaggttggtcccttattgattttctttctttctttccccttcccttccctcccctcccctccccttcctgtctcaaccaagtgagattggtcctgtttttagatgtatattgcgcctatgtttttcttttgtgaattcttggattgggttgttaattctctcccaggatatgtccttccctgcttcccagtctcctgggcttgccaccacatgctcactgccacacttctgccccctgcattgcccttgtgggggtgcttgttggttttcttgtaggcatcctaacccctgtgaacgtggcccgaatgggtacctgatcccaaccacagcatgggctgcagccctgctttacctttcctggagaacacttgtcacatttccttagattttctgtgcttcctctgacctcccacacatctgctttgcttggggaggcaggggctatttcggtagcttgccacccaagaaccctggcaataaggatgctggttcctcccaccacgcatcagctgccgtggaggctgctctaaggagcacatgaggcccccaccctgggctcccaccctggcctagtcacggggtccacgcaccgcgcagtgcctgggggtggcccggcttgaagtagtcgacattcaagcccgtgatcttgtttatgtgctttagctccaacatgtcctccctgttctggtaccactccttcatctccaaagtcttggtacctgtggggcccgatcggtgtctgaagcagccaggccagatcccccagctgctgtcccaccactcccagcacacagagcacaccagcagggcccacactcacacggataggggtggtgacatgaccaaggtcacataacatgtcggggatccagctcttctgccccctccccc

SEQ ID NO: 47556 - DNA, 700 bp, Bovine  19866880950124
  misc_feature (1)..(1): n is a, c, g, or t
nccgccccctgggcctgcctgctcttctctgtggcgggggaggtgggttctcctctctgatgctctctgtgacttggccccctctcagggcttcagtttccccacctgccctgtgaagtggggctggcgctttctttccgcaagcttttgctgtattgagcccctactgtttgccaggttccatgctggcctcggggaacaccttgatgaacaaggtcccccaggtgctggggcgttgagaggttaagggttagaggtccttcctggcatcggagagctccctcccagaccaggggagagtttatcagaccccagacggcgggaccccagagtcctcctggcttgcctgcctgccgccggcactctccagtcctctgtccttttgttttcagcccacttaggagctagggccccagctcagaccctaggacatgtgccagctcccagtaggaaggcagcctcagcagatgggaggagaggaagccctttgaaccctaacaggccgggtccagcctcccaggcaggtccccatatgcggagccagcccagtccccccaccacaagccgctcacccagagccagggagctgctcgctcggttccttggcaacatcctgaggaatccagttgctgcacacgctcccttcctctcccctcccaccgcctgcctgctgcctgcgggggcctggaggcggaggcgg

SEQ ID NO: 47557 - DNA, 1751 bp, Bovine  19866880959886
  misc_feature (1)..(1): n is a, c, g, or t
nagcccattgtagtcattggtcagggtccgcagtgctggctgcagcgtcagcaggttggtccggacgcctatggggacacaaaggggtgagaggcagatggggtgaagggccgtggtgtggggagcaggctagcgctcagccggccggcttacctgccaggttctcgtgtaccgccttcatctccacctgggctctggcgaaggcctcctcgatggcccggttcttgtcctcctccagggactgcatctcttccagcatctgcccgtgggccctctccagctccgactcgtacatggcgatctgaagccagggtcaggagctcagtgcaatgccccatgggaaggtgagatgccccacccccccacacacacacacatgcacgagggagagataggatggccgtctctctccccaaaagggctgccagctccgtgcagctacttcccagcatcagcccagcaccatccaaggtcccataggccctgggaagcaggggagaggatctctcatcagttatgatacggaccagggtacccttccaagagcgttgtgtgccaggccctgagtcaatcttgcaatgaggtcaagcctcaccgggagctgggttctgcgatcagaccattttacagatgaacagaaacttgcccttggtcacgacggccagcagggagagggggactggaacacgggtctgtgggaccccaagtgctcagcctctgcactgtgccagagtgcgaccccagcgtcatgccgccccgacagccacgcgatgacccacacacctgcgcccggagctgtgcggtcagctggtgcgagctctgcagctgctgctccatctccttcagcacctgcctctgcatggccacctgctcctgcaggtgctggttccgggcctgtgactcgctgagggcctgcttggtcttggacgactctacctccactgtcttgatgacatactgcgaggaaggggcggaggggcaggcacacagaggtgtgtgggtgccttgccctcaccctgggaccctgaggggaccctcaggagcatcccactaacatcccgcagaaaaaaactagaggagccctgaggtcttggctttccagaatgctgcaggggcctcctggaatcttctcattttcacgaacccaagaggagcctggctgtggcccaagactgggcacagaacagacaaggagggcaaagacgagagcagaacatagtgaagcatcacatccatgcctggctcatagcaggcaccccaagcctcggttgctggacgcctacatggcctgaccctggacagcaggaaggggaaggggccaggctgagtgcagacctggaaggattccttcaaccccttgcacctacttattcaccaagacaagcctgctctacgtctggcccgtcctgggctccagagaccagtgccgaggcacagcccaggtgcatacagcaggcagccacccagccccggctcaccttgatggggcggtgactgggcgcgcaggctggcgatggtctcgttggctgtctcgcaggcgccggctgagcctctcctcctcctgcgccttctcagccaggcagtccttgagccgcagctccacctcggccagccggtcggtcttctgctgcacctccaggttcagctctgacagcaggcctttgttctccgccacctccagctgtagctgggacagtctgtcgcggagctgggcgctctcctgcagacggacagccacagaggcatgggag

SEQ ID NO: 47558 - DNA, 713 bp, Bovine  19866880962477
  misc_feature (1)..(1): n is a, c, g, or t
nattatttttatctgcttgctgacactatatcatgtctttatcttcctttactgaaaaccaagaagactgatatatatctctctcttataattccacagtcttatttgggtaaccaataacaaaactgagtagaaaaaggacgtttcaaactctttgatcgtgaattctactttactaaagtagaaccaaaagcctggaaagattaagcaactttcctaaagtcacacagccaaagatcaccatgttacattccacttctgtattgctaaatagcaagatgctcattagaaataattctagttctttcccctggggacaaaagatcccttgaaggtaagagagaggcatctcttcccacaggtgccctgctctggaatcctcctaggttcagaggtaccagctcttccagccaatttggtaaggttgatgagatcctgcgtgtgtctggcagctgaagtttgcggtcatttggggaaaggcattctggccctagatctcttctttaatcccagtacacaggagcagcagggcatgtgtacacacacacttcatggctcccaggcgcttactattcagcttcacactggaaattcccaaccattcatttgtgtttttctgcctggcctcacccttttggggaatgtacagaggacacaggagaggcaaaggggaataacagcaaagggcagagggtgagagggcttgccggtag

SEQ ID NO: 47559 - DNA, 1524 bp, Bovine  19866880965467
  misc_feature (1)..(1): n is a, c, g, or t
ncgggcttctctccagcgaacagcccaaattctcagcccctgcagaaagccactggccccagctctccagataccccagagactgacatttcaaacgagaagaaccttcagtgaggaagcgggacctacgcctccatcaccaccccttcacctcacaggtcccagagctccaggctcctgactctctgcccagtgctctttcctgggcttggtctgcaaggaaggggcacagatggtgatgttcctggcagcggcgggagggagaggggccctgcaggcaggtgggtcgggacagactagtggcccagctacctgtccgatcatcacggagaaagcgaagacgcccgtgaaatagtttagaccctggaagacaatttcaaagagcgtcctggggtcgggcaggccgccgatggtgatgagggtcttcacagcccagtagtaacagcgaatgtaactggggagagaagaggaaggggacctcagtcatcagaactcagcctgtggatcctaggcaatctggcttgaatataaagctttatagctcatgagtgcaaaaaaaaaaaaaaaaggaaaaaaatccttctcccaactgcagcatcctctgcagcgtacagagcatgtctgcaggtgctgcgtggtttggtcatgactctgccctgacgctgtagagacatgctgtcatccccatttacagatgtggaaactgaggcttccggagattgcttggaatacttggcaagagaataaaccagggttttccggctcctgatgcctgggatccttcagtttccctccgtatgttttcaatgtccacagtctctgctttgctctcccatcatgaggttcaagaacaagcttaaaactggaagatatctcgagggtcaccttttctgaccctcccctctcctgtccactaaccagacagtgaaactgagggccacaaagggaaagggaacacccatggtcaccagctggcaagttccagggctgggactggaaaacaggtgtcaccttctctctaagctgttacccaccgtcagtaaccccttgacacaggcgcatgagccatcaggaagggaggtggccaatggggtcctgctgtgtggtacaaggcataggaaatgcccaagcttgtgtaatcacacaaagtagcaagagtccctccctcactattttgagttttaaaggtttgcatgtttattaataattacaagtttgcattattccaacagagcagcctcactgttctaattcctagccattaagtcctacaaaaataaacttaagcttttacaataacttaatcgatacagaagtaaaacctttatagctatttaaacggatttaattaccaaggtgcttatgttcagaccttcagactgtgccctccaaggggtcagcaaggttgaggtcagcagggcctaaactcagggcattctcagcaggctttcccgtactttctgtcatcctaccagggcataggaactgcccagagcctgccctgtccccagtgtcctgatacat

SEQ ID NO: 47560 - DNA, 1829 bp, Bovine  19866880982814
  misc_feature (1)..(1): n is a, c, g, or t
ncttacctactaccaataggggaccactgctcaggagctgcctaaaatgaggtgtttctgggaaagttgggtgttcagttgcatgtctgcttgtgtgtcaatgcttgtttggacaccctggttctctctggaggtggggggacattggtacccagaactcccacccccaggaatcaggaaaacattgccctatgtttttcagcacaggaatcttcgtctctaaaacaagacactgaatgggatcacagcctccctctgcatctgtggagatgtttgttggtgaactagagattggctctcaaaggttcaatatggctatgtttctagctttaggattatgaagtcaggctctgctaggttcattgtcggtactttgagttcgaagacacaagcctcctttggaaaaacctagaaaacctccctggcaagagagcgtggttcttatttcctcctggtactctgaaagaagaaaacttccacataaatattgtaaccaaggcctttgaaaacgaagactgtgtggttccagagtgggttatggataccatctgagtgttagaccgtgacatacgccccagggtggaccacctacctgcctgcaagcaggaaaggggcagaaggtcaaccagggaacttgccctctgggagacagagctaagtacaactggatcatcagccagaactctgaccttctttccacccctggacacgtagctaaaactgtatacaaaggatctcgaattccagagagtggagatctgcgcttctctcaagcacccccaccattttcttggggttaccctccctatgagttgaaagagggctccaggggccccaccacaccctgggtccagtggaccatcaccagctctggactcacagggcttggggctctcctcatcggaggtgacgtcagggtcgatgagcttctccttcaccttctccgtccgctccttgaagagcttcaccagctcctggagccggtcattgatgatggcactgttctggctggctgtcgaggttgcacggtcctggtcactgtggaaacagcacccagagctgagcggactgtgtggggagggacccctgcgcccccaggcaagggcagaatctgtatcccacctggctggagggggtcaatcctgccccagtctccctctggacatcaaaacatcaaacccaccttaatatctcctgggaggaaattcagcctgggaattgcaccgggatacccagctttttaggaaatgtaccatgcaggctctgattcagatgggcaattctgaaaaactctggattccacttgtaatttagggggcaactcttggaactcagttcagggccgttagactcagtttggggttcacatgacatacaggactgatcagagaggggacagcggctactttttgaggtttaggaaatagctgattttaaaaacagtgcaggaaattccctggcagtcctgaggttaggactctgagctctcattgccaaggtcatgggtttgatccctggtcagggaactaagatcccacaagccatgcagcatgggcaaaataaattaattaattagtttaattcaattaaaattttaaaaaacattacagatacattacaaatccttttaatttataggaatttaaaatgtatgaacttgcatcaagagagacagacatagacagacagaatgaatgagagtctgcctgacagtcccctcagcctgggtccagagctctgggtgagttgagatgggtggctgtgtgaatcagcctagttccctgttctttgctgagtggcctgtgatcctctcgctgagctgaggatga

SEQ ID NO: 47561 - DNA, 1679 bp, Bovine  19866881023787
  misc_feature (1)..(1): n is a, c, g, or t
ntgtgatcaaaactgcctgcagggggcgctaaggggcacgtcaggctctaccagcatcatcaggtgaggcgtgtctcagtctttggagggctggggtggaaacgatttttggactgcaatgtcccatagtttgtgaggcaagagggcttcgggagaagctgtgggcccctgtgaggtgtgggctcggcagtggtgagcaagggtgatgcagcgttggagaggcccagatggaaagatggacctagcccagcccagaaatgtttctactaagcctgagtcaggggcaggcaaaggcccacacagtaaataaaggtttacagcaggcaccaggcggctcttgggaaccactgcccaaagtccagggttggaatcagggaccctggggctgtgagtggaaggctagagaggtcctagaagaggaagggaggagcaggaaggggaaggctggggaggctgacaaagggggagggccctgggctcagaggtagggaagctgtgctcctccaggggtctgtctcaaagctctgcctcgacccattttccctgcatgccatccttaggttaaaatgaatggggctacagagtaccctcgtggtgatcaccagagacagagcagccatggcacatttctgtcctgggcgagagcacaggaccaagggtaccgccagcctccaaggtttaagtcctgcagactcccaacccccagctccaagggccggtccagtggtggtgcattaagaccagccttcagtcccactcctgggtcccctgagatggacccaagaggcaagtagtcagaagacccagcctgggaattcctggctgccatggcaacagccccatccctccaaggtccttgggccttctcaagtcttcagctggcccacccagggttgggcctggctgcaggggctgcaggtagcagtgaagagagacaggtgactctgcttcttcacaccggcggggggcgctggcggcctagatgcggctggacgaggtgctgcccgagctgatggggagcctggcactgtccgagttgctcttcagaggggagggcccaccctgggcctgcaggcgcatggaccagtaccagaggaaaatgaggaagcctgtgggcagcaagggggtacagggctcagaggctgggagcagcccccccgacaccactcccgtccactttgacccatgtctgcccacacccccatcacaggctccccacaacgactcgatcccaggagtaccgactctgcgccaggcactgggcaacgctctgtgcatcatgtcactttagtctctccagctcccttgagaccatgcctcgttattaccattctgtttcacaaacagggagactgaggcccagggagataaggggcttggctgagccaggggtccagcagcagtgggtgggctctggagccacctgcttaagtaccaggtgatagtatttctccccaaataatactactgtgatttagcaatagctcagtaaatgcgtgaattgatcagcatccttacagagttcccttcacttcacagatgggaaaacaaaggctcacctccgtcacaccccactccatcgcatggggactccatggagaccttgctttccctgttttcctgcccaagctgtcctccctacccaacatggtgaaaaacaaaggtgtgtgtgtgtgtgt

SEQ ID NO: 47562 - DNA, 1897 bp, Bovine  19866881069232
  misc_feature (1)..(1): n is a, c, g, or t
naggaggtgacaagatccctgtccccccgtctgtcttctccatagaccagagccccaggttgcttctagggaagggaagagcttacctcctggttgacagcgaacggggaggaaaacagtgctggccatcccatcctcctgcccagcctgtcttctctctcaaaccacagactgacctcagctgtctggctgcagtttcccttctgcatctgtgttccaaaagtggctaaggccaggcatacaaggtcagcccagttacctccctgttcattttttgggggctgtgtttcagttccttggggccttggcagaatgcctgcctttggagcataggaccccttagcattcccaaggtcagctgccagccctccctttcctttctcctcctccgggtcccagatccctggctgaggggcaaacccgacacatagccaggcatcctccccaacaggggctgggggccagggtgagcctgaggttcccgctccctccagggatggtcggtggaggcacagactaggatcccaccccagctcactgagcacacagcgccgcctcacctggtcctccgctactgtttgcatacccccatgggcggggtgctcaccacctccagccacacagctagcactaaaggaagctctctgaagatgcaagactcgattctaagctctccacccaaaggagcacatttaatcctcccccaaatctgagacaaataccattctgtccatttaacaaataaggaaacaggccctgaagatcaggttggctgctggagatcacgcggcttgaggtgcagcattggggcctggctccagagcacaggctctcgattttgcagtccatttctgcttgacattacctgttagaaagggcttctctttaaaatttccagtaaaagatgcttccagaaatgtgtttgcttggtattagttgaatcccttcctctgaagaagccctggtcctgggagctgtcaggaccccctcccagcaacactcttgctctctgtccgccgcaggctctggacacccactcccagcaccagcagaggcttgtcttcgatgacgggggtacagcccataaactgaaattgaatttttgctggagtgtggctgagggaaggaatgtggggtatgaggcccttacccccagccacttcctcgtcactctgggctgctgtctgtttcactgaccaattcccctcggagtcgcatctgagcccctggtgtcacagacacccagccccaccctccccatcagctaagctttcagtttagggagaaagggcggttgtggggatgggagggagaggcagagggagcagaaggtgatacgggggagagggatggcagggaaggtggacaaggaaaaggggagagatgagaagtgggggtggggtttggggagcgggaagtcagaaggatggagagagagggcaagaatcatacctggattcctccttcgtgccgtcaagcggattatcaatacataaagcgcgtgaatgagtaggctaagggctcgccttgtttgcaggctgcagcctgctgaggcggtgggtcagcttcttcccagtccaagaggccagaggggcaccttgaagctgaactaccccagctccggctcccgcctcctcaccagagcctcaaacaaagcagcgggaagatgggctgcaagccccagcccacagcccaggaaaaggggcgcaggtgacagcaacccctggcaaccgttgccctggcaaccattggcagctgcagtgactactacgtcaccacccaactccaacccagcacagcgcagttcccctaattgtcctgtgcccatatccccttactcagatgccggccaggaatggagcggcaggaagaagggcagagtttagtacattaagtt

SEQ ID NO: 47563 - DNA, 1003 bp, Bovine  19866881145124
  misc_feature (1)..(1): n is a, c, g, or t
nagcgctggagaaccgcctattttttctacttatatccttatgtttctccccttatttaaaacttccccatgtctccctgtagaatgttgagtaaatgccaggtacctgagctaatgccagaaatccataattaattacccagaggcaggctgagctcacttctgaacccacttgctgctgttgcttcctgctcattattgcagaatagacacaaatagcatctcttttagacaattccctgaaagccccagccccagcctccctccacacaccccctcctgtacggacctctgccagagcccttagcacatgctctgtgagtgtgtgtgtatctgtgtgtgtctgtgtgtttctgagtgtccctgaccccaccacagctcctggctcacagtaggtgctcaatacctgttggatgacaagtcagcactggccaagtttgtgttcccacacagaagggtgtctgcttcaggtgtctccaccacccagccatggcccgcatcatcgacctggtgccctgggaggatggctccacccacatgtatgcatccccagccatcctactccccatgcccccggcggcgcaaccagctggccagcgtgaaacagcagctctaccacccggccctgcccagcctgcgccgcatggacatggactctgtcaaggcctgcctttccgacgagcactgccagtccaccacctactgccgcaaaggttgggccacctgggcgctgcggtggcccctcggggccttaggggaaggtgtggatggtttggaggagaaagatctcagagggagaagccaggagtggcagatgaaaggcttagagggactagtcccagctctgctcctccttgcctgagaatcctctgggtctgagcctctgttttcctatcagtaaaatgggaagtctaacagggtggcctctcagggctattgggagattgttgttgttcagtcgataagtcaggaagactttttacaaccctgtaggggtcctcca

SEQ ID NO: 47564 - DNA, 1073 bp, Bovine  19866881201161
  misc_feature (1)..(1): n is a, c, g, or t
nagctgagagttcgggtccttcagcaactttctgggctgtggctatcctggccaatcactcttcagagcactagcttggctgcttcctgttttacctccctgatttctgggctttctaatttcattttccaaccatctctgttggtggtatattcccgtatgagggaagtttattaaagcactttgttagaactgtggtggaagcatctctctgccttccatcctggatcccaccaagtaccatcgcatattaatttcttttatgaaggtgtagatatatacatgtgtatatacatttttaattttctaccagaaatacgatagtattaataagtcagattctttccggctgcctgtttagaggcttattgatctctgagcaaagcaggccaagatgggctgtagggagggagtttctttttaaagcaatgtcttaaaaaaaaaagtcttagaggatgtctctacgggcatccttttttttaaaaaatcagtctcataaaagacatacatggaggaagtctgccacagaatctaaattttaggagactgaggggaaaatggttataaaacggtagcccagtcagccctctgatgccgtgtgtcacactctggggggaaggagcactgatgtgtggatatagcactggtccctgaatgaagaggacctagaggctactgtggcttgttgagggaccctcctcatacgttaaactctccttcctaagatgggaatgactctggagtcctcctgaagggatgtgtgatcaaagaaatttcacaaacttctggagaaaatgcttaacccagccatccccacccgctgcgggcctgaggagagcactcacgtcagtggactggtccccagcgtaatgccacatgtcatccaccatgctggtcagcaggttcaggctgggtgggatgttgtgagggagcatgaggatgctgagggcctggggagagacgacacaggaaggggtacttgcacaccggtaatgacagcgcctcactgttcggtagaggtagtaaggggcccgcccagccctccttctgagacgcaccatctccacccacag

SEQ ID NO: 47565 - DNA, 420 bp, Bovine  19866881382217
  misc_feature (1)..(1): n is a, c, g, or t
nccagggctattgtctcactggcggcgcagagctgtgtcctattcaggcactatttttggcgcccagaggaagaggaaaagaaagcaaagaaaggagttgctgttctcggtggaaccttcgcccggaaaggattccagggcctgctgggccagagaaggcagtcgctgtggatcaaaagatcctaggcttgaaaggacctggcggggggctgtggttcaggggagccagagagggggccacagatggggcacccctggccttgtacacacacttggtactcactaactgcagccacatgcagagaaagagaggcccaggacccctggtcccacccatagtcactaagcacttataataacaatttttttttgtttttttttgtttttttctaattttattttatttttaaactttacata

SEQ ID NO: 47566 - DNA, 1512 bp, Bovine  19866881421455
  misc_feature (1)..(1): n is a, c, g, or t
nggatgttggcattcgatctctggttcctctgccttttctaaaacctagatcgccgttttaccccaatccaagatggaaggtccgcggcttcacgctgctcttgatgtccccttcctgttggctatcctgaaattggttttccaataatacggttgctgattggtcaattttggacggttgctaaagcgattggtgcaaccgcccttggagggcgtttcgaaaaaaaattaagtgcaaactagttttcgtgagagacggaaaggggaggaaagggaaagcttgaggcggaggcggaaccaagaaaacggcagctcgcattggttcactagaggcctaggggcggctcttgaactctccttcctcgtgattagtccaattcaggaaaagagggcggggacttaggagaggcggcagaagcgcctgcttctattggtcatacccgaagggcggtggagtgctcgcggcggctgattggtgctgggggtgaggaaggaggggctctgagccggaggttttgttgtgagggtcggttgtcaagcagcggccaatcaggccaggggatggaggcaagtgggggtcgcgcctggagcggagcctcggcctgccgaaccgcagctgcaggtggagtgggcgagggggcgaaggggcgaggcggcgaggggaggttgagccctgggctgggccgagccaggcggggccacgccgggatgcgacggagaaggccctgggcagaggggggccggagccagtactgagaggagtgggagggttaggcaaggccgagggaccatttccagcttcgggaggggcgggaccggtgtggaggcccaaggggaaaatcctgagaggccggaaggagagcggggggtctgcaggaggaggggggatgaatggggactcttgaagcaggagagtgaatgaatggggatactgatagcagagagaaagggggggacttaagagggtctggcgaggcaggggccaagttagggagccctggagaccggatgtgcacacataggcggcagggagaaggagagaatggagaactagagaggcagacctggggaatccaggagaaaggcttgggggagcggataggagactccatgaggtcgccttttaatgctgaagagtcataccgactcatgtccagtctggaggcctagttcccagcgctgtccttgggaatggcagggacctggagtagttcccttgatacatactggactcccagggccctcttcaagactctccctagagaaaacttaagtctctctctctctctctctgtctctctctctgtctctctctgtctctctctctctctctgtctctcgggtgcctctcgtggccccctaaacttagtctctgactccgcccccttcccatacgtcagacaaaactgactctctgagatctatcagaactgcagacatgtggtctttcttccccgccccactgcagcatttcagctgcatttcaggcagccagcctccggaacagaacct

SEQ ID NO: 47567 - DNA, 1563 bp, Bovine  19866881461609
  misc_feature (1)..(1): n is a, c, g, or t
naggagccccccttggagaaaggcagaggcagggaccaatggaagtgggtctgggcaggtccccaaagatcccacattcaagcctgtgacatcactgctggcccatccctggctgccagggcacttcaccccacttcctgtccatctctggagaccgggacactttccccagcccatgttcctcctggagcagccaggacaggagggaggagactgcggggacggaaagctcagatgcgggccagggctggagctacactggacctttagacacaaagagccgtgatcaaacaaggctgcttccgtaaactgaagggggatgagaagctatttgacctgcctcacctgtgtcacgggacagagaggggagacttgacgggacaaggtagaaggcagtgatgggagagaggtccaatcagtttattcctgcagcccacccactgcacactggtcagtaaactggttacatacgtcccgtgaccagccaagggttgaattcagccctcaaatgtgatttctttgaccggcgaatattttggattagctaaggtttttttttcatatttattatttttatttaattatgtggctgcaccaagtcttagttgctgcacgcaggttttgatctttgatcaacgatctttgatcgttgtggcaagtggcatcttcagtagcagcatgcgggatttttttagttgaggcacgtggggtctagttccctgaccagggatcaaacccaggggtcctgcactgggagagcggagccttagccactggacccccagggaagtccctagtcaagtttcttaaatcaggggattttacaccagcacaatctggattcctcctcataaaaggcaggtgtggtttggctacacgggccctcattcctgcaaggtggtgattggctcgagctgagtagcagctgcaccctcagcgtgaggctcgtagccttccactgaccccaccgtttgccactgcctccccagtcgccatttctcccactgctgacacccagtcaccatttctcctctccgttgccctgataacacttccagtaggtttctcttatacatggccgtcttctcttgctcatgtttctccattgtcccccccgccccacccccacagtgacccttactagaagcacagaacaaagttcaggaggaaacgcccccaaatgtttgcatttgttggttaggtgacaacaactgacttttattttcttctgtgcactcttctacagcttccaaattctctacgatgaacacatacttctttttaatatcaaaagacaaatggactggtaattacaaaggaaatcctccccatttttgagtctgagagccaggtcaaatgttgctgtcctgcaggaagtcttcctggaatcccagctaggagtgatggctcccccaaccctgtgcctgcagctctaagagttcttgtgtttgtgcatggttcccacactagactgagaactcacagaggggaacgaccatttgttccaacagaattaactgggactggctgcggtgtgatcaaaactgcctgcagggggcgcta

SEQ ID NO: 47568 - DNA, 1688 bp, Bovine  19866881478981
  misc_feature (1)..(1): n is a, c, g, or t
naaccccatggaggtgaaggggggccctttcattttgctgagggccttgggggactctaaggcactgtgccagtggtccacaagcttttgagagccttcccaaatgatgcctaggctctgaaaacaaaactgtgtgcatgtgtgtacgtgtgctcagttgtacctgactctgtgaccctgtggactgtagcccaccaggatcctctgtccatgggattttacaggcaagaatactgtaaatgtaagtggaaagcatacagacagatgctttaataatagggccacctgggaagcacaaaaacaaaattactaactcgggtggtgttagtggtaaagaaattcccctgccaatgcagaagacacaaaagatgcaggttcaatccctgggtcaagaagatctcctggagaagggcatggcgacccactccagtatccttgcctggagaatcccactgacagaggagcctggagggctgtagtccataagttcacaaacagtccaacacaactgaagcaacttagcacaaagataaaaaggaaacagcgggggaaaaggtcaattaacatataattagcatgtcaaatttccttaaggattccattcagaatccgtaagaacttcactacatttggaaacaatttatgggtaagattctcccactttgcaagaattactgagcatacctcatcgctgacaagaaagctgaaccacagtgaatgaacatgtgttgttttagccaatttcagaagcaaagcatgacaaacaactataaaattattgtaataaactataatggaaaatgatctgaaaagaaattttttttaatttataaaatatatattgtatgtatagatgtatatgtatacatgcttctctgatgtatacaggcttctctgatggctcagtggtaaagaatctgcctgcaatgcaggagacctgggttcgaaccctgggtcagaaagatgccctgtagaaggaaatggtaacacactccagtattcttgcctgaaaaatcccacggatggaggaacctggcaggctacagtccatggggtcacaaaagagtcagacccgacttagcaacttcttgtatatggagagcaagaaaagtgagagagacagagacagacttcttcctttcctggttccaactgcacgtccaactttgaatgggcacctcccaaggcctccccaggcatctctcacttacatgttggggctgcagccccgagaggcccccaagctcagggccccaaggacagaggacaagggcggggcccaggagggcggggcccaggagggcggggcccaggagggcggggcccaggagggcggggcccaggagggcggggcccaggagggcggggcccaggagggcggggcccaggagggcggggcccaggagggcggggcccaggagggcggggcccaggagggcggggcccaggaggggcgtgtcttacccagcatgccttgggagtgccaggtgtattcgtaccaggtcttgacccggttctgcacggacctggggatcttgtagaagttcatatacttcacggtgctgtccatgcagctgcggtagtaggtctgtcccgcggtggcggcccccactacgtctctcatctgggggccaggggggtggtggtcaggacggccactgggtcagggtggggccgggcttcagggg

SEQ ID NO: 47569 - DNA, 1132 bp, Bovine  19866881500383
  misc_feature (1)..(1): n is a, c, g, or t
nccgcagcactgaccctcatcaaatcagcactttctcccagccaggccaggaggggagcaggaagagtgggactgacttgggctgtagctctgggtttgacattgttttcttatctccaaatgatacgcatttagaaaggttggtggtagaaggtatgaggggagggttccagaggtcctgagcacaaggcttctgccccaaagaggaccttggtgaatgactcgggctgtgtgagcctgagctctctgctgtgcaaaatggggcaggaggacagagctaacggttcctgcccgagcactggcctcagagggaagttgtgagtgtctgataagccctctgatcttggtgactttctgttgcatccctacaccccactctctccaccttcttgtgtataggcactcacacacaaaacactcactcacacacacatacacacatcagccagccagccgggctaattagttatacctccaaaacacaccctgaattttgaacttgaccaccctttgcaatctccacttccctggctcagtcaccatcatctctcatcctcctttccatgaccatctccctgggcttttgattctcctcttgcctctcacatccattctctgtagatcagccaaatggatcattttgaaaggccaactgaatcttgtcactcccctgctttgaacactccagtgactccaacacagacagaagaaaatccaaactccttttcctggcaccccagccctgtgtgatatggacttcagcctcctcccacgcttaaccttgtcccgttggccttgctgcctcttcaacagaccacaatccctctctgccccaggacctttgcacaggctatacccaccctgccccctgccctgggaacactgccattcctggctttgactgtgcttgtctctcccttcagaactcactgtcttctgagaggcgccctccctgaccacctatgagagcctcatagtcactcttgatcattggtaaaaagaggcttttttaaaggtaaaactatgattctcacctaaatataaaaagaacacaagtcaaagatttcatttaactcagcaatttgtaaaaaaaaaaaaacacacaaaaaaacaaaacagcaagatgttacaa

SEQ ID NO: 47570 - DNA, 1540 bp, Bovine  19866881586736
  misc_feature (1)..(1): n is a, c, g, or t
ntgcctcactgagcctcagtttctcctctgtgaaatgggaagaaacagtctagatgaggctaacgaagcagaatttttcctccagctcctgacctctagctccgtctctccattctctctgctcccaccctgttcatctcctgtcttcctttacctggacctacgctgcagccgcaggatgggacttcacccctctgccctcacccctgtcttcccacaaacacaccttgcatcacactcttccactcctcagacaccttccctgagtccccactgcctgtgaacagagcccccccaactgcatgatatgacaggcagcccagaccgctttaagcgccccgcccccagcccccgtgcactttgcttttccagtttccaggccttgggctaatccctttctgctgcctggaagtcaccttactgtggaaggagaagatgaagctggctgcgctgggcagactcgtgttctgggggctccaccaggagctgactgaggtggcaaacagcgggggccccggggccagggtctcctcctgatgccggaagcacaggaggtcaagggcttggtcactcagcacgaagtctttcttgccgtagcgaagatgcaatttccctgcatggcggttccagtagaggcagaaatggtagaggcccctgggaagagggaatggccaagaagccggctggactccagggaagggggcatggatggtgagggcctcctcagaattcctgatggagatgtggagctgggacgcctgcttataatggaggctgctgttctgcgtctggttccgctggccgcagaagcggaagtcttcccgggggcccccgccatgggcacctgagggggcagagactgcagatgagactctgggctggaggcaggccctaggcccagaacacaggagcccagtgcctgggacccacacacattccaaggacctacttcaaagggtttcaaaaaatataaatctaccctgttccaagatggttggcttaaaaataggaaaagaacaaactcaaaatcagtttaaaaaaaaaaaaagaaagaaaagaaaaaaatttcaaaggcaaaataatattttaaatagcaataaaatatttcatgaggccatgcctgccacagacagcagcgcaggctgtgcactgcacaggggtgctctggctgcaggggcgggtggggcccaaacccaccccaagctgtgtactggggccgggggctgcatttgacaggatgaaggggagactctatcttttttccaaggtaccgtctacttgctaagctgtatttgcaggcctgtgcctgcccaaaggggttagtggatgtgctggttcttaacacaaggatggcattttaacagaagtcccaaggcacctccaggaaaacttacctggaaccaggaagagacccagcaggaacagtggcatctgcagcagcacttgggcagtcatcttcctcccccaaggcacccgagacatcactgcctgaaagaggccaggagtgttagccgaggtccgatccccagggggatgccag

SEQ ID NO: 47571 - DNA, 1403 bp, Bovine  19866881779054
  misc_feature (1)..(1): n is a, c, g, or t
nacgaagatccctagagtgggtcctgcaggcattccgggtcagctcggccgggaactgcatggcgtgctggggccgggcctgcagagggccagagacaggctgggccccatgtccacagtcctccggacccacagcaccttcactgttccccactcaccagggagccctcccggccttgccctcaggcacttcctatcttggagcctccacccacagaaccctctcctgccaggctgcacctccacccaaacttgcgagatcctaggccttcccttcaggctgttctggtcttgagctggggtcttttctcccactcaagtggggccctgaggatggaacatcagcacccaacacccaggcattctgcaggaatcacaccagggccctcaaagggggctacctcaccccaggaacctgcaaaagcaggaaatcaaccctgaatattcattggaaggactgatgctgaagctgaagctccagtactttgggcacttggtgtgaagaactgattcattggaaaagaccctgatgctgggaaagattgaaggcaggaggagaaggggatgagaggacaagatggttggatggcatcactgactcaagggacatgagtttgagcaaactccgggagacagtgaaggacagggaagccctggtgtgctgcagcccatggggtcacaaagagttggacacgaatgggcgactgaacaacaactcacagctattaaggcagagtccaaagcccggactggtgggaaggcaggtgatagaccctggggaaagtccagaccttcaacccctggagcatttgtggggttgaggctctgggtaccctcaatccctgggcatctctgacctgggggaccttctccagagcggcactgctcagagagaggccagagaagttgcagttcagcttgaaggccagtgcctggatgatttgcgtctgcaaggtgaggttgtggcccccgaagctggcattgagcagcctcaactctaggccatgaatgagcctgagggttagagagacagccagagccctggagtaaggatggaagcaagagggaccctcccacagccttcccccatcccacacccctgtcactcccaactccaaacatctgcacacacagtgttcctggcacacccttacctcttcaccagctcccccatctccttcttccattaactcttgcttgggtcccattttattgccacctcctccaagaagccttccctggctgttccccactggctgaaatgccccacagtccctacacttccctgttaagtcatcagcattagcctgtcaccctgagcacctagggttttgagtcagagaccttggagagcctagtccattcttggagcccctttccagaaaaatgcacagagacccacg

SEQ ID NO: 47572 - DNA, 902 bp, Bovine  19866881955309
  misc_feature (1)..(1): n is a, c, g, or t
ncttttttgaagggatgtttgtttttaaagatccggaatgtcccgtttcccccaattgtgaggagggcacattcaggctgacgtgtgtggctcccctgcacatccagggagctgggcctcgatttggtttcagctcaggaaactgacccccaaacactcaaacatgggtggtgggctgtagggacacagtgggccatcttgcagatgcccaggcttggaatacaggacaagccaggccacgctgggggacagggctcctcttgatatctctcaggggcagcgcttctctgcatgcatgtcctttctttgccccccgcccccaccccacgcattccctcctcagcttctccacttccccagaattgtctgcacatgtagctctgtgccaattctgggacccagtcttgacaactttctgttggagcatcaccattcctagccagcaaagtctcagcagagcagccagtaggccctgtagtatagccaccggttcccatgggccaagtgtctgttgcaccaggcagctgggcagggccttgcggctctgatacggggatctctgagggtgctggggagggtgaggactagcttcttccctgcagtccccacccctgggctgagatataattgccacctttttgactgctgcgttcgtgccttccttcttctgcagggttatcaggaccacagcctacctgctctacagcttacatctgaactcatgtctctattactgggcatcggcctatgagggcctcggctccactcactgggtttatgatggcgtgggaaacaggtgagccgcagtcttcctcctgtgtcttaataattcaaagcaccaagactcctagagaggagtcccgctgccgccatgttgccgggtcgcctcgttcccaaggaat

SEQ ID NO: 47573 - DNA, 1593 bp, Bovine  19866880475297
  misc_feature (1)..(1): n is a, c, g, or t
nacaactactttataattggatacttccactctattccaatgcctcacttttgattaattacagattatacacttaagcaataagtactaattattggggcttcttttgtagctcagctggtaaagaatctgactacaacacgcgagacctgggttcaatccctgggttgggaagatcccctgaagaagggaaaggctttagtgttctggcctggagaattccatggacagtccatggggtcgcaaagtgtcggacatgactgagcgactttcacacactaattattagcaacaagtactaatttaatttttatgagtgaatgtcaaagaaaaagacagacaagatgaaactgatgcttaccactatgcaaagatcaaatgatattataggaagggatatttcaagtaatttgaatacaggaaagtggtggaccaatatgagtttccatctgagacttggcaaatttaaaagaatctatacggtagctggcaataatctaaatgcctctcacctaggagacatttaatttcagtaaaataatttaatgctaatttgaattttattggacaatagaagctatggaataatgaaatagaggtctgataaggaaattagggagtttgccttgcacagtcagatataaatttcatcttttctaatgttgcttgctaatgcttttggtacaagtagattgtctaagagagtaataaaaggtgctgaggttgtgtaaagatcaaagaggataaaaataaagaccattatgagggataactggaaatatagtttacacttaacgaatgcttatcaaatatgcagaacaatcaggcttccactgggcaggcaggggttagagggtggtgttgggtgggtcggtgtccctgactgggcaaacatttgtaagaagtaaacatctttcaatggtaaagctgcttgtcagctgtgagtccttccagggaaccggatgtggctccccaccctctgtgccagcaactggcaaaggtgaaggcaaggctaacgtttctctcaaaataaaatattaaaaagtacacagaatttgagaccaagatatagttatcattcatcatagtgaagacaaatccaatagtgaaacaatttggggtcaagaggttaaagtcctacaataaaccactgctgataaattggaaaaatgtgtgtctatatattcatatatataggggtaaggaaagatgcttccataaccagcattttccaaagagagaactcaaagggagatgtacagcaatggggtcatttaagaattctgttttcatcttggtccttcaccttctggaaggggccctgagtgattcactcattcagctgaataataatggctatgaaggcattgtcattgcaattgaccctaatgtaccagaagatgaaacactcatccaacatataaaggtaagtctgaaatggtaactattcatgctgttttgaaaaattaagcataatatgttgatagagcaaacatgagttctctaattccagctgtgtgacactggaaagtttttttttaatatctgtgcttgcatttcttcagctataaaaggaaataataacacaacaat

SEQ ID NO: 47574 - DNA, 1366 bp, Bovine  19866880561490
  misc_feature (1)..(1): n is a, c, g, or t
nacaagactctagctctttcacaggtgttgccttgaaaagtccttggcctgaattcttacatttctaaaaataaatgttaattattataaaaataattcatgcttattgcaaaaaacaatgtagaaatatggaaaatgaaaacattacctttcattattcctcagtggtgtgtacatagacacacacacacaccagtacacatgtagtacttttatagtgatcattacatatatatatagacatatatatatatatatattcacacatttatgaaagtgaaagccactcaatcgtgtctgactgtctgccaccccatggactatacagtccatggaattctcctgtccagaatactagtgggtagccgttcccttctccaggggatcttcccgacccaggtctcccacattgcaggtggattttttaccagctgagccacgaaggaagcccatacacttataggattatattaaatctattgttccaaaatcagctttaaagaaattaaccagatagatactcaacttctaagaacaagtctccagacaacttctaagagcaattcttgagacaatgtattatctttcttcctaaaaacaatgttgtatataaaactgtgttctctagatggttattggaatagatatttatttttgtttccaacttaaaataatgtgttttataaatagtaattgaaatggtcagggtacaatatgaaatataacttcagcagaaaaattgttttgttgatctgattggttatgggaataaaaggaaaagggatcaacctacagaaagttgttcacaaaaggctataccatttcacagtacagctctaaatgatatgtaaatgctcttaaaatttctttgaatatttaaattacattttacagtgtacctaatgtcagaattttaccgttttgacttctgagaaaattttaatctggaaaatgggtacgtcaaatgacagtaatgaagttccatggaaatctgttaagtttttaaaatgtacacatttttgaaagtgacagatattggtgttgacatttaattgtgaattcattctaaactccatctaaaggcatatgtttttaaaaatctgtttttaaattgggatataaaccacacaggaaaaatgcacatatcttaaatgtacagttcaatgtgttttaacaaatgtagatattagtatcaccaatatcacagccaagatacatggtatcacaaggcatttcttttaatttaggcaaatgtcatagtaactgactggtatggggcacatggtgatgatccgtacaccttgcaatacagaggatgggaaaagagggaaaatatattcattttacatctaaatttctactaaat

SEQ ID NO: 47575 - DNA, 4161 bp, Bovine  19866880659414
  misc_feature (1)..(1): n is a, c, g, or t
ntgggcaaggaaaattaaaactcactcacagtgctctgaaagaaagatggccaacagaacagaaacaggagatgcctactgcagtagaaccaatggaagaaacaagagaattttaatgaaaatagaatggaattacagtgcaaaatacaaaaaaaacatccaaaatttttaggaactaaaactcaagacttcttattttttttttttttttggttttcttcttccaattttattttatttttaaactttacaattcagtatccaacagcaaaagagaatgactgcccctgagaaccatataagcggttagaaacatcagatggaagaaatgcctcacaacagtcctgtaacagataccctgagggaaaaggcaagtggtgtggaggtcagatccagcagacaaaataaggaagaggggaggaatatgtagagaggtaataatcacacaaataatggaaggaaacatttagaatttaagagtcatgagatcctgaatatcaaggataaacagaaaatcctgccagcctattagtactgtgggaacaagggctttctttccccatctgggatgatgagaagctggaagcagacaccacttggggattcccagggactgactgtgagcccccctgacactgagtttggttcacatgccagaaaaatccaatgtctgtgcttaatgtttcacatggaaacgttaagcagggagattgctgaagttctagttctggtaaatttcctttgttattctgtgccagtacatccaagtaccaaccttagggtcttttccttccatagtctagccaaaatatggcggggaccaacttttaaataccatatgcacaaatttctttgataaaattaaaaatgtttaaaagagaaagtattcacagatgaagtaatgcatgattgttacaagaaaccattacctttacttatgaaatatacatgaagatagtatggtcatagccaagagaagagattctggatacctgctacttactagctgtgtgaccttgagtgagttgcttttctgtgttttggtttcctgaaaagtaaatgtaattaatagcacctatctcattagataaagggaaaatgaattaatacaagtatcagagtcagaactttggcatagattagtgctcaataaattagcaaccccatggactgcagcctaccaggctcctccgtccatgggattttccaggcaagagtactggagtagggtgccattaccttctccgatagcaatgatgccactgggctaatgctgctgtcactgcttacaacaggaaaaaagtattgtacagagattctggagtcagaagactcgagttcaaataccaactttaaaactcaaagagttttataccacagccacaggagtaattcctcttatacttttcatatttaaaacaggaatatgaatatctccctcttttaatatccatctacctatccacaaacatcaactaagtgtctatataccaggtcttgtgttgtagctgaaagagaaataagaaaacgtcaataagatacagttctgttctttaagagttcaaagtctagtgaaaaatactcaaaaacctttcgttttctttcttgagagtattttttttttctttcatgagagtatttcttaaggctgcctttgcttaaggagatgaagaaagaatcacaagggtcaagcatgtaacacaagtactatgatttaaaattaaaaggcaacactaatattgttagcaattgttaggcaaaaaatgtggccagtttctgaaattagtgtatttttgaaaaatactatgaagcaatttgggtcactgggaagtaagcccctgcagatgataacagcagtcttaggagtgaggggatcagagaaaagcaggccctcatttctggttagagaaatagataaaacatcttggagagactgagctcagttcataggctggactgtgtagtacacaacttgctgctttgaatgatcatttgagacctgagtatcctttaaataaacacctctcaagtcattctctgagaggagtcactattacttgattctttgtcaattatatctgtccccttgtagagtatcctgacttgacacatagggtaggagattagagagaacatctttcttggtgtctcttctactccattccaataacaaagatctcacactaaagcttcttggtattaaaagtgtttattttgatcatcccatgtgagttggccatgggaaggggtaggaaaaatcactcctctttaatctctcagttaactcaggggtttcagaatgtctacactaataatatcaatcactaacataagatgaacaaaaagagactataaattcacaggagagactaaagacctattctttataaagaatgcatgccaccgtgttttcatctgtcactgtcagctggcatttaataaagccatgacttaaaattctatatttaaaacctgacagaaattataatggcattttagcatatatttgaaacaatattaagtacactgagacatttggcaactttagaaagtatgcaattatatcattattaaaaataatattcagagtattttccttttattatattaatatatacacatatagcactatataatgtaaaacaattacatacattatttaaaatcatgtatttggcttataattggccaaggtttattacaagttcatttgaatggtggctatagtcacaaagaatgattctagcttcttttctgtgtataaaatattctagaaaccaaaataaattaaatagatattaatccagagttaagtgaagactatccagcaaaaaaggaatactaacatgtatcttgttttaaaatttcaattggataataaattatgtttcaaaaatctttacataaaagcttaatagcaccactcataaatcataaagtatagcaacagataacatatttatttaatttttacctaattactttttactcatagtaaaaatctattgtttatagaaagtaaagccaaaaatttatccaaacattgttacataagaggttttaagaaactgtaaataattcttaatactctcattttgattctctgacttttcaagactatgttgtatttctttcaaacatacttcctgatgttgtgctttctaaataaaaaaaagaaataaaaatagttaataatgacattaatatcaaaggatagtcataatataaaaatttatatacacaataattgaatacatggtttttaattttttaaaagaaaaaactttagaactcacttttctttaaaatctagaatagagcacacacatggttgatctctgtgacagtttgttgtaatacacacccactttgccccaaattattatatattttatatgattaacttaaatagattttacttaaaactgtcacaatttctattacatttaacatggcatattttaatactagtttttgtcattttctttgcctaaaaggctgactacttttgctatcttaaaatagcaaaactatttttgctgtctataaactagacagaattctagttttgataatatgaacattttatttttggaatcttttaaaaacaaaatgaactcaatatcatatgtggtctttgaggaaaacatttaaaatgtaatgtatttttaaaatattcagttgtgtgtaaattcccaaatagatctgttcactgaaaatattttagatagacaggctacaaatatcacctaccttccaactaaaatgtaggaaccatgagaagaaaaatcttttatatccttcctaccaggtgttcaatgacaccagataccttctgaaactgagcaatgcccccaaggaaagtatagtgggtggtataaaacaactcgccaggctgaagtctacaaagtcatagaatgactataatggatctttgagaaacattgattttactcaacaccttggagggaaaaatattaatacaaatacacataaggtagaatgcaaaatgaacatagattttaaaatgtaagtatataatatattccaaagacatttcaggcttcttgatctagagtaggccgctgagggtcacccttgggtctgcgtatctattccctctctctccccctgaagcactgggcagaaaatctgtagagg

SEQ ID NO: 47576 - DNA, 1045 bp, Bovine  19866880687130
  misc_feature (1)..(1): n is a, c, g, or t
ntaagtcatatattctcttagcaccattaatatgcttagttatgtgcttgtgactattagagattaattaaaaattatataccaagatttttaacctgtgtagaactttccatatcttttgtttattagcatactgaggataccctaatttggaaccaacagcttctttaaaaatgttgaggtgaactcttaatgcatctagctgcatacagaaccaaagaagcagaaaaatatttaatgccattatatgcttggtgtctgattttcctgagtgccacagaatgggatatcatagtcattgtactcaagtaggattttccatacccctactcccacacaacttcatctgagcaaacatttcctacagtgggtggagagaaaataaaaagtcctgtttaaattcccctagcgctgtgattacagatcctttgatttaaaaatgaagctgtctcctcttttctgcacactattttctatgtccatttttatcctaatctctcccaggcctagttgacctaagatcacctgtaataatgctctgattatatttgtaggcaattagaaacgctcacttccaaatagatggatctgaaatagtgctgctgactgatggggaggatagcactgcaaagtcttgtattgagaaagtgaaacaaagtggagccatcattcattttattgctcttggaccagatgctgctcaagcagtcaaagagatgagcattgcaacaggtaaaatatgacatacatcctttgatagcaatatataaatgtagaggctgacaattcaacaagttctcttaagctcctactctgcaggtgctgtgccaggagctcgggatcagagttaaaccagaaatgatctcaaggtgccaacagtcccgagagacaaaaaacactgctaatcagaaaagcatagtcagataacactcctccataacaagagacatacataggtgccaaacaccatgtgagcagatggagtcattgattctctcagcttgaatagagtcagggaaacaaggcatagagatgaggagctaga

SEQ ID NO: 47577 - DNA, 716 bp, Bovine  19866880834706
  misc_feature (1)..(1): n is a, c, g, or t
ntaccctgacaagtggtactatggtacaactactaaattatagcaacaataagggttatgcagccagataatccagggtaatcttcccatctcaaaatccttaattatatttgggaagtctgtcttggccatgtaaggcaatattcacaggttctagggataagggcatgctgactttgaggggaagggatgttattcagcctaacataccccttgtctgaaaatttgctaaaactgaaatctatttactactatctctaaacagaccatcaaaggatggagattccaaagacctacttttgttatgactagcaactataaacctaggtttctaaagaagtttattttcaaaaagagctgtttgggggaacatctgagaacatacttcctgtttttagactaatagatatagtcttcaaaaatcctgaggttcagatttgaattaaattttatcatgttcgttttgtgtgttgttgaatttctaagttattgtgtgcttctgcgttcttttgaattaatttatttttggtggccctaggtctccattgctgcgagccagctttctctggttgcagtgagtgaggactactctctagtttcagcgcttctcatggctgtggcttctcttgtttgggagcacaggctccagggtgcacaggcttcagaagttgcgtgcttggcttcagcagttgtggtgcacaggcttagttgccaca

SEQ ID NO: 47578 - DNA, 4569 bp, Bovine  19866880967642
  misc_feature (1)..(1): n is a, c, g, or t
nttttattgtttctttatccggcttaaattttgacatcagataaataaaatggttccagggaataaatataaaagcctattgagcatattgagcataagacagcaggatctgtttttcaggccagcccaagtgtatttttggagtatatacaaagtgaaaggtgtggccagagataagcatcagagtctgaaaagttgtttggatccattccagtaggcagaacaagagaatttctctagtattgtctgaggtggacttgaactaaaatcctttaaaagaacttttgcttcataaatatcatgcaagattgctatgtcaagatactaatgagttgtcaaacatgaggctcttaaaaaaaatttaccttggaaacaacgaagagaaggaatatgattttactggtagatcaaacattgggtctgccaacataaactttgaggtctattgtaattctgagaatttagattaggaaaagaacagaacaggaaagataaaacaataaaggagtttgtttttaaaagttaacacaagttagtcagaagaagcccagctgctgctctttgcccagcttgatgctgtgctatgaggtatgatgatgaaattcttaactctatgcagaatgagtgctttgaggcagagtttggttttatttgctttgtttttccagtgatggaaaaatctctatcctgattccactaggcttactggcctggtcttcttgtgatcaaataacacatgtaaaacgcactggctattttctctcatcaactgagctagttaactaaagaatagtctatgacatctcatgactcacaagttcaagcatctccctttttgggttttcatttactacttaattgtctaatccaattatttcagtgcatagtaaaactggtgaatctgagaggaatgtgggcatgcctattcccaagtgactttactgaatgtgctcagtgtcacaggacaaggggaagccaagacctgaatggtgggagactttctccctcagtgctgctcacacacagccactctcaggagcctcaagaggactttcttttcccaagttcactttttgcttttgctgtgcagatggaaacctgtagctacttggtatgtcaatgactatgacaatttgagaatctcataaggttaggggataaaaaatataaatttagagaattaaaaaaataacttcatattgatattgcagcatcagaacagctattaagaatgtgaaaaatgacatggaattccttgttacctgctccatcatcaaaaagtttcaacatcactggatctgcagtctctggttcaattgtagcaattacagtggcattgagaatgggataaaacccctttctcacaattgcataaatcatcaaaggatggggaaaatgggtgctgtctctttccacaaaggcttccacagtggcagggggcatggctgagcgggaggcgcgagaggtcactgtcactttcaaggcttgaggagagtggtgggtattgttcagtgtgtaagtccatagcccaggctgcaaaacaaagactttgtttgtcaagaagaaaatcaacccttattttaaagtgcaagcctaacctccaagggtttattgttcttgttttgttgatactgcattttctaaaatgatacaaaagaatgtcaggaagagtaatattggttacgagataaccaaattcagtatttacatgactttcactgtacaacccactttctctttagggaattacaccctgaatttgtttgtggggaaggacacaacttgattcacatttttagagaataataataagtgtcagcttcaaagtacttggcaaacattaatctgagctccttcacccgaaaggaggttcaatgtttttattccttttacataatggaaaaaattatagcaaatcaagtggacaattatggtttatgtggataacctggactaaaaggcaatagtaccttccttccctctacttccttcaaaattcccagacccagaaatctcaagcaacaaaatccacatgcactataagggatcaagaaaaggagtactattttttaatagatcaggatttcataatggtctatgttgaattatagaaatattgctagatgccattctctttatctgcctgggctgcctgagggaaacctgcaaaagaatatctagaagaaaaaacttaaactacaatgtagcagaaatttgttcttttgataaaattgtccataagtattcccttttttccccattcctgcctttgctccttcttaaaccctggaagtagcaggaggaacacagtggagcaggaggaagaggagagaacaatgggctaaggtttgactataatattaagatgcctgaatgccctacccagccttcttcattgggaaacaatgctttaccattttacagtgaagtcacaattcaaacaacaatattatctatctctttttttctgtttttaatttttttttggcttttgtactcataacattagtaacaggcacatggtggaaactccacatggaaaacttctctgtgggcataataagtgttttaatacagggcacctaatccagacaaaggggtcaggcaaaagcagcaagaagtaggtaaagtgttctggtccttgtgtacaggtgtgaaaagaacatgatgagtgtggagaaaagtaggggcggagcataaggtatttgggagaaaggttaggagataagcttggggtcagggagtgggaggtacaaatagtatataagagaggctcagtgatatattgtgcaacctggggaatatagccaatctcttgtaataactgtaaatggaaagtagcctttaaaattatattaaaaattttaaattaaaaaataattttaaaaaagagataagcttaggcagaagccagaaagtaaaaggcttgtgtattttattctgagaccatcaaaaagttttgagtaggacacagatttgataagatttgtgcttcagaatgatcactctaataaaggtgcttgaaaggaaggatgctggtgcagaggctggaagacctagcagaggctatcaacagtgacatgaaggggaggtgaaggccaacagacctgaagagggactgcatgcaggcaatgcaagagtggatctaacgaacttaccaccctgcttacaacctttagtggttccctttaactgttcctctcattgactcctgtatatccatctaaccccatcacaccctcctcttcttcccctaaatctccactttctatgctattctgtatttcatccacatcaaactagtacttatagttctatgaaaagccatattctttttctataagcctttctatgtgctgtttcctctgccgagaatgtcatttacacctctcgctcctcaagtcctccatatttccatctggatgtcttcactttcaggaagcattctccttcccctactgcctgcacatgccttcttgggttctgagtaccctgttcttattcctattatggcattttattgtaaagcacctagaacaagacctggcacataggaggtgttccaaaacatatgtactgcatgtgtttatattataaattctaagtagagggttttttttttttctaagtgtacagataagtattctatatagactttgtaaagaaggaagtaagcaaaaacttatttgcactgcataagtactaattttcactgttgaagtgagagaaggctttgatatccattttaaagttttgaacataccttagtcgttccttttaaattttgaacattcacaaaattccctcataaatttaaagtagaattttggtatatcagaattgatttcctttacacaatgcatttagctctgtgattcagtcgaaagtcatgtgcttgtaacgttgtcattatgaacaagcttacaacacttaccttagctgttcctggaatccagaggtgagcagtccgaaaaggtagattgatgataaaatcatccatgttgtattttcttccattaggatcaaataatataatctcagggggaccactggtctgccacataactagaaaggtagtgtcattgcccacacggtcatccacagtaacagtgtttttcagctgatgctgaggtttaacattttcacctgtactttcaagctgttcaaaagaatatataagtgacagtttccagcatatgcataatcattccatattttctttgtttttatgacaaaactgagttggcagaaataaaaaccatttgattctaacatgtcctaagtatataaattatttttcatataaaaatatttgcttcagcaaagtattataaaatactttgtatataaaatatacagtagatataaaatatttttgtagctagtacacgtgtcacttcattaatttttatcaagagattttaggtgttctcatatttgcctcttatccatatcaacattagcttcagagtagcagttaaaacaagcttctttttacttttgtttgggactacgttctaattaatttgtatataatttgtccagataccattatgtattttgataaga

SEQ ID NO: 47579 - DNA, 994 bp, Bovine  19866881060113
  misc_feature (1)..(1): n is a, c, g, or t
nacccattcttggagccacgtgactgctttcttgaatcgaaatttggagaaacagaagttttggaacttttggataatggtgcaggtaaatcacaggtttctctgaacaagtctaaatgttcataactcaggatatgttatgagtccctgaggaagtgtggggcagagggacaggcatcagaaaattgatgcagattatggatgaacaactggaccagggtgaaattctatccaggtaacaactccaaagtgatttgcaagtgtcttacacgtggtagagcactcaatgaactttatttactgtcattactgttctttctttcatttagacaaccaatgtcttccaataaataggaaagtatcattgctgagattgaggacagcatcaagaattctgaataagtgtttcttagaggtatataaccaagaaagtctggccagagacagtgaaacacaagtagtagtatggaatgaagcagtacaatttgggtccctggcagggaggggatgccagccgtgagaaattcccaacagctggataaaaagttcacatataatcttagggactgagaccaaaggaagctggatctgccatcagagagaaggggacattactgggtcatcatcagataccagatctgactgggaggtatcaaaatagagtgttgactgctctctatctccttggtctgtatgggtgagtggtactgtactttaaaaccttttcccaactctgaattgttctgggaactaacacttctttagagaggtcatttagtaaagaaattactatctcagtaaacgtctaagttgtcagaattttcaattagcttcttttcaatgtagttaaatcagccagcttatcacctatcatcaactagagttggccctgtaagaagtttagaaggcaaaagtctttggtttatcaatgcctttatctaacatgacaatattttcttaaattatcccggactctctttctcccaaccccttc

SEQ ID NO: 47580 - DNA, 1596 bp, Bovine  19866881205469
  misc_feature (1)..(1): n is a, c, g, or t
nactacttttaatgaaaaaattgaagaaaatatacaaaaagtgaaacattcaaaagcaaatatatagttctttattaacttattaataataaataacaaaatataaaacatacatatttttactcagattttctttgttatgcatttaagacaacttaaggatcaataatttgtgaataaaaatgcattttaatgggtaataatttttaattgtatttttagagtaagaaaagtttataaattataaatagcaaacatagcaaatcagacaatagctttaccatacgtaattcataggaaccatatataaactactcaaagaggaaagaactgaaaacatttcttataaaatagtaaaaagactcttttttttcttactttttcattgtttcgatctgaacttccaactcagttttctctattactattttctcataatgacttttccaggcattggaagctgaaactgtttcagacaacttggcttcctaaaaaatacataaagtactcatcttgtaatttaataacactagttttgttctaaaaacaaatacattattaacaaggaaacactcatcctataagttatggaacttttgttacagaaaatttcagtgtacaaatctgaatgcaggaaaactttaaagtaaattttaataatgactttataacactattactttatatgcatataataacagttctaacaacattttaaggatgttaacacacctattttaaaaaaatgtttcataattactgaagataattccctttatatttactgaattcttgtctttctctgacttctttcacttagaacatccttcaagtccagccatgttgttgcaaatggcaaaagttcatttttatggctgaggaatattcctgtgtgtgtatacactacatcttctctatacagtcatctgttaatggatacttagttgttttcactggagaaggcaatggcaccccactccagtattcctgcctggaaaatcccattgatggaggagcctggtaggctgcagtccatggggtcactaagagtcggacacgactgagagatttcactttaacttttcactttcacgcactggagaaggaaatggcaacccactccagtgttcttgcctggagaatcccagggacgtgggagcctggtgggctgccgtctatggggtcgcacagagtcggacacgactgaagcgacttagcagcagcagcagcagttgttttcatatcttggttatcataaataatgttgttatgaactttaggctacatatctttttaaattagctttttgggttttggggcctttttggataaatatacaggaatgaaacttctgggtcatatgatagttctatgtcaagctattctgtatagatcactctactgactctcaacaaataactgtcaaatgaatctactctttacaaattcacctaaagagctgtagccattgtacccctctctaaagaaagacaaattcactagaatgacaagggtgccaataattactaatcagaagacttagaagtagtgatatgagcagtttacatttattgggtgcttccttctttcctacca

SEQ ID NO: 47581 - DNA, 1410 bp, Bovine  19866881238814
  misc_feature (1)..(1): n is a, c, g, or t
ntggtctacattcttgggaatgaaaaaatagttatctggagtctggctcctggaaaaaacaaaagtattattatttcctatgtcactgtttagtagataattttcaactaagtcaatcacaactcgtgctagttttcatagtatattacaccaaccatttcatgaatagttaggagaaaacattagaagactaactaaacatagccaatttggtattttcattttatgactgagtagacccaagcatccacctcataagcagatataactaaaacatctaaatcatcaacttataacttcctaaaatataatattcattatttaatactatcaaaatctatcatagtgtttatcttaaaaatgaaaaattcataatagaaagaaaacaagtaaatgatatttgtaactttcattaagcatctgtcatgtaaaaataatatgcagagaaagggcctgatgagactttgggagaaatgtaatagaagctaccaaggatacaggataataattccttggccaaatgctgacatttttatttttatgatttatattatttgttacttttagtactattagtaaagtaatagccttgattcccttcactttgtatgttaactgtttaactaaaactccatgctaagaatgttaaatgctcacttatttttaatgaaaatacattaagccatactaatacttacgctgttcattttgcaaacaagttgattttgttcttcatttttctttctaagctcattttccagatctactattttgacttgtaaagccctttctctagatgacattttctctatttcttcagaaacctgtaattttaattgaaagaataaaagagctaaatgtgctttctttaagatataatttaaagccttgacataattatactgtatctcttctttccaaatagatattatttggatattagacaacttaactacaaagtgtttaagggtgttctatcttgagaaacacatatagcataagcatgcattctcctgtttggtatggaagtatctgaaaaagtagcttgaagtggaagacgtgtatatattaccacagatgtgacgtaggcaggttttccccaatactatatttccacaatctgctgagattaactgccatgtttttacagtatttatcatggcatccaaagtggtggtgggacatagaaagttcacaatcgatgctgattatagacttggatggagagaattgggggcagggtagatgatattcacaccacacacacacacacacacacacacacactagattggtttttcattcattcacttccaaaatggtctgaatttgagttttcgtatttctctgatggtttatttcagcagaaagtctagcttagccaatgttatccaagggattcagatacat

SEQ ID NO: 47582 - DNA, 811 bp, Bovine  19866881714695
  misc_feature (1)..(1): n is a, c, g, or t
ntctggttctgaaatctactactaaccgatggggaagataatgaaatacactcatgcattgaggaggtaaaacaaagtggtgtgatcattcacaccattgccctgggaccttctgctgccaaagaactggagacactgtcagatatgacaggtaaacctttggaatagagtttaaatagaaaataccttttcagtttctctcattccagggactctttccccttaaactataaactgctcaaaattttcctgtcctaaaaaattcatctctacacatgtatacctgtggctgattcattttgatatttggcaaaactaatacaattatgtaaagtttaaaaataaaataaaattaaaaaataaaaattcatctctgtcctttccttctcttcatccttcaaattaatatctttcctcaccccatttcacttctctctgtttctacctatactagcttcttctaacattagtccatatgtgttgtcttcactcatttctcatcactttttaccaccaagatggacctttgctctcatggttactggacttactcaactgcagttccaaaattcttactcagtatcttacctgctcaatattacagtagagattcagctagcactattttattgaggagtaaatgtaaaatctagagaatacaaattatttacccaaggcaatatagtaagactgggcttccctggtagctcagctggtaaagaatccacaatccacctgcaatgcaggagacttgggtttgattcctgtttcaggaaaatccctggagaagggataggctacccactccact

SEQ ID NO: 47583 - DNA, 1476 bp, Bovine  19866882127987
  misc_feature (1)..(1): n is a, c, g, or t
nttttttttattttataatattaaccttttaggtcctgaattctgtaatgaaaaaagccataaccaagaagctccgactctacaaaacaaaatgtgcaattatagaagcacatgggaggtgatcagcaattctgaggattttaaaaacacaacggctatgttggcaccaccccctccacctgtcttctccttgctaaagttcagtgaaagaattgtgtgcttagttctcgataagtctggaagcatggcggtgagttcacgggcccatttttcctggaagtagggacagggcagtgattgaatgtctaagaagattctgactgctacctgcacctgggttcttctaaaatgcatggtggcctaagtactgtcacctcctgtgatcttgacctcaagaggggcaatgaacattataatgaaagaaggatggtaataagagttagaaggacctaatccaagaattttctttcccagaaaatggagagtttattgaggagaacttttaagtctttagtaaagcttttgtttcaggatcagaactggagattgaaatgtgtaattatttcctaatcttactccctttatctattgaaaatacttgacaggcatgaagaaagagtgaattcagagcttccaaactacattccaaatcaaggaacaagatcaaccaggaggattcttaacatgtgtctcttatttatactctctataggaatgacctccttatgctcaaatacatagacaaaaagcatcactatcaagaagagatggccagattcagtcattcattccttctaccacattaagagaatggtactaggcttgtactaggctttaggaatagagatccatatccttgaaaagttcatagatgaataaagaaagatttcactctcttccccatcatgaattaatacttaattatatttcaatatttggcgtaggtatccactttgtccaggacatgggctggttttccaggatggcctaagggcatttctgtagttctttcacagtgacctgggtgtgtgtttagtcactcagtcatgtccaactctttgtgaccccatgaactgtaggctcctctgtccatgggcttttccaggcaagaatactggagtgccattttctcctccaggggatcttcttgatccagggattgaacccatgtctcctgtgtctcatgcatttcaggcaaattctttacctgttgagtcatcagggttccccttattactatatattatattgaaattacacatttttctcccactattctatgaatacctctcggacttgaaaccatcttatctaggaaccaggtctcctaggacttggaagtagtctgtcctcatctttgtgtccttttgtctagaatatggtttatcacatgtaggcattcaataaataattgttgaaatgaatggactataaatgagcagatggaatggggtcaaaaggatggcacatctgagg

SEQ ID NO: 47584 - DNA, 929 bp, Bovine  19866881359871
  misc_feature (1)..(1): n is a, c, g, or t
ncacctcacactgtaattctcccttctcaacacagactacacacacacacacacacacacacacacacgagtataaaagggctgcagtgtagtttgacgatgctctttgaagtcctgggccttaaatggcagcaacatcatatacacttctctttcaagtatggatgaacctatgagaaacaaagcatccagtacaatttatatatagaaatatgtttcctactatttacacaggtaggaaaacctcaggcaaggtagattgcattcatgtttcttacccatgtgtataccaactcttccacatggtaaaggctttttatgttgttcattctaactcaaaaagtcgttttgtaaggattgactccaaggaaaaacaaatacccaagaacatttttccatttgttttcctacaaaggtttctgagccctctgccacactctgggattcccaagtccagctgaactaaacacatctcccactacaagtcctggatggaacaatctgatctcatttgtaggacaaagtccggctagctaccagggtccctctttcctaggccagaggctacaagggaggagagtaaagtaaagtactttgcacctgggagcaaagtaaaacatagaggaaagtatacttgacaagtcttggggttcaggccatacctagaacctctactgaagggactatatctgaacctgtgggctgctacaccaatatagctgactggaccactgatgaacacctaatgctagaaagagagacttttcctgagctggaccaagctaatcataagccatcaggaggttaaaattagacatatggatgaaaggtccaagttagtctggacatccagagtgaccaatgcttcagatgactaagaagaggtagccaattaaggggagtataggtatgaagggggaaagagcaga

SEQ ID NO: 47585 - DNA, 779 bp, Bovine  19866880181412
  misc_feature (1)..(1): n is a, c, g, or t
nctttcacttttcactttcatgcattggaaaaggaaatggcaacccactccagtgttcttgcctggagaatcccaggcatgggggagcctggtgggctgccgtctctggggtggcacagagtcggacacgactgaagcgacgcagcagcagcagcagcagcagcagataaatgtatagataaatatctatatgaccacatgagtttatacagaaaacaaaatcaaagggactgagaaagtttaggtagtgagagttttaggcccagtaaatgagtgacagaagcagttttattgaataaaaaacctattaggttccatatggcaggtcttgttttaattattctaagtgtgagatgaatatgaggcttttattaaagatttttaacaagaaaattgagataatttcaacataaaccccaagcctgtttgtggcaaatgtttcctgggttaacttaatttgtagaaagcttgtttaatttctcatattctgacccacatctgtcaatcaaagtaaatactctttaacaccaggcactgaaaagtgagacaaagtcttatttattgggtgtagttgtgaagatagatcagtggcactattgattcattaatttaataaccaattattgattttctgccatgtgcaggatgctgtgataggaaactattattcagaagtgaagcagcacatacattttagagagggaagcatgcaatcaataagtacacaaggaaataagtttataaataacatgcacagtactatgaaggaaataaacaca

SEQ ID NO: 47586 - DNA, 1320 bp, Bovine  19866881048745
  misc_feature (1)..(1): n is a, c, g, or t
nattttcttgagatttcatctttcagtagagaaagacccagtcaaaaaaagtagtttaaaggagtatgtgtgtgtgtgtgtgtgtgtgtgtgtaaatggagggagagggcgaaggatagtagtagtacaaatctatttgtacgtttgaggtcatgcttagtcaagtacatgattacacctttgtggcaccccagataaaatccatctggtatctatcaagctatcttgttcttagagataaaataaccctgctgtctctataaagtaagcatcctgagaatcaatttgatgtctttttctctattatgtaatacaatgtccgtcatataataggtgctcaataaatatttgttgaatgagcagctacttgaaggcagtagctcttgctgcttaataatttaggttctggatttatagaaacgtgcgttcaaactccagtttcctcatttgctatctctgtaattttaggcaacttttagatgtttatctgtgcctcagaatcctatgtttaatataaatattgtatagtagtatagtagctctacctcactggtgttttctggaattatgtgacatagcgtgttaggatataagcacatgtcctgacttgttaggtaggtgctctaattatgtaaatagacgtcgattatcctattttgtaaacggatgctgcatttcagacttctcccataaagagcttatactctgtccagatactattgatttgagttaaatgtttaacctcatttttaaccattattaccttgaacgaggtatggtgaggccaaaacatcaatggagagaagccagaaggggctttatcatttgttgggctcacagttccttgggcaggacacggcacacagaactagggtcagtcaccaggcagaggcagagaggagacctgtgggcaagtgactttattgtggtttcagagggaaagaatgcatgaggcagggcaaacagacttagatttggctgatttgagcaatgtcagccgactcgggggcatgggggctgttactgactgcctggcacctgaccctggggcagctagagcaggtgtatattggccccagagtgtgagagctgataatggaggttaactgactgctcgagaagcagaagtggccagcctctagccagtgcttcaaaactgggtcaagaaagcatttaaaaaacctatatcacattgcatagagtcaagtgttagcaggaattgaggctgaggtttccactaggtaggagaaatcatcgtgtgctcattgtaaatactgagtactgcagatgccctcccccagttcaaagctctagcagcct

SEQ ID NO: 47587 - DNA, 670 bp, Bovine  19866881187140
  misc_feature (1)..(1): n is a, c, g, or t
ntacacatagtttgtgtacaggatcagcacatatacacacctaaggctcttattgtctatctagaatttgcttaatgttattggcccttgtgagctctctgaacacatttcaatgcagctgagtaatttaatccatataaggaattgagaatggataacaactgacattttttaagaaacaggagaaaatgaattctgagagatgataaggcagctgtgcctaagatgtccaagtagctttcccatgtaacattggcagtaatgaatggtacataataccagttctagatgaaggactgctcagcacattcaaaagaacagaaaagtcagagaagcctggaaatgtttagcatcactacatgtcataaaagcaagatgatagaagaaagagcgtacagagtatatcaccattgcccattttatttatttgcttttatctttacttttaaacgacaatcttagtcctgaaaggcatctagtaaaatcatgttttctattattttgtcttaagataagatttcacctaaatataatctctttattttattcttgtatataaagagcaaaaaacattcacatgctttcattccttctgtctgtgtttaatatttgcatcttgtctagattatttttcagtggttttcatagtgggacaaggattcctgcgtat

SEQ ID NO: 47588 - DNA, 2029 bp, Bovine  19866881295675
  misc_feature (1)..(1): n is a, c, g, or t
nacttcagtcgtgtctgactctctgcaacccccatggactgtatccctgccaggctcctctgtccatggcattctccaggcaagaatactgggagtgggttgtcatgcccttctccagggtgtcttccttgacctacagatcaaacctatgtctcttaggtctcctgcatttgtagtcaggttctttatcaatagtgtcccctgggcatataggaaaaatgggcattaggaaaaataacactatcatatttgtatacattagaacacagataagacaagttgagcatttcctaaaggttttatagctaattaatgataaaggctaaatattaatcagaaagccagagtttggtgaagtatttggtttttatttcatactttttctcaaataactgtttcaaaatgcttgctaacactaactatgcttctgtgcttctcaacttgcagtttttattaatgatttgtgcatacaaataagctgatattggcagtatcacagaaatccacagctttgcaactttctactgtatattacattttaccttaattttataattttatttttacttatccttataatacatgctctactgtatatttctggaaaaccaattctaggaaaacaaaataaaacctaatgcttgatatatttcttttaagctgaaattagttatgcaaaggagcatacttggatgggtttaatgtgagacatcagtgccattagatggcactctgggtaaagttgacaatgttatttcttatactagagcatcacaatttaagggcttaagtaaggtaaatggaatacaaaattagtgaacatttatgtcaaagaataataactattacaatgacaaaggacacttttgctctttaaataatttaaggtttccttttaaattgttacacactattactcatcaaataaaaattaagacattacacaatgagcttttcctctttgaaaatggattcatggttaaattttaaattttaaaattattgattttgctttatggagctaaaatcaatgttatcaatcactttatagcattcctaatataatgtaatggtaaggtctaaaatgaatcggtttttttaagcttatacatgttttaaaacaatttccatgtataaatatggattttacaagcactgaaaatgccgttcatattttaagttttctttattaaaataagtagtttagaaatatactcaatacataaatattctttctttctaatcagattacaaatgttttgttataagttattccacttgttcaatccttttcatctagtcactaataggttaaaaagcttaggagggaaagttaagaagtagaagttatggtaacagcccttcagaaatgtgccatcttattaatgaaaggtgtctacacaaaacaggcaataatagaagtaaatgcacgtaatgttcctctaaggaactgttagagacccgataacaccacgatggtctggcatttatttattattttattgttaccaaaaggtagataaatatccttgattactgactgtattgcagatgctgtcactactactaatataggtaatacctactatttattaatagtaggtacaattaagtacacaccaattaaaaaacagaggcaactacattgattcttttccaaagctacatacttcctgtcctttgtttctcgctctgactgcaagggttttaaattaatactaaacaagaattgattttgcaaaaacaatgggagcttaaaagataccagagcaagttggcagagaagtatgggagaaaagaaatagcaattggactaaaatgcgtctaaactttctttggtgtcttatccatgacactccatttcattttaacagacaataacaagatggaaacattttttacagtttaacttttggggcaacctgactgagactgttgttcattgtgttagaaaaaacaacacgaagcagttttcttcatggaaagctgatctaaatcagatttcatttttcttttatatagtttttaa

SEQ ID NO: 47589 - DNA, 1453 bp, Bovine  19866881414721
  misc_feature (1)..(1): n is a, c, g, or t
naattggagctctgtgattaattccccttcattttgaagaggagaaatcagcctgaatcaccacatgaaatacaaacactaaaaggcaatgcattcagaagctgcaagtgctcagcaaaagatggagttaattaacttgaccagatactcaacgaagatagctaatgtgactaattcaggctctcaaaggaatatcaatttcttcagctagaaaactcactagctttcccatgagtgttgtagttatgccagaacgtaagagtatgtctacctccttattcttctcctttgctgttactcactctcccatttgcttgccaacatttaaaactaatgtttataactgccttaattccccataaactaaaaatgcaataagatactgcaaaatatagttctttctttagtgatgtcttgggtggagcagggttagatattctcagtcagccgtttatagccaaaattatgcaagccctttttggcactggattgaaggcatgatgaatggggggcgatggacaagcaaaacagaaaagcacttgttcccatatgaaggctctgctgttttagtcataaatagcctaactaaaattatagcacatattagggaaatgaagagtgaataagtaaaaaagtttggtttccatatttcattttttcaccattattatcatttatttgtttgtgaagtgatgacaggtacttggctttatttgagctattagagaagacagagttcctgccctcacaacttcctattcaaagtgcacaaattcaggaagcaagatgtggtttgatttatatagagatgaggtatttttccccccaaagtgtgacactttttctgctgatttttctctacttaaaggaaggaataatgaatggaaaaagaaaaaacagaaagaaagaaaaacgaagaaaagaaaaaaaaagacttctgaggatgagtggagaatcattagcagacattcatttaatttgactattataaagcaataaaaaacgttgcaatatcaaacatgcctaaatttgatgaagtgaaattcatattttaaggtaagatgagaaaaatttaaccataaaaatgttctctgtttctctgggcctcctcttttcccctttgtgtgtattatgcacgtgtatggtacatcaaccagacctcctcaaaggtagaaatatctgctaaaccataaagatcaacttttcctcttctggcaccagctatgtaacccttcaaaagttaacattacctatctatgaccttattaatgttaccagtgtattatttgtattctatttgttctacaaaattattgtttcttgcttttccaaacatgtgactcggcctccgacaaaaatgatgattagatgacttggaactatcgaccgaatgtatacttttatacctagaggaggaaatgcaacccactctggcattcttgccaggagaaac

SEQ ID NO: 47590 - DNA, 1263 bp, Bovine  19866881423940
  misc_feature (1)..(1): n is a, c, g, or t
ntttaaatactacttatccatgaaaagaagtgttatatttgattgttgttgtttagtcactaagtcatgtctgtctcttctgagactccacaaaccttagtctgccagcctcctctgtccctgggattttctaggcaagaatactggagtgggttgccatttccttctgaagagaatcttcccaacccagggatcaaacccatgtctcctgcattgtcaggcagattctttactgctgagccactggtgaagcccattacatttgataggtgagtgcaaattatccagacttccctaaaaaatgaataataaaagaaaggcgatgcttctcatccctaaagtaggccttgtgtttacacactttctgtatcaaaatgaagtatggatcccagcaaatccactatactttattctcagtgccactgggcatttctcacagctgcctaagctgccttcagtaaattgttttttcctacaacacacatttctctctttcatactacaaaatacattatttatgtgtatgcctaattctgttattggaaaaagtaagttaatttttagagttattgattttattttgtcaaacatatgttgctcttttcttcttgtgactaaaacaaaaagaactatgaaagaaacaaacaaaatcgatatttctctattaactacgttacttaaaaatcacatttggttcagagaaatgcaggatatgagatagaatcacatggaaaccaaatgttttaggcttcttctcccaaccaactttccctaaccaccctcacctgcttctattaactaccatgcctgtgtgtttcaagtatacattttattgcatgtacttaatttattataattattagtgtacatgctattaatatttctgccatattgctagcttattaagggcattaaattgcacagctaaagttaaaaatatgctgtcctgagcataaaagaaaagtaatattgctctttgtattggggtgaatttttacattaaggagtaaaggggtaaattgttctagattcttctttagaattgaatcacactgattttctgcatgaactgggttcctctctttaacctccgtgtggaaagctttggaaggaaaacagaggaaaaaaatatgtagaaaacacaacatactcagggtctgatctgtgccaaggaatacatcacaaaaggctaacagtaatattaatgatataacctccttgttattggggtgactacctttgacatgtgttataagttatatt

SEQ ID NO: 47591 - DNA, 1119 bp, Bovine  19866880364978
  misc_feature (1)..(1): n is a, c, g, or t
nctagatattagaatcgggtgaactgaaaaaaaaaattctgaagcctgtcccaagctaattgcctcagactctctggcactggagcccaggcatctggattttttaaggagttcctttggccaaccagagtgagaaccactatcataaagcaagaatatacccatgaaatgatgggctggctggattaacaggcgagatgggtcacagagggccttgggtttcatctgatgagcctctcaaggactgatgtggaggccttgggtttctcaaggccacaaccccaagatgtggcatcttgggtttctcagcatcgctgtagtgaatgattggagggcagggacaacactgggcacccaggtggctccagcagatcaggcagaaaagggcaagcgtctgaactgaggcagcttcctgggggatggacagaagtgggtgggcgcaagaagttaaggactaaccggagagtgactggctgtgtgagaaggggaaggaggagaccaggatggtcttgctttccaattcaggagaaggtggcgatttgctgaggagggtgagggtcaggaggaggagcaggttttcaagggtgtaggcaatggatatgtgggtgggatgggttgaagcatcaagctgagagcactcaggatatttagttcttaggtgtctcctgctgtggggcgagtctggggggcaggaggaccgtgggcatgcatgcacatactctcccatggtacgtactccttgcacccctcttcagtttcgtctgttttcttcctctggtcagttgcacaggtgcttccggctacacatagagagtttaaagaaactgggtaaacaggcccagggctgcaaaatggtgactttgtggctggcagccctgcagccctgtggccccgaacacatgactgagccagtcaccttctgggttcgggtcaagatggatgctgccagagccggagacaaggagctacagctgaagtgagttggtggggaagggggatgacccagtctcctggccacagctgcttttggcactcaaggtcacgttcattctcgtggctgagaaaggcactgttccctccgttcactgtgattgattgagtgccaagtgtgagcaggca

SEQ ID NO: 47592 - DNA, 1218 bp, Bovine  19866880448884
  misc_feature (1)..(1): n is a, c, g, or t
ntgccctaaagcttgactgcgtttatggctcctaaggagccttcataaggcccttggctaattttcttccccctttagtcaagtgtcttcaagttaaggatcaggctggcactgcacatgtgtgctgcctcactgcctgaccttgagggaagttggagtccctgctggtcttccctgggtaggaagtctaatttatggagcgggtcttaatttcttagtccccgtgtctaagtaagtccttatttcattctcgtcagtgggaagttagtcctggggacctgagaggcatgggcagaaccttagtggagcagcagtgagctgcggaagggacgcgacaggaccgcccccacccgtacagccctcttgttggttttcggtctcactgagaaagcagagcaattgctagagctgaagcccctcctgtagtcaaggagaatgacacttaccttgtgactgcagccagctgtgtggccgctcaccccgctccttgccttccagacccatctgaaccagaacaaacatcatggagggtgtcacttactccttctgaaggaccatggcctttctatgggcctaagggaggacacattctgaaagcggctgggaatgggcttccctggtggctcagatggtaaagaatctgcttgcaatgcaggagacccgatttccatccctgggccaagaagatcccctggagaagggaatgactacccattccagtattcttgcctggaaacttccatggacagaggagcctggcaggttgtagtccgtggggttgtaaacagttggacacaactgagccactaacactttgacttctaagggaagacagtttctgaaaggggaagagtgatgccttgggactttcctaagtgaacacaggactcagtcctcccactcaccccaaggacacagctgttagagatgcaaggccatagaggaggggccagaaccacgtcttctggttcacagactttcagccacatcgtcttaaagcttgtttagagttgaaaagtctgagaaagcctcccactctattaggaaggactagaaggagtaggacctcctttgcttcatttttccctgttggttgtatgtcccaaatctggcttcctttggcctctgctctcctccttggccctgagccctagactctacactcttggggcagtaaggaggagatagcctaactaactgcattttgctgccttccca

SEQ ID NO: 47593 - DNA, 623 bp, Bovine  19866880467354
  misc_feature (1)..(1): n is a, c, g, or t
nctccctctccagccgcagcccatagagggctgccgtgggcagtgctagcttctcctcacaggcggggcacgagcacagcggaggcagccccgggtcttccaggatcaccacctcccggtagcctggggggcggtagccaaagtctccattggcgggtttccccagctcagacgggtaggggtacggcccctcggacagcgagcggcagaggcgtctcttctccacggagggctcagcataaccctgggggggcccctcataggctccgaaagccagccgccgcctctccagggtcccctctggcccggtagtagcctccattggggaccccgcagggttcccggtagccctggcggcaggagcagtggcggctgaggccaggcctgtgtcccgaatatattccgaggtgggggcctccgcctgcagcaggctggtcttcgtcatcaaggatggccgtctcgcgcccagctccccggcccccactagccactccacagcctcccagcaggcgctcgagctcctgccgctcggcagccgtcgggggtggccggccaggggactcggcagctggctctgtggtcagtgtggaggagtggccagagtcgctgctgacagaaagcag

SEQ ID NO: 47594 - DNA, 871 bp, Bovine  19866880469156
  misc_feature (1)..(1): n is a, c, g, or t
nagaagaaactgaccccctcacaataccccttttctctgctccccaatctgccagtttggtttgacttccaaaccactgcagcccacagaccccagttactgggtgctggggaggggtggggcgggggcggggcaaggcaatccctaggggaggggccggcgcagggcgggtcttcctgggcttcgccccctgactgctgtcgttggctggggaccatagaggccagaagggcggagccacagtttccaagaccgatcgatggacaaacatccaccagagacaaagacacagacagacagacagacaaaccaagacaatgaggaaggcagagacagatggaattccagaccactccatctttccaggctatccaagagttttgtcccccacccccaccctccgccccgttagcttccctggccccatttgctgtcctggctgcctagtctcagtgctctagctctgggggaccagcccctgagcccctctaagaagggtaaggggaagagttgggaaagggctacccagcagggagagagttccgggggtgggtggcgcctgattctgtgtcaggatgcccggccaggggccagggagggagcggtgccctcgcccagttcatgaggacaggagactcattcactgtaaaccaagtacagatgtgctgggagggggagggggaatcagggccacattcacaaaccacagttgggccctccctcctcgccagcggccaccatcaccagggcaggaggggttaacttcgcagcctcctggcaggatccgtgccacacaggctgagtgccatcccaccccggcctggacgcctgggtccaacttcccaacacccgccccttccacactgctgag

SEQ ID NO: 47595 - DNA, 1365 bp, Bovine  19866880483706
  misc_feature (1)..(1): n is a, c, g, or t
ntgggaagatcccatgaagcaggggaaaggctacccactccagtattctggcgtggagaattcggacacaactgagcgactttcaatcaatgtaattttttacattacattaaaggaaagtaacaatgtgatcatgtcaattgatgtagaaaagtcagttgaagaaattcaatagcttcttcaaaaagttactaaaaaaaaagaaattaaaagaaataaaactactattattatttatggcaaataagttttctttgccaaacattgacagcaaacatcattctaaatactaaagccattcccttgaaatcaaaataaaatagtattttggagagtctatcaaatacaccaggattttgtcattattattttttttgcctgctgggaaatgtttatttgccactaaatcacccaaagtgaaataaagcgaaagtgaaattgaagtcactcagtcgtgtccgactctttgcgaccccatgggctatagcctaccaggctcctctgtccatgggatttttcaggcaatagtactggagtggattgccatttccttctccaggtgatctccccaacccagggattgaacccaggtctcctgcattgtagacagacgctttaccgtctgagccagcattctacaattataagaaaggtacgggtcatttttcctttccataactcaatgttcacagcatctcctcaatcataagtattacaaaagaaagtaaaaaaaaaaaaatcacattttacagatcttagacttgtctttagtatttagctcaaatcttaccatcttcaaaaaacagttctgtcaaactcatcagctaaaagttctatccaagcagtgagaagatggcttttgttagcccgtggcaattcttttccgatttgtcctagctagttaatgctgaacagcagaatgaggcttagattgcaggggtggggggaaggggtagcaaagagttaatttcccccagtacaagatggcatctgaagcttgatgggagagctgaactggagagacttgagggaagggtccagggccctgtattcagtcagagtcactgctggaagaggaggaggaggaggaatgctgcaaggggaaaggggaaaggatacatcagatccaaatgacttttgttacttcatgggacattctttggtgccctatacctccaccccagtgccctctgctttctaagaaggtcaggagtcttcaactcgactgtcccttaaacagcaaaagcaaggatttccttcagcagtgagcatacaggaatggatgaaaccatcctaaatcattgcgcagaatttaacatactgcatttggagaaagtttccaattttctttacctgagccaatgc

SEQ ID NO: 47596 - DNA, 1356 bp, Bovine  19866880580757
  misc_feature (1)..(1): n is a, c, g, or t
nccccccccccaaccttggttctcctgcctgaaaggctggaggcctgtggcaaggcaaccctttaagtcctttctctctccctcctgtttaacagcagaatgtcaacgccaggctgcttgtctggctgtcttgggggttcagttgagaggccaggccatctgtctaagtcttgggctcccataatgagccctcgccactgtcttggactctgttttgcactcaggaaagggaggaagattccccatctctcttgagtgggggtgtaaggaatgtcttcccagggaaaggagccccaagacactcctgagagaataaaggactctaacccctcctggccaagggtcctggcgccagggttattctcagctggaaagaactgtagcttgtctgttgtgtcctcctgaggggggaatgctttcccctgagagccagggtaaaactggagatcacccctatctccaggcccccaggctcacacaggtccagcccctaaacctctagccagcaccactttcttccggtagagtgggtaccgaaagggctgggagggagcagtactacttaggaaaaaaggaaccagctttggatttggagagatcagaactagaaccttggttttgccacgaattagtttaaggaccataatccctctgagattcccacccctaccttatggggtagtgagggctaagtaagatgatgtagggaatgccatgagcacagtgccaggctcctggctttgtctttctggttggctggacaccaggtctttgtagattctggagtctggagaggccgtctcttctctctggtcagaagggagacttgggtctccaaccttctatttccccaggacacaacttgttttcaggtcccaggggaaccaggtcccaaaggcagtggtgtgctagaggccccccgtccttcctctgcaaatccttatgtcccacctcctctgaactgagggggaaggcctccttctctgcaccctgtcgtcaccccatggctctcgtggcccaggatcacccctcagccctaccgttaagatgtgaggggaaggggaggcaaacagcaaggtatggtggctcataggggtccctgctactcaggacttcaggtgagcctggaagaagttctgtgtatttttaacaaattgttcctgagccgggtgctattgaaaaagatatggaaggacagatagaaatgtataaccattgctaagtagatggaattgtgggtatttttattaagaaatttaaaaacctattttaagttgaaaaagaagaaatgaaaattacagaatgcctattattgatttctgtcacccagccttggacagtaagacagggagggaa

SEQ ID NO: 47597 - DNA, 2561 bp, Bovine  19866880600859
  misc_feature (1)..(1): n is a, c, g, or t
naggtagggatttcggaggccaaaatgcctctcttaacactactcagtatagtagcgtccctccttgaccccttgcaccggagcttctgagtcactactggagaggggtggcaggaatctacaataaaaaggactccctgggtggggatgtatgcacagagaggcttggcacctctgatgggctcagctcttgtaacaatttccaggcctctcaaatacctaagtgtttaacaagcacctgaggtgattcttatgcctggcacatcggtaaagaccagaaccaatgccttactaatttctcctctattccacattactgccttaatccaggcctcagtagctgtcacgtgacctaggacaactgccccttgaatggtctccaagttcttccaaagatccccccctccaccccattctccacccaccctttagaagggtctttctaaagcacaaattggccttttggagctccccttttcttcaaaccctctagtagcccctccttggtcctgtagcctcacctccatgctcttggcccctccccagcctcatcttccattgctgttcgtacccaggccctactgaactgagcctgttcccaaggttcatcaggtgtttgggccagggcacctaatgagaatggctcacacttatggaaagctgccgcccatattagcctctgttataggtccattagcttatttaatcctaaaatctcttaaattaggcgtctaagttactctcatttaacagaggtattagaggtcttaaataacctgtcctaagtacttcagctaggatgaggctccagctcagtgcccagtcgttttcagtctggaaggcgcttctcacataccatctgttgtcctccaagtttcacttcatcctggaagtgccccccctccccatgctctgagttaatgtccagtctgagctgtgcttcctgcatgatggctcccaccatcctggaggcacagtacagtcgggcgtcctttgagagcctgtactcctgagagtgacgacgccacacgggatcccagggcttccaacagcatccagagcgcatgaaggtgcccagttaggtgcaaccactgttctatgcatccgaggatcgtcctaaggaccacatgtactagctccctcactcctcagaactctccagggaaggaggtattattataggtctctttacactcttgagaaaaccgaggctcagaaagatgaaatcccagcctccggacccccaacatatcctgcgagataacggcggcttcaaggagtgagatgcacatagtaagacaaacgacaggccaagcaacgtgccaattcgctggagaacgtccgcgggaggacccgagggcttttgcctgtgcctcctcaagccggccgcccctttggggccgctgagaacgaaggctggggctcccggcactccgcccgggcgggtctgcggggagggctggcgggactggggcgctcagacagctagaagccagagtgagggcggttcgcagcggagaggaaggggttacggccccagcgccccctcccccttcccgacctccttcctggccgtcacgtggaaaggagctgggggcggggcgggggcccggccgtgagaggagggtgtccgggaggggacgcagcgggttgggggaagcgctgggcgctgcggcgtaaccatgacgactggacccgaggcggcgcgtgaagtcaccgggacaagattagcccggagtcacgtgagcggcgaccgcgggggtggggccgcgccagggccccgcccctgacctgggctggcccacgtgctggttgcgggctcgcaggcagggaccaccgaccagagccagccaccgcctctgcgtcccgtcttccccatgtccacccccgtccccgagtgcagcggagagagagctgtggtggtgaagagaggggacttgggtcggcattgggggtgcggtgccatagagaaagcaggaaatgggaaaacggggagactggacaggagaaagggcgaaaggcagaccagaaaaggagggcctgtctagctgagaaacagaagagcgtgaaacactgggagaggcagtcctaagaaggatgggctgaaaaactgatttgggaagcaaaggacacggaaaaaggagctgaatgaaaggggattgaaaaacaggagatctgtgccctccctgattcctttcgtatttagaagctgagttctgagtaggtacaacacctggctttgtaaaggaatttttcagctttcatctggtgtttggcaaccaggaggcttaggcatagagagggtgaccacgctccacgacacttgaagccgatcttccctccagctgcccaggcctccccaggggcccctcctgtatccagggccggcagctggggagagagagaagccatttcacctgtttgtcttttcgggcagtggaagaagctgaagaagtagtggatgggaccaaagaaaagggagagaacctagccaggctcaacccaccctttcctggttctcaggctaatgacagctcttccagattacctgaaggagtgag

SEQ ID NO: 47598 - DNA, 822 bp, Bovine  19866880631483
  misc_feature (1)..(1): n is a, c, g, or t
nccctaccccagccagagcacaatcgtagagctgggattgtttgctttggcaagagactccctgctgaaaggactaggcgttccagagactggtgaggcctctgttaggtttcccttatggagctgagaagaggacaaccccccagcctaaatcttttacctaaggaagtgagctgggaaacctggaggcttaaggcatctggcccattcttctccagctttgttcgcttctttccttcccaacattaccacagcataggatgttagttaacctcaaccttcctgcctttgaaggtgtttttggttcttgtactagtgttctgtccccaaagaagctacattttcacaaaatgcaagacaatcccaggactcctttctaaggagtccaacaggaaatagggattccgagatcattttctccaacctgttcctcttaggttgtattgcacatgactcttatagttgtagtcagtctttcccagaatgtccagaaatgtcccattttccttagatagcattgttgttgttcagtcgctcagtcatgtccaactctttgcaaccccaagaactgtagcccaccagacttctctgtccatgggttttcccaggtgatgatactggagtgggttgctatttctttctccaggggatcttccccatccagggataaaacttgtgtctccgtgtctcttgcactacaggcggattctttaccactgagccaccaaggatgcccaatgggtagcattgaaagaaatcttagctgctcagtcgtgtccaactctttgtgactctgggactgagcctgccaggcacctctgt

SEQ ID NO: 47599 - DNA, 2419 bp, Bovine  19866880638022
  misc_feature (1)..(1): n is a, c, g, or t
ntgacacatgcctggggggtgggggagaccagaaatgctctctgcccctgggaaaggggggattgtgcacagaccccactttccgattctaagggctctccaccctctctctgccctcactgtccccgttccgaaatgctgactggtcctttctgtagaatttctgatccccaagttggctctggctccccatggagtgactcaggggtggctgaggctgggtgactgaacagggtgagggcaccaaccccagtcaggacaggcgggggtgctttcccacaccacacaccaggtttggggctaagagtaaaagacttgggatccccgtaatcccaggactgaatgccagggcttgtctccctcacccacaaagccccgggcaaacacaccctccgctctcctccacacccctgtcagctgcttattcctctttgacaagatggggaacggctgccagttgaggaagggtcacaaggacaggagtggaagctgtggaggtggggcagggaaccggattttagctgctgcttccaggtagagtcacctggtccagtttcctgcctctggcccagggctgcaggaggcaaccttccccttttcacggatggaaactcttctttgcctttctccctcgggggaaagggctctcttgtacactgagggcatgctgccttgagtttttcaggctacagtccaaggattttgtgaacttctggaaattttgactttataatgagccacagaatagggctctagtctagaactttctttctgtttcatgtgggtttattgtaggatttgtcatttagctaatttggacttagttggaggacacagaattggccccccatgacagggtcctatcttattggttacttgtaaggacagggctacatgatccgatcaacattccttggcaaaagcagggatagaacatttagcgtgctgccggaggccctgtggctgctctggtggaccacaagctacgggtcaaaattcctgtataattgtttttcctgcagattctgatataaaccattggggtgtagagatcaaagtcacaagctttgaagttagatggacaggactggccacctacctccaccacttcctagctgtgtgatcttagtcaaattatataagctctctcaaccttggttgtctgtagctctaaaccgcctggcgaccccctttagctgggttgttgtgaggaagggaattcttataagaaaagcactcagcgtccagcacatgatggcaattctgtgggagagtaactgttacctggaaagccaggcagccttcccctcatctttctgtctgagggatgacctctgcctcaacttagggtttgcatgatgagaagtacctccattgaggatccatggtttgggtgtcccacaggcacaaaataagattgattatatattatagattatttcccttaaagtcccttccacctctgttggctttctgttttatacacaccttaaggacgcaggattctcttgtattggggtgtcagagctatagactataagacacaatggacacatcacaagacaccgtggggctacatctctggggaggaaaaccctcctcctagcctacaaaggtcctcgtcaacccctagaggcagccaggaggatggagccatgagtgggaggtgaggcaggtgaggggtctgagccctgggttctgccccttaccaccctcagggcagaaaagcagacaatcagacctcagctcccctagagggtggctccagctgttccctgctccttcagctgcagcctcagtcatgcccactagggtggaaatcggtaaacccttgcatactcgcgccctcagagctggttcaaggtttgctcaggtgcccaaatctggattgaccgctgtacaaattagacaaactgactttacatcaggcaggatggtatgggtgagaggccagggagggcagagcctttgggaatagactgatgtcaattggggtcctagctccatcactgtgtgaccctgggggctacttcactgcccctgggtcttccaagtcatcatttgtaagcaccgttgtgatgctgactacagagagcttctaggaagattccatgatcacatgtatataaagcagtcagcacagagcctggcacaaagctggcacttcataaatactcattgagagaaggatgtccaaccctgaccttcacaggagatggtcttggctctagaatgctcccctactacaggtggatggaccatggctcgggctttctccagtggacctttgacggaaccccggtggaggggggtgtctcctgtcccactgccatagcccttccaagcactcatttacttagaggccatctggacaggtgcatagggagcccagcaaagacagaggtagatggggacagag

SEQ ID NO: 47600 - DNA, 748 bp, Bovine  19866880649799
  misc_feature (1)..(1): n is a, c, g, or t
nacactaaattctgtttgaagacaaaggcatttcagtatggcagcaggactgaagggacacgaaaagagttgttacagtgatttggtgacagttcttcaaacaacagtgtcttaaggaaagatggagcaaggaacttgaacttttgagttgcattaagtgagaaatcagcatggctcaggtaaaaagctctagagtcctcctccttcaagatcactgggaagcgtgtttgcagtttcactcttgaatgctgccttagtcaacatattgaccaacccagtgagccaaactctgtattaaacaccagggggagatctagaggaaggaaaggagacaggccacagcccctgccttcagggagcttccagtcaaatgaaggaggcaagtctcctggcttgtgaaggcctagcaggtgtgagtttggttcccactgcagccagcaagaagatgatgctgagccagattgccagcaagcaggccgagaatggagagcaggcaggtagccctgatgtgctgaggtgctcgaatcagggccaccgaaaagacagtgataaatcccggagccgcaaagacgatgacagcttggctgaggcctctcattcaaaaaagactgttaaaaaggtggtggtagtggaacaaaatggttcttttcaagtaaagattcccaagaattttgtttgtgaacactgctttggagcctttaggagcagttatcacctcaagaggcacatccttattcataccggtgag

SEQ ID NO: 47601 - DNA, 1423 bp, Bovine  19866880649988
  misc_feature (1)..(1): n is a, c, g, or t
nccacagcaccacattcctactgagtgttccacctcacccttgaagcagccacctccagaattcttgactttctggagtaataattgagggagagaacctgtatttccatcctttccctttgtctcttggataagagtacaggctttattattattattattattcatggcataagacaggcaagagatgggaagagagggtgagagttcacaggcttcaggattggtcagccacattccagctccaaagactggcttgttactttcagagatggctgctgttttcaggtgtcataagtcatttctgggtacagctggactgagcaaggagacctgctcaggatgagggagggcccacacctcagttggaagttgaattcaagagccagaagatgtgagggatggggtgaggagatggaggctgaagaatttggaatatccaaggctattaagaaatgggaaagaagggactgacttcaggaagcagattctggggtactgaggcttggtcagtgaggctgtgaaaagggagcagaaattagatcttaattctaggaaaagcttatgactcagagggtgcagtgtgagacaagatgtgtaccgaccacaaaggccaggccaatgccctagaaacaaagatcgatacctttaaagagtcctgtaactcacaagggttggaaaccagatacaccttcatctctaggggcaagggctgtgggtgggtagggacagagttgtgggacagagaggtagaggggagagactttttaggatattaaatctttgtttcacaggagggcagatagctcgagaccagaatggaagagtcatcactaagccgggcaccatcccggggtggagtcaactttctgaatgtagcccggacctacattcccaacaccaaggtggaatgtcactacacactcccgccaggcaccgtgcccagtgccagtgactggattggcatcttcaaggtatccctagatccccttgggctcaggtttatgggtcctgggtggtttggaataaggggaatgacttggtttctggattcgcaacctcataatgatagggaagaagggagaaggatgtcagaaatggctaaggccatctgtgtaagcaaagcccaccttctccctatcttaaccttgctctctcctgacacactagcatccctccactttccctgtctctcagcatccttgccacagccacaccatcctgcccgcccccattcagtccctcagccctttgcactatccagagctgggaggtgcatcgccatacccctctcccactgtgggctctgacaggtggaggctgcctgtgtccgggattaccacacatttgtgtggtctttggtgcctgaaagtgttactgatggttctcccatccacgccagcgtccagttccaaggtacaag

SEQ ID NO: 47602 - DNA, 1419 bp, Bovine  19866880661707
  misc_feature (1)..(1): n is a, c, g, or t
ngggtaggcccaatcccaagtggcccagcttgcagagcagggagctttagctatacagggctctctttctcttggaggagagcaaggaaggcccaggctgtctttaaggccacccagtagacaccacccccaaaacccagtgtgacccaatagctcactgctgccaccccctcttcccatgcccattttcttcctgtgcaccaacccccatccaaatgcttctcctgggacttccctggcagtccagtggctaagactgctcactcccagtgcccaggttccatctctggttggggaactgcatccctacatgccgtgattaaggcccagtacagccaaataaattaacaaaaataaacattaaaaaaaaaaatgcttctcatgccccactcttactgcagccctcttaacaacctcggcctagtctgctcgtcccttacctgccccagcactctgctccccccgtcttgggacattaccccaagactcagccctatccctttggtgcccaggaggctgaagatgagaagtcggtcctgatggcagctgtgcagagtgggggtgaggaggccaacctgctacttccagaactgggcagtgccttctacgacatggccaggtgagtgctcaagggggcagacagcagggaggatgcccgtggaaagggcacccaggtgaacagtcctcatgcgcttccaccacctccctcttcttggccccagctaagaaaaggagatgtagctgtgttgacgcagagaatgacccagcaccccagatcactggtgccttcaggcagccctccccaatcctatcaatgcatatgcgcactcgggccctgcctttaactggcttctgtgttgttctagcaccgtcctctgcagagcccaaattgccctgcatcccccctctcctgcccctatgccttccccagccaccaggtaagtgcctaggctctgtcaggggttgaagggaggtgaccaaggcccccagggacaggaacagagagaagactggggtccagcatccctctgatcaccccgcagatgctgtcgctcctctctgactcccctgggcaatcctttgggtggcggattcaggtatcagattgtgccccgcccgcaccccccccgccacccgccttcccttttccccctgcaggtcaagaggggaaggtagggaggcaagagaggttttatcgtccagcccccagcttctcctggatatgagatgggctcggggcaaggaggaggtgatgctgtcatccttccaggctggagcaggaagatgaaggacgatgtcagactcattttcagcctcattaggcagcagacggagatggagggaggagagcagggggttgggggaagggctgtgtactggagcaaccagcagggactaaagaaaagagggcacggggga

SEQ ID NO: 47603 - DNA, 1493 bp, Bovine  19866880675633
  misc_feature (1)..(1): n is a, c, g, or t
ngggccagagaaggagtcagaacacccctgatctgaggcagatcaaactgtatatccctgagtcatggtgacctgtgaccactgaactcatgtccaccccacactgagcttcttggctggaacaggaagaagaattggagaagccaaaaggagacttcctctagaactcccaccgctgcacagtgtcctgataacatttttgtccttagaactcctccaaaaccaacagaacaggcaacacatggggttcttggggacttgacactcaagccagttttcccagttaaaaaatgacaggaagcaggaagggccaccccactaagaggaataacaaggacaatccactatttaatcatactataaggctgctgtgtaaccccgttaatgatgactgcaacaccatcaagctgggctgggccaaaaggcctcgtgagagcaactcaagagtcatcatcacttgcaaagaaagaccatccagccactcgggtccaagcatcccagaagggcttcaaaagtcacaccatccatccccgccccagtacacatgggttgcaacagcctccgcccaccctctctcagggtgcactccctgaccctttcctgcctccttccacctgggcccaccttgtcgatgaaggaggcaaacttgttattaagggtcttgatctgctcccgctcctccgtgcgcacccgctggatctccgggtcgatctccacgtggaggggggtcaacaggctttggttgacggtgacctgctggatgccgccaggaggacagacgggccccagcatcggcctgcaagcccccaggcccatgtaggccccaccgccaaggccgaagcctcccagcacccgccccgctgaggcccctccagccacgctgaccgagatgctcttgctgccccccaagttatagaggctccggctcccaaagccacccatgctggggccacagcggggccccccgcctctgccactgctccgggacacagtcaccgagctgaagctggtgcgggcctgggaaccacccccgccactggctgagctggagctgaaggcccctttggtggagtatgtctgccgagacacggaggatctcatcgctgcagcagggccagagcagacaggagagctgggagggagcacagtgagctgctgggccactgatgggctttttatcttttcccaactgggctggctcctggattccacagacactcctgccccatcgccccaggaagagagggaggggccctgaggaccgggggtgttcctttcccactgcgggagggaggggctgctccgagttatcacctgagctccagagctggggctgagccgactgtctggggccggatgccacctccttctcccccgctggggtgctcctgacttggaacaggatgatacgggctcccagggccacccccacccagtggcagactggtctcctcccacccagcccctggtagccgctctgagtcagtggggct

SEQ ID NO: 47604 - DNA, 974 bp, Bovine  19866880703698
  misc_feature (1)..(1): n is a, c, g, or t
ntatatgctctgcttttagtttatatatacatacataatgttttcctttcttaattttgtcttttaatttgggatcagcttcttgcactctttccctgactcaaccctttctgtctccccttctctcgcctgatctcttcatattttgtttttggtagtggtccctggatgaggcacttctttcattttttaataaagtccttagtcccagcagcagaatggagaagccttgaagctcaggcgaatgcttgaggtagctgtgaagagagtgttcaaaatactactgacgcaggcacccttttggtgctggagagtcaaaagcacctctctcttcattggctgctctaagcatcaggaatcagaagtctttctatggaattgtacaagagaccctttgaaagttatagtctgggatcagtttgtccaaactgtgaaaagatggtcaaataataggtaggagctttcagtaggaaaatgatgtgctcagaagtggaagtgactcaagtagttcagttcaggagttggagtgtttggacctttgtgcaacttcttccaaggtagctctaagctttgatgtgtgggcttctgagttcacgttctgaaaggaaatacacttcctcttttgaacatctccagtagttgctttcccattatgttattacagagcatcagccagtgactctgttctggatttccattctgcagaactccagagcatggatcagtggcaaggcagtggttctttgatctttccccttaactcttcgtagggtggctcctgaggggaaaggaagtgctcatgatcatgggaatgatagcccagaacaaaaagaaatcttgtcttaccactgtggcttataggggagaccagggaaaaccatcctgcttttctccatggcctgattcctgaagagactgatccaaaaattacagcggcagggaactcttagtgcatttggcactgagatttaaat

SEQ ID NO: 47605 - DNA, 1290 bp, Bovine  19866880705783
  misc_feature (1)..(1): n is a, c, g, or t
ngatgtgggtttgggtggactccagcagttggtgatggacagggaggcctggcgtgctacagtccatggggtcgcagagagctggacatgactgaacaactgaactgaactgatagaaactccccgcttaaccttttgaggaactccagagtgttctccacagcagacacagctctttacaccaccacctacgatggacagtttccattttctccacatcctctacaacacctggattatctacttttcaacaggatgagaagtgccatctcacaatggtttttacttgcgtttccttgatagataatgacattgagcaggtcttcgtgagattattagccagtttttttgagaaacgtccactcagatcctttgcctatttttatcatttaaattttttaatttgaaagcagcctctgtttattaactgaccagattacaaaaataatcacagtagataccttagttcatccttctaataagcctgttgatctggtcttcccgattgccagcatctctaccttctacaaaatgggtggtctcttccttcattccacctcgtggagaagacaacttgaagtgccacaggaagttgcacgcgtctttgaaacattttccaacggtacagatctcatgaatctgattctccatgcagatgatgccatctttgccaagagatcgagcaatcactgtgttatctgtcaggtcaattcacttcttgttggttttgccataagcacacttgtagatcaattcatttactgaccgcaggtctggggactctcatgcagtgtatggttccacagttctcagcgtggtaactgaagcgttgctgagcttcacacaggtgccactgaagatctgacagaggcgaacaagctgcaataactttccaacctttcggcaaatgccaccaatacttctgatccttatgacaagcgccagtttggattcagagggtacatagatgttgctggcttttcttgccatcctagccattcgaaacttttgcaggtaatggatatgattacctatattcctgtgataccatctgcctgtattcctgtcataatgcttagctttttcatagaactttttcatagatgagctttctctttgcttttcaaagcatctttagggcagacttctttctcaagctcttgatcttaagctctgcaaaaatcttttatttgatctaagggtttctggcatagcaaaaaccttctttttcttatcttctgaaccctccatggttccaaccaggaaagagctgctgctccccctcttttt

SEQ ID NO: 47606 - DNA, 2835 bp, Bovine  19866880737514
  misc_feature (1)..(1): n is a, c, g, or t
ncgcctctgtccctgggattctccagccaagaatactggagtgggttgccgtttcctcccccagggcatctcaccaacccagggatagaatccacgtttcctgcatgggcagacagattctttaccactgagctacctgggaatcccagagagcaaaatagtttggggtaaactggggaagaagaggtgacctgctgagtgggaaaataatataaatgagaggtttcccccagagtcatgggaggaggttactctgcatctttcccatgtttttctgggctcctgagtctctaaatttcgctctattggtggagaaatgtgtttcttgttttcttcctagtggtaattttgagagcagagacctccagaccacagcctgagcaaaaggcctcatgtgtgtctcttgtcatctccaagcatttatcccacacaatggaatatcacttggccatgtaaaagaaacaaataatgccatttgtagtaacatggatggacctagagattgtcatactgatgaaagaaatcagatagagaaagacaaatatcatatgacaattggatatatatggaatctaaaaaatgctacaaatgaacttatttacaagacagaaatagagtcacagatgtagaaaacaaacttatggttaccaggggggaaagtgtggtattgggagggataaattgggagactggattgacatatacacattactatattatatgtaaaataaataactgatgaggacccactctatagcacagggaactcttcttgatactttgtaatgacctatatggaaaaagagtctaaaaaagagtggataaatgtatatgcataacatatgcactttgctgaacagcagtaactagcacagtattataaatcaactataataaattttttttttaaaaagcatttctttggcttccctggtggctcaatagtaagagtcctgtcaacacagaagattcaggttcagtccttggtccaggaagaccccacatgctgtggagcagctgaggccctgtaccacactactgagcctgtgctctagaggccgggagttgcactgctgaagcctgagtgccctagagcccgtgctttgaaacaagagagaccactgcaatgagaagcctgcacacagcaactagagagtagcccctgatccctccaacgagagaaaagccagcaaagcaaggaagacccagcacagccaaaaataagtaaataaattaaaaaaaatttttaaagcatttctcttttggagcagtgccctttgatttcaccacgtgtaataatctaatccttgggtgttatgcatgcctggatgtggtagggtgaggcactggggcctgatagtcaggaccatgaggcggggtgcaccacagatctttcagaatatcgatagtgcctatagatagtagatttccagcatctcatcattcagaataaataataacactccttgtttcttctctgtggggtggcacggggctggtcgtttcatctattaccagtgtgtgtgctaagtcacttcagttgtgtctgactctttgcgatgctctggaccgtagccatttcatgggattctccaggcaagaatactggagtgggttgccgcaccctcctccagagaatcttcccaaacaagggatcaaacctggtctcctatatctacctgcattggcaggcaggttcttcaccactagcaccgcctcggaagcccagtgcatctccctcttatattttacaccagctctgggagctcagaaccaccgctctgctccaactttgggttcagtatgtccgtatcctaaacacgcccattttcaccatcaaactgaagtttccctgccctcagggaacggcacctcctttctctggatctcatttcataccagtgtcagtatacagattggctgatgaagaggaaatttaaggaggtcccccccgcctttccacttcaaaaactatctaagattttggtttatgagagaagtaactcctcaacttctaggtcaggttatgttggttcagttgaggaaaacttctgatgcggctatagctttgagtctgtattctgtctcaggcttctttctggagacgattcaatgttttggggcacaggaagtaggggatattggtggtgactgggatgtggagaaacatgaaattttagccaggagaagctatctcagaaatctgtaatgagcatgtgtgttatttcttttccaacaggctgcataatttttatgaccaattattccatttgtaatgacgcggagataacagagatcccatctcatgctctgtggcaaacgccaggcactcgtgggagctagaagatgccattgcttatccgagaattggatggcaaagtctggggaccgagattcagttctagcaggggagaacaggagcgctaaggaaaactttgtaaacatgaacggggaacatggagaggactgtagttgtacaacaaaagagatttattgggtatagattaaaaaaagaaaaagaaaaaaaagcttgtcttccagcctgagaattttgtgatccaacacagtttctgatgatgttatatttacacataacaaatgaacagatgtctggttgtggagacagtgccatcccaaggcagaaggcgccagttttttttttcccccacaaagaatttcagggctcaattagagaggaggtttaggaaagactaggcccagcctaaggggaggatgctcttcttggggctagtggttctctattgagtctggacagagctgaggatctccttgacagatctggtaattggtccattgggcctgaaggcaggcagg

SEQ ID NO: 47607 - DNA, 1440 bp, Bovine  19866880749060
  misc_feature (1)..(1): n is a, c, g, or t
nagggcctgggtggaatgcggccacccagacagagtaaccattggccatccctaaggagccggaaaggagggcagccggggggtgtgcaagccatcctgccccctcccttctatttctaagcctgcatgccagccatcatcaatagccaggatttactgagcacttactatgtgccagccactatactagctcactttatcttcataacaattctaatcctaattttacagaagaggaaactgaaacttaggtaggattaagctgcttgtctaagcccacataacaggtatgtgatagaggtaagattcaaatctagggctcaggcagcctccccagtctcctcctgctaggaaagtggcctaacacccatagtacaaagatccttttcattttttcataggttcctaatgtggggtccagagaagaacttcaggaagtccttgacacctcccagcactgcatgtaaaaatgtaaaattgtgtctacaggtgtttgtgtattttttcctgagtatacacatctcaaattctctgataattaggacttccccgatggtccagtggctaagattctgtgctcccaatgcagggagcccatgttcgatccctggccaaagaactatatccacgtgccacaactaagagttcacatgccgcagctaaagacttgggcagccaaataaaaataaatattaaaaaaattatctgataattactaataattatggctatcatttgagtattccatttatacacaccatcttccatgcattatgttattgaatgctaacaaggctgagttaatattattattactctcattttatcttatttttattttatttttttggctgtaccgtgttacatggaggatgttaattaattccatgaccagagatccaacccacattcccctgcaatggaagagtggaatcagccactggaccaccagggaagtcccattactctccttttagaaataaggaaatgagggcttcgaaggttaagcaacttgcctaaggccttgggtttagacttggggaagctggtgacagagtgtacactgggtgacatgagttcccggctgggacacaggccaaagaaggtgaaggagctgagtctctggtctgtgtcaacacactgtcccgttacctttgccaccagctgatagagggccgctaggatctgcagggaggctgctgtttgctggagacaccgtacagcgggcacctgccccttagtaagcacctccttccacagggccagggcttggtccaggcatttggactgtgctataaatcagaagaaagggaccagtcattctcacactctgggccgtctggggaaatgtggtcatctttcccataatagcctctgccttgtgcccacctcccactcatgggggagcctctcccacagctgggggacccatcctgttag

SEQ ID NO: 47608 - DNA, 1582 bp, Bovine  19866880808492
  misc_feature (1)..(1): n is a, c, g, or t
ngagcagagtggggacaggtccaggcagagaaagggtgccaggaactcttgaggagaggtcaaggatgagagctggaacatcgccctggctcagccccaacttcagctctgtagatgttgtcagaatgatggtggaagggggaaagaaaggagagatgaagatcagggagtgggcatctgaggtctccgggctggtggccattgcagtccctggatcccagtgccagaagggggtgcagagtgtgagaagctgcaggaatgcacgcttcctaccattttccctgggttggacgcaccttgcactccagaagtggagagccttgctcataacctactcccacccaccactgcttctgttttgctatcaaaggctgagttaaaaacagtctggcttggggtgagaaggccagagggtggaggaaaaggttgagccgggagcgggagggcagcagagggacaattccacgtgggaggcctgagcagcccaccagaggtcagggccagacccctgactcagcagccatccacttccaagctagcatgaggcacagaggctaagtatgaagaatttccctcccttgaggtctatacacttccaaccaagtttaaaatctagacaggggactaacgcaggtatgatgagatgtatgaaaaggccagctttggagggtcaaggactctcactgaatcatcatccgcctctattctcatcctataaaatgtgggaaggccaaagagactgacatggatgcttactcaaaaaagcatctcgaagaacctctcccaacacgagtaggatttatgatgacacctaccccacatcacagcgaatgaaaagctgggccagctgggctgggttcaagccaaaagggaggtccaggcatccagcctctccaaaatcagccccgcctctcaaaggtagacagacgttcagggcagcagtgtgcgccaccctggggactgaaggaaccaaagaggcaaaggagagctactgctttccccaaggttgagtgatgagcctgagctctcaaacaaaagggaaggtgggaaaggaagaccaaggctaagggaacacagacctggacgcaaggaccgtgtcatggtgccaggcaccgctgctcaaactctcactttccaaaaccctacagaagacactgtcttcactgcctattccaagcaatcctaagagccgctggggccccaggagttccgcccggcgccctccacccactgccccttacttacggttccacagactcggacgtcgtgcagccggccccactcatcctcgtaactgtccaccatcatgacgctgtcatcctcgcggcccagctcggcgttgaggtgcagccgtacctcctcccccagcgagtgcatgcccactgccggaaacagcccgtccggggacatgggcatgatggtggagcccacctgagttgtcaggagagaaggaaggagggagctgccgcctggctcactttccccacggctcatctaattctcacaaggggacttttgagaatgatgcaaccagtcatcaccacacacatgacaggagagcaaaacagaggtacagagaagt

SEQ ID NO: 47609 - DNA, 1457 bp, Bovine  19866880843190
  misc_feature (1)..(1): n is a, c, g, or t
nagcattcctacaaaactttttataagccagaatggtgtaaatcaaagaagcaattattttaggacacattttgctaacagataaaaagcttgctgtaaaaccaacactgaacactattttcacttttcatctttttttaaaagcagagtcctcttaggatttctttctggtggcagcagcatatatgggtctttttgtaaaagtaaagtggcataaaggtaactttgaagcaagtgatacttatatttagaacccaagtgtattaaatgtctgccagtttcaaatggtttgagcaagaaagacagcttatacacccacatataaagccaacatgataaaacttaaaaagtgatagttcttgaggggtcagcatgggtgcagggtagccattactgagctgggcatggtgtattttgttaaatctcttttatacagacacccaagctggcgaagtgaagaaactcaggaacgggaacgatcgaggacaggaagtgagtcatcacagactgggacctcagccacatctggcagaagtaagtcagaccagggtgggtatcttattattgccctttgccttaacctaacgtatccatagccaaattatgcatatgaaatttagtcgtggactctttatttgggttatcatggattggtctgactttcatatttgctctgagaaaatctgggtaatgggtaccagaagagacttagttaatcagtttaatgtcccactgaaaagtatacttggctgttggggtttgtcccctcctcttaggttcttgtatcactttgctgttgtcgttgggctgggtctccattgtggcaggtgggctttctctagttgtggagagcgggggctgctctccagtacgatgctctcatcgttgtggagcccaggctttagacgatgggctttggtagttgcggcacacaggcttagtttctccatggaatgtggaatcttccaagaccagaaatcaaatccgtgtcccctgcaataacagacattcttatccagtgtactacgagtgaggtccaaagtcttgtatcactttttgttacgagtgtttctacatgtgtatcaagtaccagcgttttaacaccgagaacatctgttgggagccagattcagctctgtattgaagaatgatgatggaaagcagtgtacttggatgtgggccgttttccactcttgaggttctaataggttgttatcaataagccctttttctgatgctttgaccttcccattttgacctcacagatgcaagaagaagagagagtgagaagtctttagaaaatgaaacccccaataaagaggaagactgtcagtctccaacttctaagcctcccaaacctgaacagcctctaaaggtaatgccagcccctccaccaaaggagaatgcttgggtgaagcgaagttcaaccctccgctcgatctcagagctcagacaca

SEQ ID NO: 47610 - DNA, 1129 bp, Bovine  19866880847707
  misc_feature (1)..(1): n is a, c, g, or t
ntctggcttctgggacctttaaaggtggctgacagagaaggggttggggagaacagttccccttcagattgttgttgtcctgagagaagctgggggagctcgtgtctgcagagctcagctcaaggcagggtccagcttgcagtgctaagtcttaggtcttcaaagcttggctggttgctccatcactggccccttaaaatctggattcatgcatatacactagcctcaggatctttattctgtgtctcagtttctcctctttgtgggtttcatatttcctgtgtatatttgtgggggccttttatcgtggagagttgcttgaaggggttgatcgtaattgctcagaaggtgtctaaatggtcgaccccaaattgatggacagtcactagtatcttattttacttatcctttgcattctgctcatttagctctcaaaggcagacatcatcccagtccttccctctactggttcttctccaagcgacacctgaccaaaatatgtcccttctgctagatcttgcctgcctgcctctatttctctctctcctctgccccactagccctcgtactgattgtgtgagggtccattagctctgcagaatttctggccaagcttcaggactcttttgattgcagtatttagggggagaagtaggaaggagaggcagggcaggttttcacattcgggcaggggtctctgagatcccccaacttggcactgggagggagcccgggggcagctatagcagcggtttcacctgatcagctttctgggcacatccaccaccaagcagcacctgagaggggaaccggctcagcagtgagccgagtgagattgaagaggatcataaagaaaatatatatcctcctcctcggcctcgctccctcctcctgctctacacttgcctctgctctctctttgtctcactccctcccatctcctcaccgcatccctgttttctttgtttcttttttgcctccttcaccttcatctctgtcaggcagatctgactgactgactgtcagtctgtctgtctgtctctctcactccaggtatttttttggtccgagtctttctagaactctgccatcagctcctctctttccctctccccctcgtgccatcctg

SEQ ID NO: 47611 - DNA, 1557 bp, Bovine  19866880866965
  misc_feature (1)..(1): n is a, c, g, or t
ngaagggttggaatttcaagcgtccaggtgtccctcactccccttcccggaaggcacgagggcggtgagtcatgcatttaggcccttctcccaccccctcactgctctcaggcaccctgcttccccctcctgcccctcctgcccctgggtctggagagaaattggggaggatggggtgagggctgggtctcgctatcaagctgggtgtggggtggagggcagagccttcctgtcctcccatctaggggcctggatcctggggcctgaatccaatccctggaatcagtgagaacaattacagcttctttcctccttatctgctggatccttagggcctggggtgaaagagaggagaggacagaaaaaacaaatgtgggggagaagaatagggatcagagcggagaaaatgattcacctggatagaattgactcttggaaccattcattcattcactcattctctcattctgtgaatcaaacaaattcctgtgctgggtgctgagggaaatagaaacttgcaagacagaaccctgttatttttttttttttttctgatgtggtccatttttaaagtctttattgattttgttacaatatttcttcttttttaatgttttggttttctggtcattaggcatgtggcatcttagctctctgaccaaggattgaaactgccccccatgcactggaaggcagagtcttaaccactggactgccagggaagtcccaccaccctgatttttgaggaagcgccttatagcgggtgtgaaggccctggattggaatctgggggccctggcttgagccccaaataccactggatgggcaaatcacttctctaagccttgggttcctcgtctgtgaatgaggataaccatactgagctcccaaggttactgtgcagatcagatgagatgaatatgggcgcctgcttcattcgcccttgtccactgcctgtcagatgcctgtggcttgggtttacaatcagggaggggtgctcagacaggtataacccagcccagggagtaacaaaggtcggttcttggggtctctgtgggaggggcacttcctactgtgctgactgtgggtggcggtgtgcggaggtgcctggtgtgtgattttcattcagtaaatgtttgcagagggcccggggtgtgctggagccggggcctgcaggaagggtaaggtttcagcaggtgcaggtgccaaggatggtggcaggagggacaggcagagccctggggctggggcaggagcagctagtgccaggtaggaaggactcagctccatccttcatgagccgcttgacctttactctgaaggcaaaggaagttctgagctggggagtgacaggatcaaagtggtgtttgtagaacagtctggctgggccctgggccttgggccctgggagaggacaacttggagcaaagcaaagccagctcagtgtggaggcggaggggggctgggccacagggaaaaagcctacgtgtctaggagcctcaggcgggcagtgaggtcacctctcccccaactctgcgaggaggaggagggcgttcg

SEQ ID NO: 47612 - DNA, 846 bp, Bovine  19866880870563
  misc_feature (1)..(1): n is a, c, g, or t
ntcttcctcaagtgggaaggtcagcttggtgtcagatttgatatacaccaccatttttccctaagagagtttcctgattttctgcctttccatccagctggatatataattattttatttggagcttttaagtgatcctgaggagaacagaaacagcccaaggaaccaggagccaatgaacaagaaggcaggaggactggggcatgaagacagtactgagttctgaggctggagagtgacctcttcctggaaatacagcccctgctcagggaggggagagggctgctcccagctgatggccatggtccttccactgggtctgggttccacttcccaatacactcttcccctaaccccaatcctgtggttctccctgtttattattttttgccaccacttctccacagaaccacagaatagaattataagacatgtgaaagttttaattataagacatgtcatgcttgggatcagacctaatgttatcaaaatatgtcacattcactttaaatgatttttttaacaacaaatatgggctaattgtaaaagagtcaaaggcaaatacagatatatttaatgtaactatgtgaatgtaaatgcatgtccatgtgttaaaatacatttattgatatataaatatattacaaatatacatatagacatataaaatataaaaaattataggctcccttaagcccaccttcataccagtgtcaaatgtttgtagtctagggcatatatttaattttttttaaataaaaatgaatcacaccattcatgctgttctccaacttgttttttatttattaaagtataccttatttttctctttttaaaaacacttga

SEQ ID NO: 47613 - DNA, 1266 bp, Bovine  19866881036073
  misc_feature (1)..(1): n is a, c, g, or t
nataattattgagtgtgtgggcaaatatttatcaaaggcctcaaaggctccaggctggccagagggttgctcaggctagagagttgtcccggaggctgtgcccaggcaggcagcctggcaggagcctcaggaactctctgcttgtgcggcaggtgcggttcctggagcagcagaacaaggtcctggagaccaagtggcacttgctgcagcagcaggggttgagtgacagaccccagggcctggagtctttcttcgaggcctatctggtccggctcaggacacagctggaggagctgcagaagaaacgagggtctctggacgccgagctgaagtcctgccagggccaggaggaggagtataaagctaagtatgtgaaccacagcatccccatggggcctggtggcagctgggagggcttgaatcaggctgtctgctggaagctgtccttcctctgagctcccggaatcacaggataggcctctcctctgggccctctgcatccctactctctctgattctcagggggccccatctgctgcaggtaagaggccccccagcccctgatatccaggactggagagcctcgattctagcaggccctgactatgagggccacgtttctggtcaaggtggggaggggcttatttaaagaatgttcctgtgggtttttttcttgagaaattcctgttgagcaggctgtgggctaaagtgactcagatatcctctggtctcagagggagaagggaatgcacttagtgggaccacccctgggcctgtgcatgattcacggctggctgcagttctgggttccccacgaggtcacctggtggcacagggagagccctgaagccacagaaggctcaggtttggtgactgtgagcaaggaaagctgtgtggccttgagcaaagaatctcacctttcccagcttcagtttccatatctgtagacggggataatgcctttcttgtgttccagagccactgggaggttggctccagggcccaggggggagggtcctagaaagattggggccaggagacctggattttagatctgcatgggccacctaattatctataacctgggcacatcttataatctctctgataaaatccaaaatgcctgcttcagatgatgattgtgagtggtaagtgagaaagtgttttgaaagtgccttccagacatgaagctaagtgaccccgatgtcatagtgaacctgggccgagagagtgaagagggacataggacgtcacaaaccttcctga

SEQ ID NO: 47614 - DNA, 1042 bp, Bovine  19866881038770
  misc_feature (1)..(1): n is a, c, g, or t
nagcctggtaggctgcagtccctggggtcacgaagagttggacaggactgagcaacttcactttcacttttcactttcatgcattgaagaaggaaatggcaacccactccagtgttcttgcctggagagtcccaggaacggcagagcctggtgggctgccatctatggggtcgcacaacgtcagacacaactgaagcaacttagcagcagcagcccaccacagaagggagctgcactaggggctgcaggagaagggaccattgtgagggcttctgaggaactgggatttaggtgcagggaaagaaaaaggctccagagggaccctaagtgaaacctaaggactcaggccggtggagacaaaaccttcccccaacttgcctccccacaatacccactctacggatgacaataagggccatgattgaaactcaggggtttgcctttccccagcacctgtgaatcctgaggcccaagcagagagagttctcctgtggaccacttcgtcccatcaccaagggtccagcaggacaggggagtggaggatggagaatccgaggcagagttgccctccctcagaaccttcctcacaggttcctttctctggccaccttcccctctgcagccctactagctgtgtggtggttctctccatttccagtgctatagaaaggactggagttagaccacagaagggtctttccagattaacctcttggttatggccacaacacaggccagggtagcaaaggttaagaaatctaggcttttctgaataggcccaatgaactgagcatgatgaaatcagggaatccagagaagatgggcaatctcctgggtatggtgggcttggaaagactatgcaactatcagaagcactgacatccaaatacacattgggatttattgggaagttcttctgaaggtcagacctgaaatcctccagctttagtttcagggtatttctcttttaaggctctttcagggaggcagaatttgaatagtaggtttgagacttgatgacagagtttccattatccctgtc

SEQ ID NO: 47615 - DNA, 1708 bp, Bovine  19866881051108
  misc_feature (1)..(1): n is a, c, g, or t
ntcctcacccacccagcttacctctcctcgccatctggcgtctgtatggtggtctcagacagatctgccactatcgtagcggacttggcgcctccaacatacccctttccctcacctgtggatcagagcaggtgctcttaagtgtaggaaaagggcccctctcccccggttccccatctcctccccatcacaggcatcaatgcctctcaagtcttccgagcttctttacttccctttttccttcaaggcagcatattccagatggctctttcctccctctgactaccccagctattgtgcatccggaagtgttgcccctgactcaccacaacgttctgggaatgacaaggagtaaataagcggttcccccaacacggtgaacagcaggcggtttccactggggctccagcagccagtctggggtcagggagcaaagggcaggaaaagggtagtctatgagaattcaggaaggacgcacaggagcaagagaagtagaggaggtggggggcaagtacagccaacctcctcccccagctcctgcaccgcacactccctcctacctggcatcgccccgagagggtaggccaccgctcgcaagtccacatctgggcctcccagactctgtgccagagaagcaggccacagcttagagttgcaggtctcacagctcagacctccctgcctgtcagtcccaggttgaggggaatgggaatggggacagaaggctgtgcagctgaaagttccagaagcctagggcctttctccacatccttcctgcccacttccgctctccccacactcaccgaaagacagctgaaggagtggtagccaagactttgctgccatctggggaccagagcaggttcgtaaccccacctccccgaaaccagggaaggggaacacaggtctctgttgagacatcccatacctaggagacggggggacagtgagacagggagacagtatccccaacaccccacagacccccttccctgaggtacaaagaaccagagaggagaggaagtggagagggttgaaacaggaggaaacagcgagcagaattttacatgtgaggagcagggtgctcctgcaccttggataaatttaagactgaatggataactgttcctcgcctcccgcagtgtacttcccaccaccaggcaaaggcagctcttccctcaagtctgaggggtgtggctgaagtgaccccaagaggtatggggatcaactcaccaggatggcagcgtccacaggggaagctgagagcagccgccccccactaggggcccaagccaagctggtaacgggtgtgtgcccagggtgagagagcacctgggcacagccagaagagggtctgcagaagggagacggcgtggggttagaagacaagaagaaagcccctgtgactctgctcccttgcctccacctgctaacactgccccatccctgtgggccctctgaatgcaggagtaagaataatggaagttaaaggaaaacaagaaggaagcaagggcagtcgctaccaggaggcccagaaagggtgaaagcgggtaaacctgagagagacaagaactttattactcctgttactcatttatttattggctgtgctggatccttgtggccacatgggttttttctctagttgcatcagaggagcttcttgttgcaatggcttctctggttgcggagcatgggctttagggca

SEQ ID NO: 47616 - DNA, 1393 bp, Bovine  19866881061402
  misc_feature (1)..(1): n is a, c, g, or t
ntatgaaaacttcgtggaggaagtagatgcggtggataatgggatttcccagtgggaggagggagagcctcggtacctgctgaccaccacgctgagcgccagggttgctcggcttaatcccacctggaaccagcccaaccaagacactgaggtaaggagggcctggggaaaagagactgaggtgtgtgaaaatcaggggaggaagtaagcgggcttggcctcttgagccctagcagagttagttcgggccagcaccatggttctcattcccaggctgggttcaagcgtgcaatggacctggttcgagaggagttcctgcagagactagatttctaccagaacagctggctgccagcgcggaccctggtggaagaggccctggccaagaggttccaggtatggacctgggaagaggcactgcggccctagagagttgcgtgctggcaggctgctggcctgttggggctcatgcttctaccctgagccgtctgtgccagctccacttcctttgcaggtggacccaagcggggagataatagaactggaaaagggtggctgcccctggaaggagcacctctatcagctggagttggggctgtcccctgcagggaccatcgcctttgttatctacacagaccaggctggacagtggcgggtgcagtgtgtgcctaaggagccccattcgttccagagcaggtgagggcctaggggtccaccctgcagcccttcaggcatgtttcagccccatcagaggaggcagccactaacctaggcctctgctccccctctcccagttcctcacgacctccatttgcccccaccaactcccttttctgctcactcgtaggttgcccctgctagagccatggaggggtcttcgggatgaggccctggaccagatcagtggaattcctggctgcatctttgtccatgccagcggcttcattggtgggcaccgtacccgagagggtgccctgagcatggcccgtgccaccttggcccagcgcccagcacctacacctgccccaaatcccatggtccaataaaactcccatctcatgctgaccaaataatgttctattactcccctgcactattctgggagcttgcttaaatttggggaaagtgtaacatctattatgtgccagagctggtgctacgtattttctcagttttgctttcaaatcatttgaaaactatccagttcttaagggtaaataatgaccagattcacaaggagtgactaaaaagtgaaagccaagatttaaaccctaagtccatgcctttttttttccttcagtgtaccccagtgcaactcactggaaaagacaaagtctcataattaagtggaaagcaagaaaggacacttttattactgaaagtgggagtgagg

SEQ ID NO: 47617 - DNA, 1042 bp, Bovine  19866881064622
  misc_feature (1)..(1): n is a, c, g, or t
ntgtggcacgtcatgattattaatgatactaataaaattgcatctgaccagctctgccaaaaaagggttttgatgtggaaatgcaactaagcatgatctttcctggatttctcatgttttacttcttttcatatttctggtcagaaaagctgtaattgattttatttgatacttgcagatgattcttattgtaccgcagcctaaaaaactaaagattttcttctaaaatactggctattgttatttcttataaggtgttgtagtttaaagaatatgtttctttggaataaagtcagtccaaaacaaaccaatcaaccacacatatatacacacacaaattaagttttagaataaaaaaaatgaaactgtgataaaagctgtccctcgattaatgtgcagagaaggcaatggcaacccactccagtgctcttgcctgaaaatcccatagacaaaggagcctggtatgcttcagtccatggggtcgactcagcaacttcactttcacttttcactttcatgcattggagaaggaaatggcatcccactccagtgttcttgcctggagaatcccagggaccacggagcctggtaggctgctgtctatggggtcgcacagagtcagacacgactgatgtgacttagcagcagtagtagcagcagcagatttatgtgaacttatagactataggaagaattcaccatttctcccttttgtgcgtttttcactcagccattttttacagaataattttttgtcacaggtcttagtattggccagcagaaaacctatccctaaactaacagattacacacatacacacagctgtttcaacacttcttcacagtgaaaagctctctgacaagataccagaagataaagtgactgcaatgttttaacagctgggcattgagcacaattctggttgcatttagatctcagtagcacatcaccaagagctccctgttttctgcttatatttgtgcctcatattcaattagtgaaaagatcgtaacaagcaacttatttttctattttccttcc

SEQ ID NO: 47618 - DNA, 1255 bp, Bovine  19866881128512
  misc_feature (1)..(1): n is a, c, g, or t
ntaggagactgggaaaggtggaatttggaagtccgggaagggagggagcagtatgaggagcacaaatggaagggcctaagtataggaggagagcctctggttattccagggacccggaaggttttttcagagacacataacaccctccactcagcccacctcatcacttaacacctattcatggagcgacctctgtttacaatatacccagatttttgcaaattctgtggacaacgcccgcatcgttctgcagattgataatgcccgtcttgctgctgatgacttcagagtcaagtaaggctgggggtttaggaagctggggtcaaggggattttgttcagttgtgggtggagctgggtggatgagagtaaagcatcatcaatttattcttaatgtaactcagtgtgaagaactctgccccccaagtgccaggaatggtgttcagaggcttagtgcttgattcctgacttcaggtggctggtgtgcataaggctgcttttaggaggtggcatgggttgagaaggtttgggaccagaggcggggcccttctgatcacctccactccccgtaggtatgagacagagctggccatgcgccagtctgtggagagtgacatacacgggctccgcaaggtcatcgatgacaccaatgtcacccggctgcagctggagactgagatcgaggctctcaaggaggagctgctcttcatgaagaagaaccatgaggaggcaagcagtggcccctggccaccagggggtcaagacaagtcagggttggggagtagatggagcaagccacgtacaagaagacttacagggaagttgagaactaccagcctaagcacttcttaatcagactgttgccatgctcagtggttaaccggaattagagcatggtgaggtcaaaaagacatgggtgagaggatgagatgaggaccaaggtggaaacagctagcagtagaggtgagatgtgatagaggatggtgagggaggaaggtgcaaggaatagtctgtagatggagggacagggtgaagaaaggagagagaaaccaccacctgtgagcaacaggcatgtgtggttaacagtgggcattttacccatatggagtagaagcccagaattggcattgcccagagagcaaagtcaaaagattcctcagttctgttccccaactgatcctgtaggactcctggaagaggcagtcacagataaagaggcttcctagagctctgaccctgaaaccttcctcaacatt

SEQ ID NO: 47619 - DNA, 1047 bp, Bovine  19866881176850
  misc_feature (1)..(1): n is a, c, g, or t
nactctctctggcagatgaggagctctcagcaagatgactgaactgcctccttactgctttcccaggctccggggttaaccccctctattctgatggcactggggaggcccaggaagcttagaggacattcccacccacacaatttcccagagagaagtattctgaaactgctagaaaggttatagaattgtcaagtgcatgaaatcaatgactaaaattatgactgtaacacagctttgtttactttgtgatactgtaaaaattttcaaacttttcagcagagtataaaaatcataaaaactacagaaataactctttcttgaggggaaaagaccacttctatcactagtcaccttgggccctgatgcttcaccaacatttgaagttcttcccagaggcttcttttcttccaggacaactcttatcaaatcttgaatgttgactcaaccccatgttgatggaaagtggaaatggcacgtggctaaatttgacccccagcccctttgcagtgaggtaaagtcatagaactggttatcaccaatggaatataagcagaagtgatgtgttacttctggactgaagaggttaatagtggttaccgtttctccgcatggtttctcttccccatctgctggcaggatgacacctcggcaacctgaggccacatagttaagatgacagagacacagcatgaacagatccagattcctgagttacttgaccacagacatccacactggattatgtgatactgaagtctttatcatgttaagatgctgagatcggggggttgtctgctacagctgttttatctaaagttacaaattaaggtaacaaggctgaaatagcaagaaaccaggcctaaggcaccatagaatttgcactgtaatggatgtagaaggtagaggagagcacttgggattcagaaattctttattttgggggcgtgctttacagcatgcagaatcttagttccctgaccaggggtcaaacctgtgatgcccaaagtggaagcgcagagccctaaccactggatcaccagggaa

SEQ ID NO: 47620 - DNA, 1601 bp, Bovine  19866881204625
  misc_feature (1)..(1): n is a, c, g, or t
ngctccttgcattatgcccaccacaaggtgtgggggccaggatatcattgaaggagagggaaagatgaatctggacagttttttagatttctcagtgaaggagactgatctgtttttcttacagttatcgtctctgtggttaccttgcagatagttagcatttgcttacccttgtgttcattttatccactgctggtaatttcctggccttctgggtaggctcagtttagctggttggctcagctcttgccccaagatagatatttttttaactattgtggattagaaccttctaggaactgtgttgctgcttttagagaaaccaattctgtagatcttactggggagggtagttgaggggtggtgtttatacatatgttgtggaatgatatctatgcctaacagatttccatccccattgcacccctaaggcttttcaatccacttcttccactatctgaagcaaggacttttaagtttccaaaacatagctgcaaagggtaacaaacacctagcccataactcccttaacaacaggaggatagtcagtggggatttagctcaggtaaaatctgtacaatgcaaaaactcataaaattttcaaaaacagcttagcctatggacttgaccagattgaaagtcccacaatcctgggttcaagtcacttttggttaattcttcttgtgcttcaattccttcccttttgtgaaatgagaggcacattttcttgagatgtgcctcctagagatgacatagaaataaatgaaattagattttaaaattcttgctggaggaaatttccctggtggtccagtgggtataactctgcgtccccaatgcaggggacctgggtttgatccctgatcagggaactagatcccactttccaagactaggagtttacattgctgtaactaaagatcaaagatccttcgtaccacacctaaaacccaggacagccaaattaaaaaaaaaaaaaaaaaatcttgctggagacctagatcttgtaaattgtctttatctcttctgtttcttagttaccaatttaccaggagtaatttaacactaggactctctgccagggctaaaattagactccaccactctggggcttccttttctccttcttgcttttgttttgggagctggagggaaacatatgtgctgctggagttagtaaactaaagaccacagaaaacttttcctgctaaaaaaacattgttttcatcctacccaccttaatatccttttaaagaaagaacccaagtctgccctggattttgtctatttgattcactcctagatatggacctgggaaagcctaggaatccctggggagtgagagagagaggataaacagaattggaatggagacaagttaggctcttgattgctccagccagcctccctttcccagccagacaggctttctgccaccaaaactataaggttctctgtcacgtcaccaaagggtctggagttactcctgtggcctgacatcttttctgagggtggaaggcttcaggtatcggacacctttcttgtccaggggtctagggaaaaggatcaggcaaggagggagtcaatcttttccaactgta

SEQ ID NO: 47621 - DNA, 1149 bp, Bovine  19866881251910
  misc_feature (1)..(1): n is a, c, g, or t
ncagaacctgcgggttctcctgggaagaggagctaagatcccacatgcctcatggccaaaacaccgaaacatagaagccatattgtaacagattcaataaagactttaaaaaaaaaaaaaaaagaagaagaagaaatacagaggaggggagaaaatcttcctacccggagaagagaaatttggtaatggaggaaatggggaacgtcctccccagaagggcaataaccaccctccagtaggtgtgcgataaaggtcagtaccatatccatcttccctcctcattatggccccagcgtaactttccttaagtcacaccaatccctctgctttttacattcgaagttttctcctggtaggaatgccttgcccagaatgaaggcaaggtgacatgaaatggagctcgggggaatataaagcacacggtaatggtataactctggagaatacaaaacatatggtaacaggtacacgcgttatggagaccagtctcaggctctgcacacgcaaacaggatttaataataagactcatttcataaggttgttgagtggattaaaaggacattcctacagagctcttagcatcacgtctgacacggaactggcgctgagggaatagtcacagtatttgtgggtacgcagcgaccttacccgcccgccccacacggggcgggagccgccccttgaccggccactcagcgcccggggcgcccagtgcggcgtctgggccgccacgtcgccgcctaccaccctctcgacacccgggtttaccagcccctacccggcgctaggtacccggttcaccgggccgcgcccggtccggcctgcgtccttcgattggctcctgaaggtgcctgtcgtcctcggccgctgcagattggccagagtgggtccaaaggggcgggtctcggggagcgtaggaagggcggggaccccggatgtgtgtggtggcggcggccgaagagctagtgtgcggagctgagaggcctatggatgaggaggacgcggcggccccggtaggcggggatcgggggcggggtcccggaggcctcgggtcggtctccaccgagcctgaggcgggaggcgggaggcgggggtcctgggcggaggcttcggagtcaggggcggggccttgcgctctggtctctgg

SEQ ID NO: 47622 - DNA, 905 bp, Bovine  19866881270791
  misc_feature (1)..(1): n is a, c, g, or t
naggctctgcctgatgctggggctcacaggcctgaaccccatccttccaactcccgccaccgcaggagagagatggacggcgatgcaggaggtgaccacgagagggcgtccagaggccggaaaccagcctctcaaccagtctccccactcggcaagcccgcgcccctccccaggctccgccctctcctccgcaggggcgccagcctggcccagccccggacccccgcgctcaccaccaccttcttgccctcgtgctcttgctctatctcctccccgtcatcttcctcttcctcctcttcctcttcttcctccccttcctggtgcagatacatgacattccggacattccgcacagctcgggcagtcggggacaggatcactgtgtcacagctgtcgtcgctgtcacctaagaggccaggacacctgagctcctgcggttctgcccgcagaacccaccctctgcccggccagccaggttggccacggacacccccactcaccctcactgtccagaatgtagtcccgggggaacatgattccacagcccattatgtcccctttgtaacagcgtggcccgaaagggtcccccacgccactgccatgaaagatcttcccgtcatctgttgggaggaggggagaccacacgcacctgcaggaggggctgataccctacacccccagagcccgccccgccagaagcccaagtgcccctccttccctctctggccccaaggaagggaggagagaaaatgagggccccagaagagagacacgtctgtcccctcaaagggctgagggggagctccctcaggagctgatcagagagcggagaagggcctggggggagggagaggtgggaccaggaactcaaggcttgtcctttctaaagaaagcccgcaaggaaa

SEQ ID NO: 47623 - DNA, 1028 bp, Bovine  19866881297463
  misc_feature (1)..(1): n is a, c, g, or t
ntttccccactccccatcctcaggagcaggaatagccccaggaccactgacccagggtacaggcatgccagactgctcatgggatctgcattttgggaagggttcaaatctacccaggtttcctccttggttctgcaacaggatgggaggggtggttaaggccaccagtttgcgggatgtgtttggatgatttggggatgatattttgaccacagagaggaggttggatttccccaggccatcttggcttctctcacctcttctgctcatctgctctgggctcaggtcaggctgagggagtataaagtcagaagtggtctcccatctcccaccagaccaccccctccctgaatctacctacgtccccctcccctgtctgtgctgtgatgtatctcaataaatggaaattgcaactagctgtctggggcttgtctgtcctgcccagagagcagaaactgtcagctgattaactcagtgatggttaggcagcaacaaccacgtgctcacaatatctcaatcttgctaaaagcacattagttcagtaccatcaccaccgtaggctttggttcttactctcctcctggaggaagttggagggactatgtaagtagctcccagcaggacccagctcccagcagctgtctgttgctcagcccctcccctaatgctactgtgccccctgccagctctgtgggggcaggcagcacgtgttcagtggagaggtcttgggcttcacaataggtttaaatcctgactgtcacttactagctgaccttgggcaaattacttagcctctttgggcctcactttcctcctttgtaaggggacaacagagggtgagacagaggatggttggagggcatcaccgacttgatggacatgaatttgagcaagctctgggagttggtgatggacagggaagcctggcgtgttgcagtccatggggtctcagagtcggacatgactgagcaactgaacttcctcctttgttaaaacgggtgtgatggaaacatgtgtaaagcatttgg

SEQ ID NO: 47624 - DNA, 655 bp, Bovine  19866881318802
  misc_feature (1)..(1): n is a, c, g, or t
nctgtttcccaactataaaatgaagttatttacacctgcctcaccatggatgaacactgataaagattctgaaaggaggggaaaaaaacctttaaatgcctatgaagaccctgaaaggagaaaataaaaaaaagatgtcatttatccatcacattctatggttattttttaggaaagcacaacaatttctgaatccagtgcgttcctattctcaaccagctccactggctactagagagctgtgaacactttttctgccaatcagaatgactaggttacccaattatcaaaagcaaacaaaaaaaagttggctattaaagtactgtcaatgaaagaggaaatatcttttctggggaactctccatgcttgatggtgttctcacccccaaatctgatgctagatgctagaagctaggaagatagggttttggggtaacaaagaaaggaaaggctgatcatttgatcagtcaaagaaactagaacttgggactaggggcaggactggagaaaactagaagggaaagagtactcttctggcagtggtgcaatcacctcacagaactgggaagccataagtggctttgaagagaacaataaaccatctaagatgaccctgatactgcacaacagggaggctggcattgcagttcagttt

SEQ ID NO: 47625 - DNA, 1332 bp, Bovine  19866881364489
  misc_feature (1)..(1): n is a, c, g, or t
ntctcttgtcccacttgtggccctggaggttacgatggttgctgagaaacaaggttttatttgagcaacagcttcccagaagatgtgtaggtctcccacttcctgagaaaccagattctgggcactcactgggaccctgctttgggatctggagtctaatgcttaattctgtttaggagaaactaggccacgtggactggaattcatgtgggacctggccagactcaagttgatgccaaacctgcagcctccagttgctcaagacaacaggaggttgacagggctgacccatcttgaaacccatttcagtggttgggcttctcagagtccatacattctgactgaggatggtgggcagaccagtgaacttaacctgttgggacataaaacgggcagttcccttctccctgctttttctgtgcacaagcaacgagaacctctttccagtcagcccttttcccatcttcatccttctttccatcagtttattcagacgtcagtattacagtgaagagggtggcttgaaatgaaggctttggaggatgtgactgaggcaggctatacaggcagcctgggcgggagcttttcctccctgcccacagggatcacagcacagcacacgccccttatccctcaacttggaagtcaacgcaccagccgtaaactacaggagctgttgctgctggaatttgcccaggaaagccacctgtttaactgtgctcccatctcccgccccacacttcctcttggctccaagtccccaaaattgtccactgtggtttctgtggcttttatgctccacccccttgtgaccttaaggattctctgccactgttctaacctctttcctgccttgaaacaatgaacagtctgtccctagctgtttggaaaattctcaccattggtgctttaaaagtggcctcagttgtaacctggaccaccctgtcaactcccctccgcctgcacagtgcagccaggagagcagacacagcacccgtccagactggagtgcaggtttgcagagacaaaacctcaaggacctgcagatgtagccctagagttcctgcttcatcttacgattaaaataaacagtacaggaaatgggatgcagatactctcaggtatggctcagaggttaaagcgtctgcccgcaacgagggagacctgggttcgatccctgggtcgggaagatcccctggagaaggaaatggcaacccactccagtattcttgcctggagaatcccatggatggaggagcctggaaggctacagttcacggggttgcagagtcagacacgactgagcaacttcattaaaaagttaacaccagg

SEQ ID NO: 47626 - DNA, 1478 bp, Bovine  19866881371105
  misc_feature (1)..(1): n is a, c, g, or t
nccacctgggggcaagagtcaggcgcatcatgaggctaccctatccctcttgccccttcttgcctccattctgccctggccctattttcaactgctggacaaagtaacttctctgatgctgtcatctcccacatccctcagagttgagagacccttggaggaaggaggcagggtgagcaagctgtctgcttggtcaaacctcacactctgaactgaccttagagggagactgcctgcccctctgccacaggacctcatgctcccccgaccctccccttaccaaggatgtttcacagagagcagagatcaactgccaaagtggtctctggatggagccagggtgactcactcaccagctgtgaggagagctcagggctgagccagagagggaagaaagaagagggctgccttattcccaaactgaatcagtttgggcgtttccccattacctgcctttttcttctttttttggccactctgcgtggcttgtgggatctcagttccctgaccaggggatgaacccaagcactcaacaatgaaagcgtggagtcctaatcattggactgccaaggaattccccattacctgcctttttaacagtcttttttgaatgagaggcctcagccaagctgtcatcgtctttgcggctccgggatttatcactgtcttttcggtggccctttaaatacaaatcaaatctaaatgcacagtcaatctgagaacacaagacaggaagccaaaaaggtgctttgagacaacttgtgaatcacctgccccagaggtttagagaaagtacgcatccatctcctctccaagtaccttggttttaacgagctgttgtacaggaaagaccttcctttcctgtaccctctaaaatacccatactcatggcccagctgtatcccctttcccacttccctaaacaaaagcactgaggactcagagctgggcacctcctggcagagagcttgggccacccgacccccaggtgccgcaatgggctcaagtgctgtacctgactcgagcacctcagcacatcagggctacctgcccgctctccattctcggcctgcttgctggcaatctggctcagcatcatcttcttgctggctgcagtgggaaccaaactcacacctgctaggccttcacaagccaggagacttgcctaagttgaaaggagatgaggtgtcaggtcacctggcagggcagggcaaaaacagactgccaatttccaaagaactaccttaaacacccagctactaacatgcggcttctctccaagggagcgttcctcctcaccacaaaaccctgcttccttcgagagtcctccctaactcatctcaccagggactagttattcattttgtcagctgtcagcattcagacacagactaagtgaataatcagatgctactgacgcttttgtcattagcactgtgctgggtaaaagggtctatctatacattactttgaagcta

SEQ ID NO: 47627 - DNA, 1613 bp, Bovine  19866881418551
  misc_feature (1)..(1): n is a, c, g, or t
ntatggtttcagataaggcgcctatcaaccaaagggccccttctccccccgcctcggcccttgtcccctcactcttcgctcctcagctctgccccaatgacctggctccactttctcagggaaggtgccaggccgggttttgcagcctggggttgggagcgggttgttgctcccttaaggccccagggcccccagcgctggaggacgagttcctatatgctgactggctcctgggaggcattgtgggagcggaaggagggaaatcctggggcagattggcgcctttaagaataggagtcccctgggaaccgggcccgcccctgtttttggggaaagcttggtggttccttggccttagggacccttgacttgacttcttgactgcctttagctagctctggggtcttcccagtgagtagtttagcagaggcggaaggtccccagtgctctaccctttcctttgatggactaacttgctaaatctgatttcctcatctacaaaatgggctccctaatcccctaaatccaagaggttttgcctattcaggcatataatacatgtaagagcttagcagtgcttggcctacattaagcagtctaataagggtaaatgttacaatcacttattttttataattttgggacagaatgagctgaggaagaaagggatttacagagatggatttgctggatctgaaccaaaccctcaagacaaacttcttttccaagtcctcctaatttaaaagaagttccaactttgggttaattaaaaaaaaaaaaaaagcattcctctttttgggaccagtttgttattctttcttaaaaaattttctcttccaacatagtttaatttcatcctaaaatctggattcctccaacccaaggaacctaggacctttgtgttctggacacgaaaacaggattgtggattcagggtagagtagggtggggttggatgtcggagaacacaaagagagggctgtggggaggagggtcttcagtttgcagacagatttacctagtttcttgctcttagagatggggcttggatagggcttgcctgagatcttctaggccattgcagggttgaggagacctgggctcagagaagggaagcgactcaagatcagtagcagcattaggctaaaacctaggtcttctggccagtgccttccagactgtagggctgaagtttccctgtaatctatgagtctcccaaagccactccaaataataatcatgattgtttgatatgaaccatctgtatttctttcaatcatgaaaagtgttaatcaaaacttggctacttttactgatgtgtaatatacaatctcagtcaataatacctatttttttcctgaaagtataacttcaacataattcctagatatctacttccaaccatgtacccccttgtctccttgcagcccaacactaatgcagttctggagacccagctgcttggggagtggattaagggaaaacacagtgcttgctttgtgccagactttgagctctggccctgatgtgactgtggacttttctgccccatcatacaggtgcggcacctggagcagcagaacaaggttctggagaccaaatggaacctcctg

SEQ ID NO: 47628 - DNA, 921 bp, Bovine  19866881459570
  misc_feature (1)..(1): n is a, c, g, or t
nagacccttagagagtgagacccagaaaccctctccctgggagacggacaaatcccaaaagacagacttgcagataagctcccctcagatcacacataccagaccatgcacacatacgcacaaaagaacgtactttgaagtcccttccggaaagacaaacccagagactctcagaggggacacaatgaccacatccctttcttccctcccctcttttctcttcccaccctccccaggcctggcctcctgccacacagaaccaggccgtacctgtttgtaccaggccctctctcagcccctttaaacaatgcttagttttccaaggagtgatttgaatgcaagctcccccctctccaacaaacacccacaccgagcagagctgagagactttgctttcctgagaccaaagggaggggtatgggcccggtgccaaaccaggcccagagaaggcggaaggagagagggagggactggtcagacaggtatggcagcccaggggagggacaacccagcagctccctgcttctcctcccccacactgtggtccacacagcggacctgggcacactcagaggggagagaccttacctaaagtcctcgcacagaactgcagcccagagccctcccctgaaatctcagctctcccacccccagccccagccacccggtcccctggttgcaggagtgccttttgtttaagatgaagacaaagcggcctacaaggactctgtggttttcaggctgtaagaaggcccagacctcacccaggggaagttcctctttgctggggcagcccagaacgatccagggtggaaagtgcttgcatctttcttgtcagctccctattgcccagagccctagccaacccctcccccatgcctgaaacccagacttggggtacaagagaagaggccagacctg

SEQ ID NO: 47629 - DNA, 1469 bp, Bovine  19866881468452
  misc_feature (1)..(1): n is a, c, g, or t
ngagcagtactggaaaggcccttggggctgggatagggagaagggtgacccggaggaggaactcccctcccacagctaaacacctggaacacttcgaggctgagagctttacagacttggggtgagatgggcgagtgagtcaggggcccccaagatttacagtcagaagcctccaaaatccctccctatcccttcccctgcccaaacccaagtgcgcagaggggccaagtcactagttggaaggcagaatgttgccagagtgggtggggcccagcaggacactagtgaggggctggagatgtgcccatgggtggagtgaccaagagaaagggctgggatcctggtccagccccaggcactgccagccacgcagaggggagccctcaccttgtcgatgaaggaggcaaatttgttgttgagggtcttgatctgctccttctcctgggtgcggacggcctggatgttgggatccacctccagcttgagggggcttagcaggctctggttcacggtgacagctgtgatgccccccaaacctggggccccaccgtagcttccagccatgctcatgccggtgcccaggccgccgcgaaagctgctgctgctgcccactcgggaaaaggccgaggagctgatgcgggagccgggcccactggtgtaggagcggctgctgaaggacctgggggcagaggtagacaccttgtaggacttctgggtcaccctgatggacatggtggaggctggagaggaggcgaggaggccgaagctgagtaggagtcgaggagtcgaggattcgagaagctgcttctcagtggggtacagctccccgatggccttttataaaacagagcccagcccatgaggaggggattggccttgtagctgagtggctagtccctgagggggcagggcctaacctgacacctgccacctacaggctggactcaggttgggggcagcagagagctgctcccaccccggagcccacgcctgcaccaccctggaacccaggaaaaggcaactctgtgaatgtgaaagagcaaggactctgccagcctctacaagctccctgtaacaaagcttgcccagggctgcccagccactgcagccccaaagcctgggtcttatctccttccctcccgtgggaaataaatgcacgcactggggaacacggccagcaagggacccctggcatttgagtctcctctgagcagccgatagtccaaggacaccaccctgtgttctttctttcctccacttcgtgtgattacgaaggtctgcccaggctggacacttgggttccaaatcattgaacctgaggtcaaccatttgcctggtctttcctcagttactgctgtgccctcagcccctggtgcagtgccaggaggcactgggaaaatattcttggaatgaatgaatgaatgaacacacactgtcttaactatggggctgtatgtgaaagttaaagt

SEQ ID NO: 47630 - DNA, 679 bp, Bovine  19866881539394
  misc_feature (1)..(1): n is a, c, g, or t
nctttatctctctagcttagtggtaactgaaagctactaaatgagcactttagtaagagaataattcctacgtatgtttgtgttagttgctcagttgtgtccaactctttgcaaccccagagactgtagctcaccaggcttctcttttccatggattataacatttgagataatttaatatttaactggatgtattcaacattttgcttgcgaatactttaatccactttaattggaacagtctggctgcctggtcaccagcatgctcacagaaaccctgattgcttcctcaggtgcacctggaagaagcagagtcgagtctgaagcttctggatcgcaccacagacacatacctgctcctctccctgacctgtgacctcctacgaagtcgactctgctgcgctcgccagaaggtgcttctcactttcttgatctccgaaggtcctggggtttggaaggattttaggattctccagacatctgtctggctcctgaggtttctctggaactggggagaacgttcctggccctgagtagcagagccatctcctcacctcaccttctcccaaggatcattcaccagtacttctctaggagccattccaccattttcatccttttctagctctctcgaggacaaggggcaaagtctgtccggtgactagaaattgggatgacg

SEQ ID NO: 47631 - DNA, 696 bp, Bovine  19866881567636
  misc_feature (1)..(1): n is a, c, g, or t
nataaagctgttaatacagtgcctggcacataatgggtactcaaaaaaatgataactagtgttgttactgggtttccctagtggctcagtgataaagaatcacctgccagtggaggagatctgggttcaatccctgggtcgggaagatcccccggaggaggaaacggcaggccactccactactgttgcttgggatgtcccatggacagaggagcctggcgggctatggtccatggggtcgcaaaagagtcggacatgacttagcaattaaacaacaacaacagcattgttgttattgttgttgttattaaagagggtaggtttgggcaagagaggaaagagagggcgaggcagaaaggagggaaagagtatgccagggatcagaaatagcctgtgggagacgagaggagagaaaacagtctatagaacagggagcaaggggctggagccaaagacagtggctaataagatacaccaaggggaagagggtctgctgagcacctgagggcctggcatcatactggggtcctgggtctgtacttttccccacagccagctacctgcccaaacctggagcccagatctaccagtttcgctatgtgaaccgccagggccgggtgtgtgggcagagcccccctttccagttccgagagccacggcccatggatgaactggtgaccctggaggagactgatg

SEQ ID NO: 47632 - DNA, 1503 bp, Bovine  19866881570586
  misc_feature (1)..(1): n is a, c, g, or t
ntttctggaagagctggtttataagcaccacctgtagctgggtgacccggggtatagccaaaggctgggatggggatggacggtggagagggaaccctccagagaaaccctgcagagaagaccagggaacaaaacccaccaggtccaccccacccccatggacactcagtagtttaataaagttcagaatgtccagggcttatgtgtaattaaagccaggagctgggtaattacatttcttctccgagttctacccttgacctgcttcctccccccacatacacacatcttttatgaaagacactgaactttagaaaatatctccactaaagagatgggcttcatttcagcaaaagaaattgagagtacactttgaaaagaatttcaaaggggaggtaagtgctagaacaaatgagaagtacaagcacacacgcacagaagtacatacccccaacaggaaaaggaaagcctgctcttgactgccatttcttttcatgtgtgattgacctccagatgatgtgtctcacatcatgcaccaaaatacagtctctctaaacaggacaataattcccccaacccctatctccaggaagccaatgattgttccccttggggtcatggctaccatgccagcagaagggttacacaggtcacaggcaagagccccaggtggaggcacctagcctggtgtcctatcccccaggccctccgtcttctgttttatctcaacctctttgtacctctcagcatccattctttgaactcaccctgtgaaccccgttctgggacagggaaagggtccaaagagaggagaagaagggctctggtctctggaatgtgagaagagagacacacaagacaggcgatccagacagaaaaaaagtgcatgtaagttaacagagtgtagccagatccttcaggtgccgatgggcctatggaaaggggagaggaaataaagagtgagactctaaagcaagatcagagaggagtaaatgccaggtttagaggctagaaggtgcaaagggcttgggaggcaggaggctgacgtgcccagtgggtatggagagaataagctgggaagacatcaaagatgcggatgaggagaatttaaatgccgagtacattcatagttataaatctttacaactgtacacagttgttttgcataaatttcattttattctcaataataggccacaggcaggtactggtatcgctattttatagacaatgaaattaaggcacagagaggctgagtaacttgctttgattcacagagctggtaagtggcagagcaagaaatcaaattgtgtgtatcaactcctgctggttctgcttcttgggcaagtagtaaaggagagactacctcccagagggcaaaagacctgcctcctggtgcccttctcagcatgttctgtgcaggagactctgggtaagttagtcaacttgtctaggcctcttgcgtaaacgaggaagtaatatcttacttctaagatagaaggt

SEQ ID NO: 47633 - DNA, 1495 bp, Bovine  19866881623692
  misc_feature (1)..(1): n is a, c, g, or t
ncccccagacacctcactcctttctgtagtatctcctcccaccccagaggtgtcccaggaccctctcccacccccagcccagcccatacctggcctttgagaccctcgatctcagcctggagacggttgatgttccggttcatctcagaaatctccgtcttcgtgcgacgaaggtcatccccgtgcttcccagccagtgtctgcagctcctcatactgcagatgtgaaatgaggagtgagtttgagacgggactcctggtccctccaaggaaagagtaccctcagccaagtcaccagagcccaggtcatctcacgcccacctggctccacacctctgggcctggaacatccccatccctgtcccccggcacgacttggcagccccactcccagcaggcagagtttgaaatctcgcttctccctcaaggaaggactagcacccggaactacccaaaaggggagcaccaggttgagcccctgctctttaccttgatttggtacatggcctcggcctcagcccggctgcggttggcgatctcctcatactgggccttgacctcagcgatgatgccatccaggtccaggttgcggttgttgtccatggacaggaccacggacgtgtcagaaatctgagactgcatctcacggatctcctgtggcaggaaggggaggtggtaaggccctggccccgcacacaaggagtccccttctgtagaagggccttccacaagggacaagacagggcgggagagaaggcaaagttcctaaagaaggaagatgggtcgaagacctggaacttggcgggaagtaaagatgaaatgaggccaggctaaaaagaaatctggctttgggtgagagaccagaagggcagagcccttccacgctctcagctaccagtatggcggccccagagggctcccatatgacccaaaggatctatctaaaccctagggacagggcaggtctgaggtagccaggtcaccactctgcagtatgtatgatgaccttggacagtctctttcagttctctgagcccgttttctcatctgtgaaatggggtaataaaccctccctcattcagggagacagaacataaaggacatccatgccaggtgactaatggcagtcagaattattccgggttgggcccttgtctgttggtgcactggcggggctggaaggagcctctgatggggccagggaaccccagtctccggcaactaagaacgtacctcttcatacagttgcctgtagaagttgatctcatcagtcagcccttccaggcgggactccagctctaccttgttcatgtaagcttcatccacatcctgtggggtggggaaaggggagccagagctgagtgcccactcctgattccaagttggggcctatacttagaactttctaattgccttcccacctcagcgatccagtccggtctctgccccaccacacctgcattcccagcccctttacctcaccttcctgcacattc

SEQ ID NO: 47634 - DNA, 882 bp, Bovine  19866881682228
  misc_feature (1)..(1): n is a, c, g, or t
naggcttttaaaaagttctagtctagtaattgcctgtatgaagctacttcctacagcttctaagctttgaccatgtgttgcctaacttatgattcagcctaattctcactcccatctgttttcagtcatttgctacaaaactatttggtctatttaaactggctcctttctttgaaacctgtcgctgcatgtctgagcctgaaatccagaaattaattttaaccttctctttgatcagttcagggcactctactgtttatttctcaaactgtgggtctcaaactgcttttggtcttagtacccacccctctacactcttaaagaggactccaaagagcttttgcttattgtatctacttgtatttaccatattagaaattaaaatggagaaaattttaaaatatttcatatacttattttaaaataacagtataaatgtatctatagttttaaaaagttggggagaagaacatcaaatgtctggctgatagaaaacatccatattctcgtatctgtttctgcatttaatctgttaacaatatgttgtttggttgaagtatctgaagaaaacctgtgcttacacagatatgtaataggaaaagaaaagattcttttcagataactgttggtaatctttcttctttgataactacatcaaaatctgaaaagtgatagcttcttaaaagtaggctgttgtatagaatcctgataccacatctgtgaacttttaacacccagacttatgttgcctcttaacaggtcttttgcccatgtatgttctgaatacccatgaaccctctgggagggtctcaaggacctgtaaggatccctgaggccctctttgagaaccacacttaaaaatacagctgtttatcatgtagg

SEQ ID NO: 47635 - DNA, 1375 bp, Bovine  19866880692323
  misc_feature (1)..(1): n is a, c, g, or t
nacatggtagggatgaggacagaaaccagctcacgtatctctgagacctactggccaggtagccgtgtcctccacatgcctcgcggcactcctggatcccccgctgggccgtccacgaggccaggggcttgccggcagacgacaaggcgtggatctcgcgtcccagctcggccttgggagggagagaagccaacaagatcaggggaagagaggctccgaccccggagggcaggggacagtccaagctcagcctcaaagacctacacccctccagtctgaccctaggtggctgacaactgcaatagcaggaacccagttttagcttaagaaacaggactcatctacacatgcataccctgcggtctagccacacagcttcctcgcactgaagataaaccaccgcggcggctcagtgggtgaaccctggtgggtaggctgatctgggaggaacacgcgtcatgactccgtttaaatgaagttcacagcgcgagcctgagcaacagctgtttaagctcccgtcgttcatggggagacgaggaggaaccccaagggatgggactgacacggcgccgacacgctgcccacacgctgcccccaggggagagggtggggggcagccccagagggctacaaagccctggccactcagggccccctgtgcaggcccggctcagggtccctagctttaacacacctagtaagcattctttctcttcaacatgatcctcagtaacaacagttacaatacaggcacgccggcacacacacctgttgcatagggtgatgtgcttttgcagcattttcagcttcacagaagcgctaccttgtaacccatgcctgggttgaactactttttctgagcttcaggaaaaaaaaaatagatcatggtgacacttgaaaacattgttaacaggacaattccattgtcagctggcaaaacttcagtgactcatgtttgagggaaaaaaaaaatgcattagctccacattcctgatgaaacggtccttggggtcacgtcagcctgactgtgcggctggctgtgcaccctgccagccccccaccccttcaccctccgcctcctgacgcctgggtgtctatgctggatattccaaaatgtgctaattcgatacaggcttttcagggcgtggttggtaagcccgccctctgtagcatttctgatgaattttcagatgcacttgcgctgtgacttttcgcaatgcccaggaggcagagtgaagcagaaaaaaaatcaacacgtgaggcgtccacacacagaaatgagcagaagaccctttctgtgcacaggggctgatctcagcaggtctgcacgctcgcatctggcacaaagccacgcctgtcagctcacatccagtca

SEQ ID NO: 47636 - DNA, 1333 bp, Bovine  19866880744032
  misc_feature (1)..(1): n is a, c, g, or t
nctctagtattaacacgccatggggatgctttgggaaaacgtctaaaaaatgctccttagaaggataacgaagacaaagtttcaaagaaactcaggtttaacctgtttccacccatcttccaggaatcagcccttcatcacctcctccaggaagccctcctgggttgcccgccatggctcagccctacgggcaccaccctggcgctgctgtgcccctggtggttccccccgctacccatggcctctgggctcatctgctccccgtgacgagcgctcagtgagccgcgtggaaggagcgccccacgcagctccggggcggggtctcacctcggtagagcagggcggtgtgctggctcagggaccacagggcgtagagggcgctgagacgccggagcacggcccgcagcgggggtggcacgcggggctggtgcgtgtgctcgtggaacctgcgcacgaccgtgagctccaggaacgccagggccaagggccggcagtggtacacctgcaacggcatggtgcgcgcgttcggggagggcacacgggggtgtgcgtgccggcagcgccccgggtgagagggcacagccagccgcggctgggcagcgcctctggggaaggccggcaggaacacaagcccgcctgcagcagctgctctggacctcgggcccagcgaccccgctcagctcagcgctacctgggacctgtgtgaccccacagctgacacagccaccaggggctcgcccgggtcgtcctggccctagggacgggggcgtcccctgggaggtgggctcccgagggcacaaggtcgcttctcttgcactgggaaccacagaggttttccacacgatccccagactcacctgaaagcaacggcagcccctcctggggcccggccccgccccgccccccaactttctcaaggaaacagcccctctctcccactcccatcacgtccggaacggagggaacggctccatggagggccagccgggttgcactcgcgtgtgagtcccgatgctggctcggtttgtggaagcaggaagtcaccacaggtcttctagcccccgctttttcttttttaaccaatagccaacacatctgctcatcattagctttgcttgccagcttttctttccccttctctagtttatcagtttactgggtttggttttttttaaattagaacaattacacatgcatttctaatttgttataatgagcatggttgcttttgaaattaaatcatccagcaaagaggtgacccgggattggggaggaaagagacccctattcaatgcctgtatgactttgccccagaattccttggtggctcata

SEQ ID NO: 47637 - DNA, 1946 bp, Bovine  19866880976977
  misc_feature (1)..(1): n is a, c, g, or t
nctggagctgccctggcctgggggcctagacccatggagaagctcccccgaggtccccttccctggtgcggtgctgtcccctcggttgactcgccatctgcctccaggacccgctggacgcggccgggtactaccagctggcgctggcggcggccatgggcctgggcagcaagcgggcccagatgaagctgtgcgcgcgcctggcctccatctaccaccactccctgctcgaccgcgagacgtccctgttcttctaccagaaggcgcggaccttcgccacggagctcagcgtccgccggggccgcctggcccccgggcccctgtcctgagcccagtgcttgcaggcacggcccccggctggcccagggtctcaggggctggcttcctgggaaagggacgcatgcggtcaaggggaaagcagcaataaatgtgtttttgtagagagccttctggagtccccaggctcccccgtcccgggactgcctcctggggagtgtgcggggatcaggccccgtccccggggggccgttccgctgctgcaccccatcctcgggtgtgggcgggtaggactgggggtccagccgtcccaggccagagtccccccagccggtcagctgcgggtcgtggggttccctgggcaccttctccctcccctataccctcaccgagtgtccagcgctggggcctctctgcttggaatgctcgaagcacacttcgaggtcaggactgtttgtctcctgatgaacggctgaagaaacggaggcacacagaggttaggtgcgttgcccgcagtcgcacagcaggtaggaaggggcagagagccagaggccagtgcactcacccctgcgccagcctgccagcctgcctcacatcatgtgccccgttaggacctgagggcagggacctaccccaaacatctctgcccctcgtctgtcacggagacaggagaagggattccaaatattcccccacctgggtgtcctccggcccagcctggccagtcccacctgcagcttctggtcagccgtcgggacacacggtggcagggcctccagcccaagtgacagccactgggtgctgagtgtagttgaaggcttatctggaccgcctaccccagccctgccccctctcccgtccctccccgtggcccgccgagggctgggaattcaggcagggctgaaaccggctcctgacccacagacagggtgctgaggctcggagcctgtgggcagccccacggcgcccttctgagattctcttttgatgacatgaaatgagcgtcgtgtgtgtgcccatgtgtgtgcttagtcgctcagtcatgcccgactttgcagtcccgtggacctctcgtagccctccaggctcttctgtccatgggattctccaggcaaaaacactggagtgggctccagggatcaaacccaggccttctgcactgaaggcagattcttcgctatctgagctgccagggaagcccacacatcacgtaaaacctaccattaaaagtgaataattcagtggtatatggtacacctgcaatgctgtgaaactaccactctggctagttccaacatctctgtgtccccaaagaagcctcctggaccaccgagcagtcatggcccctcccatctctctccccaggaccctcattaacagaaggaaacagagtcagaagacccctggtttgtttctgcacccaggaggcggagcctggaaggcccagagtcggggggaggtgggcaggggcgctccaccattctctggtcctggggtccagacccctgagccccaaagtcctctctctgcttagatatgcctgtatggctacccccgaccgcccaggcctctaccgccaggggacagcagagaactctccagaagcggcaggtcccagcagcagggccaacagacttccctgtaaccctgaccctgggctgccttctctg

SEQ ID NO: 47638 - DNA, 913 bp, Bovine  19866880981581
  misc_feature (1)..(1): n is a, c, g, or t
ntgcccgggagacccagaaggctcccaggatcaaggaaggagcctctcctggagctcctggggagggggtggccctgccccccaccttggtctcagacgtctggcctccaactaggacagcaaacttctgttgttcaggccccggtttgtggggcttcgtcccacggccccaggaccccaggccatctcgcattccagttaccccttgaaccagcccggctcttcttctctcgtctccagcacaggggctggtatacaggaagtgctcaatcaatgccctgcccaatgcccggcatccgtgaatgagctggccctgccccctcactctctattttcctcacgtactcctaactcccctcgtctgctttccgctgcacaggcaccaaatttaattagagaaacagcttcttgatcactagccaaaaatccaaggcttgcccatggtgcgtccttccccgaatcaggccccgatgtcctacttcattacttgtaatgaaccctctcgtttaatttctctgtgatggcgaaacggtgccaagcctgcaaagcgctcggagttaactggggcgtccacacgacggagcagactcagccgtcacgcacgatgaatgcacgtggccttttctgtctcgcctggagagctcagggtgagtgacaggcatgggatgctgaggctggatctgaattcgcagaataatccaggtgtgtggacccgtgtttgaaggagtgaggctccaaggagtgagtcacaagttattttcactcctggtttcatatggcctggttttaaattattgagtggctggaaagctcccacaatgaaatcatatttcatttgtttctccatttggctgttaagtgaatcaatttctgggctggttggaggtaagaaaggacagagaagcccgcacag

SEQ ID NO: 47639 - DNA, 1751 bp, Bovine  19866880995736
  misc_feature (1)..(1): n is a, c, g, or t
ngatggtcagaattgtctccagatgttgcccaaagcccggggaagcaaaatggccttggttgagactggcagagagtgtgcgtgtacccggggtcacctgctaggtgagggcccagggtggcttgatcagggatgggtatggctggagtggcagagcggagggccggccaggagcccaaagcaggctgggggccgtgggtgggaaagcaccagtcacctggggaccaaggcactgccaggggcctggttccaacctgggctgggacccggacccggagtgcaggaggaggtcagagtgtccggcgtccgagattcggcacagaagaagctcagaggctaggctggagggctttctggaaggggcgttatggcaggcgagcacttggaggtcaggcgtgggggcctctgacctctctatctctgcacctttcctaagggggcacggttagggttagagttcacccgcccatagaggagggcagaggggccaccagagctcctgccatcacggcaccctgcggcccagggaccctccctctcaggacagcccccagtgcgaggggcctctgtccgagtccacacatgcttgccgaggcctggaagcccatctctgggaggcggggcctccatcggttcatccaggtatccctggctcgcggtccggactgcatgcagtcagcgctcaatgcatgcaggaatgagcttcagggtttgttttccacatggtcacatcggctgttgtgtaatagcgtcctccttcaatgctggacgctcccctctgtcctgcccgctgtccctgccctcatggcatgggcctgacgtcccagtgctgcgggcacccgcagccccgcgcccctcgcccgggaggatgacgtctgtgctacgttctttccaggttgtgggggctgcggagcccgagatcaagaatggccagtccttggtggccttggacaaacactggcacctgggctgtttcaagtgcaagacctgcggcaaacagctgaacgcggagtacatcagcaagtgagtgggcggggccggcccacctgcggcgtggaaggggcggggctcctactgtgtccaaccggtgctcttggcctcagcctccaccccaagtctgcaaggcgagccccgccaggacaccaggacttggcctgtctgtcccaaaacacttgtcctgcccccccaccagcctggcttccctgacacagagacgctcatttctgttcaatgagccatggcgttagggctcccgcctttgacctaggggcaagcgccatccctgggtgtcgccctccctgtgggacctgccaccctcgctggtgcccggatccccgacgagcacaaagtggaggtcacccgaggctgctggccacagagccagggagggctgacaggctcaggggtcatgggtgcagctgtcctctgctgtagtgctgatgtggggtccctgacgggtgctcaggatacaggggtggctggtttggggtgcgtggggagggagcttgtacagatcagggtccgagcccctgctggttggccaggagggggctgcattagaatccccagagaccccagggacggcaagcctcccggcagcacaggggaaggaagggtcgtggagtgagctcacggagcagcttctctgagggcagagcggctgtctcctgccagtcaggggcgtttgggacaacttctatcaatggctgtgctggttcgtgatgctctggggaaacagaaccatcacagga

SEQ ID NO: 47640 - DNA, 1809 bp, Bovine  19866881055140
  misc_feature (1)..(1): n is a, c, g, or t
nctttctaacgctgctccttttcccctgcagtgtcggagccgcaggctgctcccagccccccggcagaagccgcccagcacggcgatcctgtgtaacacctgtgggaacgtgtgcaggggcgaggtgctgcgggtgcagaacaagtacttccacatccagtgcttcatctgcaaaggtgagcatcccggccgtccccaccgcggggccgggcacagcgctgccgtgcagtgagcccacgtccccagaaactcgttagatctgggctattggagaaactgatccccaaccttcctataccgacgtgatcttttcagcatggcctgcctgcatgccttctggggctgacaggagttcctgtctgagggggcagtgggtcagaggacgagctctggtcctgggtagcatcttcgatggctgtagccgtgtcagaggattcggatccactggccaaagtggccacctgggcccagagccacgcagtaagtggccattgctggaggcgtgagctcggcaccttggggtgcacggggccggagctggaccacgaacctcaggcacgccccatcctcaccggagtgagactgagaacgttaccacttgctccaggtgaaaatgactttttatctggctatacaaagtgacatgtatatgcactaaagtcaaatagataatttgatattcaaatatcagaaagataagagtaaaataaatcacatgaaatccccctgtttgaggctttctggagcatccttccagcctgcccttcctccctgcactgaagttagtgcatattctgtcgtgcccaaagggatttcgtgaatttacatttagtttcctgaaaacagggcttccctgatacctcagttgataaagaatctgcctgcaatgcaggagaccccggttggatgcctgggtcgggaagatccgctggagaagggataggcttacccactccagtatttttgaccttcccttctggctcagctggtaaagaatctgcctgcagtgcgggatacctgggttcgttcgattcctgggttgagaagatccctggagaagggaacggctgcccactccagcattctggcctggagaattccatgaactgtatagtccatggggtcacaaagagtcagacacgactgagccactttcactttcctgaaaagaaatgaaaagtagcatttgggggaagggatggacaaatcaaaccaatctgacacagcgtccagactcaaagaatttatacatgcgtgctaagctgctcggtcatgtcccactctttgcaaccctatggacagtaacccaccaggctcctatgtccgtgggattctccaggcaagaataatggagtgggttgccatggccttctctaggggatcttcccaatccaggaatcggacttccatctgttatgtctcctgaactggcaggcgggctctttatcgctgctactgctcagtcgcttcagtcgtgtccgactctgtgcgaccccatagtcggcagcccaccaggctcccctgtccctgggattctccaggcaagaacactggagtgggttgccatttccttctccaatgcatgaaagtgaaaagtgaaagtgaagtcgctcagtcgtgtccgaccctcagcgaccccatggactgcagccttccaggcttccgccgtccatgggattttccaggcaggagtactggagtgggtgccattgccttctcagtctttatcactagcgcccccgggaagtccatgtagttttaaagatttcttttagtgaccctgcaaccccaccttacctctgggcagca

SEQ ID NO: 47641 - DNA, 1262 bp, Bovine  19866881368218
  misc_feature (1)..(1): n is a, c, g, or t
ncggtgggactcttatgctggaggggagacgcagtcctgtcaccagcggggagaaactggctgggccaggggctgtggggcagggatgggatgggaccggcatgacccatcccacctgggagtgtcactacccaatgtcacttctgttgagtgacaagaaggagatgcagcgtctcgatggcgaggagagagcagtggtgtgcgctcgagggagccagctggctgggtgacgcccacaagcaggtgggacctccctgggggcaggcctcagccctgcttccctctgctccctgctgcctccccaagccccgggctgtgtcctcaggggacctgtcccctcctgtctgttccttctttaattcctgtgcgcatccaccctgtgctcctggactcccggggagcttgttgggggacagacagggtgggcaaaggagccaaacttggcgaattggcagtgggtggggggatgtaggcaggcgtgaagccaaggaggggacccccgccccaatctgtgcttggggaaggctcgctgaatggtgaactcgactggggcgttggcagcttggagctttacgtgtgctttactattcgcatgttggtcatcgtcttccacagggaggctcttctttaagccataaggcccagcatatgcttttttttttaaaatggggttccccttgccacacggaaataaccttccatcagctcttacctatacctccaaggtttcgaacagagaagactgaacgtgtcaaagagatgaagactccagtgtgcggcagtctctaacgtccattttttccctcgtgcaggaattcatcatccattcccccgattttgaagctgccaaattctgggttggcaacatgggcaagaccgctacccacgcagtggtgtttgctcagctgtacacgccggggggccagtgccacgggctgcacccctttctcgtccaggtaggggcaggtttcacccctgggggtggggaggtctggccacgtccagagatgtttttatcacagctgggggcaggggcgcttctggcatttcggggtgcagacgcatggtgcatacaggtcaacaccctggagcgcacaggacacccggcccccccgcccccaggaagaacgatcagccccatatgtgaggtgctgcctatgagaaaccccaactccaagctcatctcggggagagcctccatcctgctggatggcaatgcccaggactactagcagcggtactgaggggctgcagaagttccg

SEQ ID NO: 47642 - DNA, 1300 bp, Bovine  19866881426710
  misc_feature (1)..(1): n is a, c, g, or t
ncccgccggagtagtgagcaagctgggcaggcaggagggggagccgcgggctgttctgcaggaccagggccgcgctccggagcgcgctgcccagcgagccctgtgcccgcagcgaggccaccctgatgcagctcatcgccaggtgcggcaagcacctttggctgtagatgcttgccagcagcaggtagcagtccatgggccaggaggtgcccggggtccccgctgcctcggggagcagcagcagcagcctctccaggaagggcatggcctcctccggctgcttgaggcgggcgtggtgcttggccagcaagaaacaggcccgggcctcggcctgcgggctgcggctgctgatggccctccgcagggccagggtcaggaggctggaatcagcctcggagctgcccgacgtggccgggcgtccccaggagcagggccaaggccttgggcaccacctggaggtgcgcacttctccttgttcttctgccgcaggtggactgaggccaggctggtgtacacagccgccaccaggaccaggtccccaaagcggcccccgagcacccccagggcttcctcgaagtacacgcgggcctgggacagcttcagctgccgcacacacagccgtcccagcaggaagcagagcctggccagggccatgggcagcccagcttttttggccaccccacgggcctcagccagccacctgaccagctcctcctcgtcggtgaagccgccgaacacgctgctcagcgtgggcggggagaggtcgtacaggccctggaaaccagcctggaatcccggtgagtccaggaacagcagctgcgagcccagggcctctgggtcggcccagtcatctcctgtgtccaggcagaagaagggctcctcggtgtctggcaggcttgcaccactggacgccctgtggataccgggggaccctggttcctcggggcagccccggcaggacttgcattgttctagaacattcttcacagtctgcaggatctcctgtggctctgggttcaggcaaggtggggacatttctgcaaatgaccaaaatgcccggatgggtgagagtgggatctgagtccaggcagggcgggggcgtctctctcctggctgcagcgtccctgttgcctcccccataaggcttccctgggcatctgaggttgccgtgggctgctgggcacactgcagggctctaggggtgactttccgggaggacatggaggaggttagccaagcttctaccaactaacatgcctcaccgagtcctctcctctcggccacgtgccggaacccaaga

SEQ ID NO: 47643 - DNA, 1146 bp, Bovine  19866880659831
  misc_feature (1)..(1): n is a, c, g, or t
naagggaatctgaacttagatacacacgcagggaaagcactctgtgactataaaggcagaaatcccacttacaagccaacgaatgacaaaaacgccaaagatgtcagcgctccaccagaagttagaggagaggctgggaacggattctgaatcacagccctcacaagcctgctaccactttgatcttggactttcagcctttggaactatgagaaaatagatttctattgtttaaaccacttaatttgtagtattttgtaatggcatccacagaaagctaacatgatacccaaagaggtgttttgtgttttttttttttttaatagaaattcacattctaaaaaaatgcattaatctgttcaaattataaatatacactcagaaatatcctctaaataaaacatcctcagcatgacactacataaaataagtttaggagtttacgcacaggatagaatcactcttattacactgttttctcctctctaccgttttgaccaagaaataaacaccaactctagatagcagaacaattgtcatgaaaatgtctcatgcaccttcctatatcttacactgaagtgcctcccaaaaatctattgcaaacctcattagctgacgtttttccctctacatggggagggatgggtaaaaacaatttcagtccagtgttaaaaataatgatcctaatattcagaggtcatcatgaccataaccctgtcttagataaattcacctagaacttattctgagttttatcccagggaaagaaaggactgtgtaacacttagacctatctaatagtggatctttcctcctcaaaaagcacaggaaccgttacagcaaagggaggttgaacaggaactcaaacccaccaggggaactttgaattagctggcaactaactttcctctaagtctaaggtttatagttccataaagaaaatttaaatagtactgtgcttttttagggtggggggaagttaatcatgtttcttaaggacaaaagtttcctgtaaacgaatgccagttttcaaaaatctatttcgtttactgtgcaaaggccagttaattagtgtctactactgctaatggtaatgacattaacagcataatcaacaacacaagcttcagttgctacctagcctgt

SEQ ID NO: 47644 - DNA, 819 bp, Bovine  19866880886771
  misc_feature (1)..(1): n is a, c, g, or t
ntgatgtaaattctgacgtttctacagatgactaaaattctttagtttattcagtgggagatgagtgggcgtaggaggaaaaagcaacatcaaataagaatcaatttctgtaatagagaaagtgaatatttgggtaaatgaataaaatgaaagagcaatctctgaataaaaaaggacactctttgcatttataaatgagattgagcttataaataaaaagatacatcacacagtaaaataaaaacagcttttctttttgcagctggtagctttacaattcaatacagtagttttcacgtttttttttatgaggactctttttagctgtccaagattttgtagatatctacaactactagttaattgtacttgtcaatgtttgtgaaatgactaaagctacttttaaattactgatgcttcaaaatgttaaaaaaaataaaaaataaaaaagaagtcacagtagtataagcacaaagagtggtacatatttaggaagctagattaaagagacatgccaggcagtcgatcagaatgccggcctacaaagggcactaaagcaagactgaaataaaactaggttgcctgttgactcagattaaatttgacttgttaaattctcattgaattgtaaattgtccctatttctctgcttgaagaagataataacagcttcaggtaggaattttgtaactctcttcaaggctccctagccccacttctacttaacagatgttgttgttgttcagtcgctctatcacgtctgactttttgtgagcccatggattgcagcacgccaggcctccctgtccatcactaact

SEQ ID NO: 47645 - DNA, 2401 bp, Bovine  19866881058230
  misc_feature (1)..(1): n is a, c, g, or t
ntgtgtgtgtgtgtgtgtgtgtgtgtgtgtggctgctcctgctcgtgtgtgtatgtgtcatggtggtggggacgtgagggagagatatgaaaggttacgatacaaaagaaaaggattctctcccctttctcttagccaaacagtttaggtttaactgcccttgtttttgttggacttgaatagaaaaatgaggtattttaatcttctttttcaaaacatacagtcttatggaaatttaagtcaacagctgttcaactgtcaagtcacaggctaaattcaagtctgagaagagaaagaaatctgtttaaatgaaatcgtgtttgaatgaaggccataggtttccgcatttgtatctgaaaaaaaattaaattgttactaaagtaaagaatcttttcttgggatgacctttctttgttgaaaatgttagaaaatcaatattcaacataaaatcagaaactgaagtgtgtcaagtgtgggatcaccagaagtttgagggcattgaacaccataaactcatgaactcttcaaggtcagaggtttgacctaatacaatttccagtgtataggacgtgttctagaaaaaaatgtttgttggcctagggaacaaaaggaacagttaaagaaatcaagtggtcatttttcccccattttctaaaagtcttatataactgagttctactttagaaagattaatgatagttggcaggatatatagttgtgtgaaagataggcaattattatttgaatgttttttaacagttcagaaaattaagatataagctcttggtcaagagtgggaatagcctgtctcattatgatgctgattaatggattgattatttttctccatatatgataaaagcctgtgttcacgtgtgttttgcttgaaaaggtatgataagattatgtgagtttttcccagagtagactggctgcaagtctctgtatcctataaatgtaatgaccttgatgaaaatatactgatttaaacaccagacattagatttgcagatgcagaaaatcaatgatgttaatatactaaaacgtattatactcttgcaatgattcatactaaagagacttaaggagaactcgtatataaataacatggcaatgtataatttattatgctggtggtttctatggccaccttcattgtagatctatatcacatagacagagttggaatctgttaggactgtagtcattcctgttgagtcaaactctcagatcccttcagttaaatgacactctgctcaaaggtgttctccgtttatcactgctatcttttctgtttaaattggtcagtgcctcatgtgcaaggcttagtggtttttttaccctgtacagtactgttctccccagtgtttcctgaagccagatctctaccacactcttacctccaaaactttcccaccataatctctagaactgtctatctggcatcatgaaaaagccctatccttagcttgctcacttctttgccatacatgaaacttgaccctcagcagaagatagcactgtaacccgccctgttaaatgctatctgctcattttctcacacctgtagtcctgcatagtgaggtagtattaccatgctccatactctctacagtaggacttctagcaataagtactccaatcttttataaaactgatgttagagtgtgcacatacactctatgcacacacagtttcaactcacttaaaacttacatttcactgtacagttatcaccaccttatatcgacagcatcaacaaaaccatctggctcagtccctgttatttaccaaaacttttggtgactgtctcattaactttgtctccacccaaatcctgcttttccatgaaattaaaagacacttgctccttggaagaaaagttatgaccaacctagacagcatattaaaaagcagaaacattactttgccaacaaaggtccatccagtcaaagttatgttttttccagtagtcatgtatggatgtgagagttggactataaagaaagctgaaggccaaaagaattgatgcttttgaactgtggtgttggagaagactcttgagggtcccttggactgcaaggagatcaaaccagtccatcctaagggaaatcagtcctgaatattcattggaaggactgatgctgaagctggaactccaatacgttggccacctgatgcaaagagctgacttatttgaaaagatcctgaggctgagaaaaatttaatggaagaggagaaggggatgagagaggatgagatggttggatgacatcctgagtctgagtaagctccaggagttcgtgatggacaggaaagcctggcatgccgtccatgggctcacaaagagtcagacagactgagcaactaaagactactcagtaaatcctgcctttatcat

SEQ ID NO: 47646 - DNA, 659 bp, Bovine  19866881082712
  misc_feature (1)..(1): n is a, c, g, or t
ncacagacattctgttactttttactcactgaaagctgaggttgattggaaaagaaaccattcaggatagagatgagttttaatattatacctatccctgaaaccaaaataagtcagatgaaaatattttccaacataaacccatactttgtaggtcaggatagaaacctggaagcaagaaaaagtgctttattctatttaaatgaaatgttttctgagtttaaaaattttcatcttttcctatccaaatctagttataccttctaaattttatgctgctctttctaacaaaatttctatgttgatgatcattctgctgctgctgctgctaagtcacttcagtcgtgtccaactctgtgcgaccccatagacggcagcccaccaggcttccccatccctgggattctccaggcaagaacactggagtgggttgccatttccttctccaatgcatgaaagtgaaaagtgaaagtgaagtcgctcagtcgtgtctgactctagggaccccatggactgcagcctaccaggctcctctgtccatggaattttccaggcaaaagtactggagtgggttgccatttctagcaatagcaattattctctgcttggtttgggttgtccctttgtactttgattttcccagataaaagaaccccgta

SEQ ID NO: 47647 - DNA, 1588 bp, Bovine  19866881116798
  misc_feature (1)..(1): n is a, c, g, or t
ntcccaaccccacctagaagacttgatataatccacagattcatcgagtggtttatgctgaagcacaggtttgctcagtatgcactggcaaacacagatgattaaagtgagggaaaaaaaaaattttttttcaaatttaagataaaaaggatttatgttaaagttgcttatcctactcctcttttctttggaatcatttccagtcattgctgggtagagccatgagaagaattgattatttaaataggactttatcttcagaggttgcacttagggcaagatgaatattgaatatctcggtaatggaagctctccccatgggcattagagttttctttcaaagtgggttaagtgccatgataaatactctgagtacatactgcccactgtgtttttaaaagatgtgaacaacttgacatagaaaaccaataatacacatttgctacagattaatgcatttcaaccctttccaaggcctggatgcatcgcatgctgcttgaagagagtctcagtgatccacactgccccttttctcttttccttcctgtacaggttgttatctgggagaagatcacatacatttatgaagagaataacgtatcagaaatgggaaactactcagagaatccagtctcagctgttcacatatgtgctcagtttctgagtcattctgagtctcaggaaatgggcaaatatctttttcacagcaattttcagagccatttgggagcatctgagaggcaaaatgctattgtgagcatgcatgggaaggtcaccttgcagagagttagaaatggtaactttgaataaaactaaagaaggatataaaggaggaactggtttgtgttgtgtatggcatttatccctttccttagaccagcagataattttttttcaagtttggggaaatactatatttcaatattgtcaagtatatttatcaacatatttatatgcatctgagtaattcacaatgatttcccttcttccagacactggcaaatatagataatcaataatacccaatgactacgagcacttttctcaaaagactgtcctccattttcaacagacagcttgtcaaactaccaacaggaatgttcagtgttttagaaacagtgcttatgtgactattgcagattaacacgttgtaggtattagtgctattagaaagttgcaagggctgtagtattttttccctaaagagaaggcagtacaacagaccagggcccatccaagctgccatttgcatgcataaagacacttagcagctactttttctttatgcaaacccaggattctcagtattaagcagatatcttggggataacgggaataatttaaaatactgttaagtttctttaatacaaaacagaatggattttgagcagtaagaatatatatatgtataataaaataattcaaagatgattagaagagtcacgatttataaaagttaaaaaaaaaatgtataaaaggtcaacccctgaatattcactggaaggactgttgctgaacctgaagtttcaatgctttggccacctgatgcaaagactcagctcactggaaaagactgatgttgggaaag

SEQ ID NO: 47648 - DNA, 1868 bp, Bovine  19866881164998
  misc_feature (1)..(1): n is a, c, g, or t
ngttgcttcctgtcctggctattataagcctccaattaaaataaataaatttaaattaaaaaaactgtatatatataatcatttattataacagaaatatctcaacaagaaatgagatacttgtgcatatacgtaatttattccagaaatttgttactcagcaatagctagcaattccagaaaacaagtcagaatggctattgaaggaatgtctcagggcaattcaaactccagttgaagaagtcggtattcataattgtttagatcctctgaacacttatattttatctttagttcatagataaacaatccaccagaataatatttatggcctgtcttcttaaatatcccattttctcatgtacctgtcatcactattgtgctctttaaaaaaaaaaatctaataatgttcttgaagctgtatcctttctgtgatatccacagtgaatcaggattcaggatcctatttctaatttgcagtcttaatcaccagaaaatgcacaattgcttaatggagaatactagattttgatatgaacatctgaatgtcatcatttcagttttccctcattgcctggttcccaacaaatgttacagattctctgatgtgtgtagtacccagtaaatcagtggtgtggcttactttatattggaaaggctacattctctctgaagtttcaagagttgagctaaatattcgatttttacatttgaccctccaaatccaaagcagtcttaaaataaatgtgaaatgaaacaaactaacaacaatacaaacaaaaactttctgggaaaaataatatagtggattaaaattactgagtgagagcacacattcctggcctcgtatatagcttctctttcctctactccagaacacacattcctttcagcataaatctgtctcctctggttgaggaaggatttagtctccagagcccagaggaaatcctgttgaattttagaacctgaagggttctgtaaattccaaacagaaatttacacccctcagccagccaatggtccatccggtagagcatcctgcttcctactgtgtctagtgatggatggtttaggagatggccaaaaatgcaccatgatgcacctaattgagaattattgcatcgccaaaaaaatttcttctttaactctggtggttggttagtttatttcacgatgcctgaggcctgataactatttatctctatactccagttatagagaaactcttattttcccttagaacaaacacactattaaatttctcaaaagcatctaatctttaattgaatcttattaaccctctttctgattaataactcactgtagagtgagcaagtaatcacattccaccttttagcttgacttaaaaacttccaagccaaattgtatacataaaatagctgtctctgtatattataggtttcttaatataatacttcttaaaaaaatagagcccgttggaagtcaacattaaaaatgtactcttgtaattaggcacagaatgtattattcggtaattaacatacaaggagaaaaagttcaatgcgtgacttgtgaacatttcagatgcagactgtattatttgcttagacctttcagaaaccccatatttctttactaggagaaaattgccactgagctaaactacattaatatgaaatatgtgtaacaatgtccttgcttggaaagtactaacaacgtgttaacagttttccagggcactgtggacagtggtttttttttttttttttgacaactaggctgcaaaccactttatgcaactctatatttcttccttaagctgctggtgggaaaactgttagtaaacaatctatgtcatcaaaggactcggcacactgtcatcg

SEQ ID NO: 47649 - DNA, 1371 bp, Bovine  19866881237151
  misc_feature (1)..(1): n is a, c, g, or t
ntttcttactctaagaaactcattcatgaaacctgtatttgcagcttagccttgatttgatttttgatgtcaaaatgaggttccttccgttcaggagttcttcctgcaaattccatacaatgatatgtgaattttatgtttaacatggcacttacatatctgggatgtcagcttgccagcaaaaacccaatatgaaatcttgagtatatttaacttgaatcactcatggctgatgcagtgaagatctcgggctggtgtctttaatcaatggttatgaataacatgctgtatcatacttcagtgtaactcagttgaatgccgaagaaacccaacacagcacaatgcattgtgagttgctcagcaagctccaggaatgtgagagggtgatctgttttgtgcaacatgcggtccttgtgtgtgtgatatttcatgtgtttgttgttggtgtgcaaacctaaccacaggagaggtgcacactgggcccatgagaagccttcggatgagaagtgtctattgcagaatttcaagtcacaaaatacaactatctgtaggttaacatggtgaacaacacccaagtcagaagttcttgatttagatttccttggtaactagatcagaactaggatagatacaaattgcttttacagaatctcctcaaatttcacccattttccctctctgtattatttttccatttccttttgggaccaacccgcagcattatccccttataatttgatagagagaataaatcattctaagcaaaattaagtggtgtaattctatgtactgtaacaaagcacagttgttaagactcactctggacccgggttgacttggtttcttatcacttttgctgtgtgacttaatagagaacaaccctgactgcatattgaatctgtccctttagttctaacctctgtgctctgcttcctgtgcttagtcctgctggctctcaccttttgtaaaagaacgttgcctataacctgaaatatatatgacagcccactctcaagtctctaacctttaaaggtaaggaaagggaattggcaacccactctactattcttgcctagagaattccatggacagaggagcctggcagtctacagttcacagggtcacaaaaaattggatacgactgagcgagtatccacaacttttaaaggtatcacaattttccattcagatggagataaaaaaaattatagaacagagaatgatatttgtcttactgggtatttacaggaaaattgtgataagacctacatggacagctgcaagaacaaaggattcctgcacaaaaaagtttgcaacaaccagtcccaccccttccccttttagtgtaaaagaagcctgaattctaacttg

SEQ ID NO: 47650 - DNA, 1469 bp, Bovine  19866881323207
  misc_feature (1)..(1): n is a, c, g, or t
ntggttttggggcttgagtatgtctcaggaagagacaggtttttttttttttaattgccccagaatatttctggtactcagattgaacgtatgcccctgtattgccaggccttgtttagaggagtagggacagggtggctttgtaacactggccttttcttctccatttctgctgtcgttggagtatattctttgcagacttatggcttcaacctgaagatatattgttcactagtatccaaactcttggtccacatgcgactcccctttctgttgcagttccaaaggatggggtgcttgcaggaactttgtaacatgggcttacttctcccgagccacttattttttattcctcttaattttagattccttttgaatgtccccccttgtttgcctgtactttcttcttgaaagcccctctgctaatagtgtcaagcaatgtcgtttccaatacatcatgccctttcattcctttgcaggagaactagggcgagaggtggttagcaactgttaggctccagccattggaactaaagaaagcaactgcgatgctgccatgaaggggctttcaccaggagcatgtgcgcggttgtgagcaactgtaagctttctttaactcttaattacccccacacaaaaggcagtgtttgctctcatgtgcatgggatttgcccgcctacttttcatgagtgttaatgggggtctctgtgtataaatcctcttccctgcccccagtatcaacggtggcctagatgccaaggggggtttctgcagttttgctcactgattggtttcagatggaacacaaaagcacatctctgagcgtgagcacgctcaccctccacgcactctgtgcttcaggccttattaacactcatgggattgcttgtctcatttgctgtccctggagtggccagaagcgcccctccgctgtgccccacttcattccctcccaagccattgaaaagcactgtgatttttttctcacatcagcttgacttactctattgtccttgataaatgtacatgaggataaggatcagaagcaaaaaaaaaaaaaaaaatcacaaatccctctcccttagattcccccaatactcagtgatttcccttcatgtcctccaggtccccagttccgcttagatgtcctaactctcctcgggctgttcactgagcagtgatgccatcttaacgtactcttctgtcgccaaatccacccttgtgctttccaggacactcatgcttataccctaattagttccagggttcctggaatcttcccatcctcacccaaatatttagctctcagtttgtcagactattattcattactcgctaggacctgaccagctttccattaaccatacacagaactctctccactgtcatttcttgaatctgacctcctacatgcaatgcttttttctttctttgattttggtggggggcttaaacctgagtaaacttat

SEQ ID NO: 47651 - DNA, 582 bp, Bovine  19866881436514
  misc_feature (1)..(1): n is a, c, g, or t
ngtaatccgtacacttaaaaaaaaaaaaagatgaaattgggggaaatgtaccatggttttcaattgctttcaattaccattaaacctttcaaagaatgatttgcataatgtttcataaacatgtaggcagattaaccttttttagttaatttattcattagcagtaaaaattcaaagcaccacttatgagaaaataatgtcttgctgttaaattacatggaaacaaagcaattgggacatacatgcctaagttcacactgtgtcagagcacaaaaaaaaagtggagaggggataaaaaacccacaactttgcctgttagtagagtgttgattaaattgccggtttgtgaacaattagtagcattactagaagattaggtgaagtattaattagagtcaggccaaatggtttctgaggagtaaagatacttcctacgctgtgctggaggtaatggaaggcagtcctgacgtcctctcacctatggtctgtagtaactgccggaccctcttgctcagggctgagtcagggtgtacatgtgtgtgctgtttggaaagccgttttttaataccctctggctaatta

SEQ ID NO: 47652 - DNA, 1549 bp, Bovine  19866880195713
  misc_feature (1)..(1): n is a, c, g, or t
ntatggatgtgagagttggactgtgaagaaagctgagtgccgaagaattgatgcctttgaactgtggtgttggagaacactgttgagagtcccttggactgcaaggagatccaaccagttcattctcaaggagatcagccctgggatttctttggaaggaatgatgctaaagctgaaactccagtactttggccacctcatgcgaagagttgactcattggaaaagactctgatgctgggagggattgggggcaggaggagaaggggacgacagaggatgagatggctggatggcatcactgactcgatggacatgagtctgagtgaactccgagagttagtgatggacagggaggcctggcgtgctgctattcatggggtcgcaaagagtcggacatgacatgaactgaactgaactctgtttttaactttaaaaatccatatagacaaaaaatacttattgttgaatttttgacacatttattgttttttggatgtggaatattttttttaaactattgaatttgttacaatattgcttctgtttgtggtttttgtggtgggcacaaggcatgtgggatcttagctccccaaccagggattgagcctctaccctctgcattggaaggtgaagtcttaaccactggaccaccagggaagtcccactggcactcttctagaataattatttgttgtctctcctgtggcttaaaaatagctaatcttccctggtagctcagaccataaagcatctgcctacaatgtgggagatctgggttcgatctctgggtcaggaagatcccctggagaaggcaatggcaccccactccagtactcttgcctggaaaatcccatggacacaggagtctggtagataacagtccatgaggtcacaaagagtcggacacaactgagtgacttcacttaagttttccttgctaccaaggcacctctccatccataatcagaaactcctaaacttctctattagttttgctgaaacacctataataagctcccaacaatgtctgcccaatttaaattgcaaacccatggagcaggcaccaggaataatgctccattgtctgtagcttaccttgagcagacttgcagaataccaagccttactccaccccctttatcctgcctgctttcgtgctctggtccccttgctcatctagcactttgcaccttactgggaaagtaaggctgtagccaaacaggtgaacatggagctttatttagagtttatctcttctgttttaactccttagagtctgatttctctttctacaaagcatgcaaacttaggtctgaatgtatgctctcctgaaaccagaaatgtgtgaaactcatcaagtcaaaccagtgctgtcactgatctccacctcaaacctcaggaaaccaagccaggcatgatatcttcagcttttatcttcctttccttgcctgacctgggaaagttgcagataggatgcatctaaaattggagtttaagaggaatattttttcaatgggcttttactgggcaggaaatgctatatcttaa

SEQ ID NO: 47653 - DNA, 2954 bp, Bovine  19866880423182
  misc_feature (1)..(1): n is a, c, g, or t
natacatgtagaaggagatcttctccctattgtctttggtattggaacatgaaagacgtatttgtccatctccctactttgtctgtaagagagtttaaagcctcagacttgaatctagatatgtagaacagcaggggagatgatgcctattagtgacactgtcgttgttaagtatagtctgaaccttcactttatttatgcacacactccactgtcatttactttgtgcctttacaaaagtaattgaaaaaaaatagttcttcaccagctattgtagccttttgtaaaagtacctttgttaggatatgtcacaaaccacagtgtgtagtactggaggccatgataggaatgtgtggaaatagcttgatccccaaaggctatctatagactctaagggaaaaagagagaatgttgtaagaagtcaccacaaaccttcctttaaatcagcgtttggggtagtgaaagcacatgaattttgaaacaaaaatgttatttccttactcaaagtttgccatcacctcctccatattagagaaaaggaaagggaaggagagagatggaagggagagagggggaaaaaggcaagaaaaggaaggaaagaaagttcaaagggaaaagagagagattatgcttctcctggcatgtaaaatacttctactaaaatctttagatgttttctgtttttttaaaaaatgttgttttttttcattatacaatcttgaaagtttaaaatggactgatttaccgtaagaagcattaagtaaatgcaatttctatttttaataaagatagctcaagtttcatgtgagatcacaccagccctccaatgtaattaagtgtatggctttctaatgcatgttaagtacccacgatgggtagttaatagaattttttaggtaagagtcaggacaccactacagtgagactacagtgggatgatgttggtcagtaaaatagtggccaccaagtaacggaaattacaacatattttggtataatttgtctaaaatggttcatgacagagaagtcaattttagctgaatgtccaaaatgaaaaagggctggtgtgtttgaatgaagaaaaagggtgtgaaggaaagattgtactttgtaggctgtagaaactctctgcactgcacaggtattcctagggggctcaaatgtatcattacaggagggagagtgtgcttgagattagactaggagttcctagagcaaatacgatgtcccatgatttcttttaacatcagaaaaaaaaaataaaaaacccacaagtagaaactgcaggtgcttcctttttattgcacgatgtaaagagaaaatgtaaaacggacaagctttcgacaatcatgttctcttcatcaagctgttattgttattttagtgagtccactaaaaagaattatctagagcttcttgtttttacttctttgtgtacttgatgaatatgattaccatttttacctcctgtatttaaacccctctgccataatcccatattctgcctaaaagccatgtctgtaggagctgtctccccttcactggaatagtttttagggatatgactgcatttaagcaggtgcagtaaatgcacttttggtgatttttcactgccgtgtgtaagtgcaaaacatctgacataattaaggtacgattaatcgagactattagtaaaataagcttgttttatgaatgaagacctcacactcattcagcatagcctttctttgacaaatgcactgcattcacttatgtagcacagctttgtatgcctgggaagtgaataaacatttgccaggctaccttccagagttttccattaactgtcttcaaattcccttcttgtgttgtgcagagggaacccggttttatttttaaatagaacaaagggactggcccagaaccacaagggccagtgattgtcagaatcatgagaaatctttagttacttttggccctgaattgttcttattcttgtgttttactcactttagaatttaaggcatcctattaaaaatggccaccatacaagagaggaggcagtgaaggaaaataataaagaacagtggcaagtgagttgatgctgtataaataagcgcatttgctgtgtctcttttctgcagtttttatgtctcactgatgagagaactggtttgagatgtaaattgcttccctttgattgaaccagggaggagatgtcatgtaactcatctcatcagcatagagcattgtgcgcctttggtgaattataggataacacagctaggaagaattccttaacctctctctgcagccctgttccagtctttaataaccaccaaagggaagtacttcccttctgttcacctgactaccttctgtggtttgagctcgtttcttctgatcctgtccttaaatattctgtaaaggatcactggaaagtgccacggttttaacttgccatgtatatcctgtaaattagaatataaagttctggggaggtttttgctttgaaacgtgagaacagggacaagaaatgaactgaagacagtatttcccacaatgtatctcacttgtctaggtttagggtaaatccagaggggcagctctacatgaaaccagcaatgaagtaggagcagaggtagaagtggggggtaggagctccctgtgatctgcatgagattgtatgctgtatgagcaaagaattagcaaatggatttaaaacaaaagaattgaaaataggcctgcaatccatctagcctggtatctcgaaaagcaggacttttttttttatataagaaattcagggcagatatcacagccgtatcatgacagcacggcctttgcttcctccccttctattaaatctacattttgaaggtggatggtgctgactcataaattaaattggagtaatacatacagcgtatatatattttctggcactttgtctcaaattaaacacgaaccttctt

SEQ ID NO: 47654 - DNA, 1323 bp, Bovine  19866880470408
  misc_feature (1)..(1): n is a, c, g, or t
nagagctgtacagaaaacagcaaccagatctagtttctcgcatagtttcttccaccttgaacttcataccttacccctttggagcaaaaccaggatagaagaggaaatgaagaggactcttcttgaaaagggaagaggagttacaaaatagaattactgtttggaactgggccattgccctctagtgaaaactgtcaagggaacattaaaggccacagatggctcagacttcacttctgaacatcatctggaagatacagtgaatccaagaataagagtgtttaggaaagaatccaagaagtttggacactagtatactaagtatacttgagcaaaaaaaatcagtttttatcctcacttaagtgaaaagaaacttaattcttagcttaaaaaaaaagactatatctttcctgtaggctctataattcttctatgttctcattgtagtggcactagaaactgattgaatcatatatatatatataaactgaagtttgttttactaaatatgtcttatcaaaattgttatttttaccatacttgggtatattataaaaatccactcataaagggccaaaatcatgagaacaggaaagtcaatagaaaaattaaatttcccataatctaagatttccagatactaaaaacattattatttttctttatctttttgttattacctcagaaagtgtcttgttaagctaattatcttttccctagactagacccctgactcccgtactcttgcagtatctttttggagagacatcagacatatgagtcagttatcaaactcataatatggaagtaactgattactcttccttccctcataaaagccacactatcagttaccaaattctatttgcagtattttatacatctgtcttttccttcttctgccagcctttctcaaccagagtttcagaatagaaccaagccttaacaccccttaatgccctagagttcctaattgtacataatgaattaatctccttccgatacatctagcccatactagttacacaccatccttggcagaatggagaaacactcaaatcattttttatgtgctctgtggttcagatgagaaaccccaggtaagaaaagctggatggataatcaccaaaatttcttgcttttttggcatcacctttgcatactctctgatggttaatcttactttttactcccctttttctcaaaatttcagtgggtggtctttgtttagagcattaattttaatttatttatttatgattggttttcatggcttctcagaatctggggccaatcttctaatcttgccttacctcctattgg

SEQ ID NO: 47655 - DNA, 1091 bp, Bovine  19866880486463
  misc_feature (1)..(1): n is a, c, g, or t
ntggtgattgcagccatgaaattaaaagacacttgctccttggaaggaaagttatgaccaacctagatagcatattaaaaagcagagacattactttgttaactaaggtctgtctagtcaaagctatggttttcccagtagtcatgtatgaatgtgagagttggactataaagaaagctgatcgccgaagaattgatgcttttgaactatggtgttggagaagactcttgagagtcccttggactgcaaggagatccaaccagtccatcctagaggagatcaattctgggtgttcattagaaagactgatgctgatgctgaaactccagtactttggccacctggtgtgaagagccaacttatttgaaaagaccctgatgctgggaaatattgagggcaggaggagaaggggacgacagaggatgagatggttggatggcatcatggactcaatggacatgggtttggatggactctgggagttggtgatggacagggaggcctggcatgctgtggttcatggggtcgcaaagagttgggcacaacggagtaactgaacaacaccaacaaataagtaacatttatatggtggatgatgataagtgccatggagaaaaacaaaaataatgaaagttatggggaatccaaggatagattgaggggtggggctgtcacagaactaattggtaatctgatacttgagcaaagccccaaaggcagtgaggagactaatatgaaaaggcaaatgtataggataaggtcctcctctactttcacagcacagcataagacaggatttttttggctgatgtttcagacatggattgttggattccagtatgtctgtttctccaaacagcggccacccccagagcagttgcagtctctacacattagtctctcctttttcttcctcctactttctcattcaaactctggctcctctcactcctctctgactcatcctgctcttttattcttggtcataattctgtgttctgactcattcagttctaatcactgaaaatttacttcctgtgtaaccagcactatgctaagtaagaggaaagattacaaaatagcccaagatc

SEQ ID NO: 47656 - DNA, 1288 bp, Bovine  19866880555125
  misc_feature (1)..(1): n is a, c, g, or t
nctttctctaggtcttctctagcctggatctgccatcattttgttagttgatttgtgtgtatttctcttggttttcctaagaacagttccatatgtgttaaaggtggtagagaatatttaaacacagaaatgctatggtgtttatcagtcttggtatgtggttggactgcttcatcttttcctatgtacttgtaagtattttactctcaaagaaagagttatgttcttttaattaactagcaaatattttttgtattgatccagaagacgtattttgtccactggtcttcatcctagcatcactggacctgtaacaccacatctttgttcatgtacctattccatgatatatggatagtgttgctaggaggcactcatggagttcgggcagtggtagataacagaacagacactgagaacttagagctgtgtgaagtcccctaatggagcatcccaccttaaattctgggctctcattctagtgctagcttactgtaatacttggtttccatttgcacatgtgtctcatctattacattttcttgtctgaaagacgcattttaaaatagtagaagcagagaaagttagaggcctaataattattcagaaagcagggttgatggtggcagggagccagcacaggatgagccttgtgagcacttctatttctccttgagtagcggaaagagttcaatcacattcatcaaagattaaagtgctttgagctgcccctccagagcatttggaaagagatgccttcttctgtctcatctagggaaccttaagtttttccatccatctattaattttctacatctggcacagtttttccaactttccaccagggcttcttcttaaacaaaactggtcattcgagacattcatttttcctcctttggaaaagctttgagatgcttgaagggcaggaagagagaaatatagggtcactctgcaaaaaatgtgaaagtacattttgtttttagaacccctgatcttctgttctttttgatgtatctattgaaatggtcctgaagattaaatagaaatgaattgtggccacaaacctgactcattcaacactggtcaaaagcatgagtctgaatcaggttcaactcaattcaacaagtattgattgactgcctacgatgtgctatcacaaggttagcaggctaaaaagcagaaaacctacagagaggagagtgattaagcccctttctccggctgtacttgatgcttttttgcctgaatcttgacttacacaacttaactcatgaattacagaaaattt

SEQ ID NO: 47657 - DNA, 1472 bp, Bovine  19866880605326
  misc_feature (1)..(1): n is a, c, g, or t
naagatctaacaggtgcctgtttcctgtctggatgatagcatctaatttctgggccaatagcttacttgataaagaatttgcctgcaatgcaggagaccccagttcaattcctgggtcgggaagatccactggagaagggataggctacccattccagtattcttgggcttcccttgtggctcagctggcaaagaatctgcctgcaatatgggagacctgggttcaatccctgggttgggaagatcccctgagaagggaaaggctacccactccaatattctggcctggagaattccatggactgtccagttcatggggtcgaaaagagtcggacaccactgagaaactttcactttcagggccaagatcaggatccaaggatgattctgtgcaggtgagagttgaaaaaggaaagcaacagaatgagtactctgttatggaaagaaggatgttccaagttggggaaatatcaaaaatagcagaaggaatttttttcctagtgttctgtctcatgtatatgctatgtaagcagaaattatctgaagaagtaacaatttctatcagtttacaaattctggcaggctaaattaaccctgaagatgaggacaaaattaccttcaagttcctatttataactttctatcccctaaaaggctatttatatagcttatatgtgcaactgacttgcatcctttccaaatcattctattcaattgtgaaatatttggaatcaaatatcattggttttcattttgttttaaggggcaaaaagaatgaactaacctataatcacaccaacggcaagaataagaatttaactccttcttttgaaatgaagagacaaataatttagccaagagcttccaagtttaatttacaaaccacaaaaatctataaacataaattatgtagtgaaaatttcacttattcttacttgaatataattataatctcttgaatatcagttttaacaaaatgaataagagtgcaatagagttcagatgaagcttatttcttgcacaaatccatatgaatgccaaataccttccaagcagattgtctagccacttagtataaatgaatcctcttgctttctatttgaaaaacattcctcatattgggcacttgcaactaagttacagtctccctcatcactgcttagcagtgaacagaactaagggagatcgactgaaccctttaggccacatgagtactaacagtggaccacatgtattatgcttctctagagacaagctacaacagtaagaaagattaggtgtattatgttttacctatgaatcctgatttacaagatggggaaaggaagattgggagaaagggaactaatatttaattgcaccctcttttgggctaggcacttagcagatattttacaacttaatctaatcacaatcagatgaggtattaataccatgcaatacaaaaagaagaccataaagaaggctgagca

SEQ ID NO: 47658 - DNA, 1278 bp, Bovine  19866880640284
  misc_feature (1)..(1): n is a, c, g, or t
nacacacacaaaacatgcaggtatatatgatgctgctgctgctaagttgcttcagtcgtgtccgactctgtgcaaccccatagacggcagcccaccaggctcccccgtccctgggattctccaggcaagaattctggagtgggttgccatttcctcctccaatgcatgaaagtgaaaagtgaaagtgaagtcactcagtcgtgtttgacttgtagcgaccccatggatcgcagcccaccaggctcctccatccatgggattttccaggcaagagtactggagtggggtgccattgccttctccagcaggtatatatagttatacatataacatgtaaaatgtatatctacaatatcatgtgtttattttacttatataaatttctggtaattgttcctagtgatttggatgctaaaatataataaactaagttttttcttatgagatatacctatttaagcacccatatatctagacatccttgaggtgcttataagactctatttgactgtgtatggtcaagattgagtaccaatatagtgcattatcttataagcagtcatgtcccactctttgcaaccccatggactatagcccatcaggttcctgtgtccatgggattctccaggcaaaaatactgtactggtagcgatttccttctccacattatcttattacttattagaaaaaactttaatggtctaattaatgttttacataatataagaatgttttagtatatttaatttaaaaatatatgtatatagttatagttgattttggttattgagaaaatggaattgctggaacagcacttaaataaaatgaatagtactgacctacttagaaaaattaattatgaaagaaaaaataatggattagagtttcagataatggttttggggacgctgctggttgaaatccatcccgaggcttatttataattggcacaattagagttttcgagaattcagcagctctaatttatttacaaaaattcatataggatttgagttactgggggtgtgggggatggagatgggtaggagactcactatttacatttaagttctacagtatctcaaattcatgttttgggggagaattatctccaggcaaagggtaccaattctttaactgagagaatttattatattgggtacttatatcaataaatgtttgtattagatcagatagcaaaaattgaatatgtccttgcacttaagactattttattttctgtgttgtctacaaactgtctccacaatttgcatttga

SEQ ID NO: 47659 - DNA, 909 bp, Bovine  19866880649567
  misc_feature (1)..(1): n is a, c, g, or t
naatagataccaaaccaaacccagatattttcatccagggaaggctgcgaggtcaatgcaaatgccaaagtgtccacgagaaagggtagggttgtgatgagtgaggcgtacgcccatttgggagggtgattgcttaaaagttacttgggagaattcatcatttgcatactacctagattcaagtgcataaatttctttaacaaacgataaagatttcttcagagaagttgactttgtcatattaaggcaaagattttgtggctggtaggaaaggctcatcaactcctaaaactgtatactccattaaagtacatacgtgagacactggcaaggggtttctgtgtgtcctgaatacaaaagaactattaggtgaagtatctcctacactggtgcctcttaaactgtgttgtaaatagcacatagggatcttgttaaaatgaagatctccattcactttagagcctgagactgcatttttaagaagttccttggagatgtccatacctggatgttggtgcatggccacacttttagtattaaacatggacattttaaaaggggaaagaaacattcagttcagctcagttcagtcgctcagtcatgtctgactctttgcgacaccatggactgcagtacgccaggcctccctgtccatcaccagctcccggagtttacccaaactcatgtccactgagtcggtgatgccatccaaccatttcatcctctgttgtccccttcttcttccaccttctatcttttccagcatcagggtcttttccaatgagttagttctttgcatcaagtggcctaagtattggagtttcagcttcaacatcagaccttccaataaatattcaggactgatttcctttagaaggacggtggatttcctgcagtccaagggactct

SEQ ID NO: 47660 - DNA, 2501 bp, Bovine  19866880663764
  misc_feature (1)..(1): n is a, c, g, or t
ntatttggaacatgattgtatgattttacagcatttggagaaacagttcatcacattttcctaataagcaagggagaagagaagctgactacagaagttgcaaaaacaggagggaaaagatttttctgatgtccctttatccttctactgtgtgctcagtcgcccccaactctgcagcccagtggactgtagcctgccaggctcctctgcccatggaattttccaggcaagaacctgtagtggtgtgccatttcctactccaagggatcttcccgacccagggatcaaacccatatctctggtgtctcctgcattggcaggtggattctttacaactagcaccacatggggagcccccttgtactagagttatatgcgttagtaagaaggcacgctgctttgcctccacacacatgacaggctagaaagggcccttacgtctgaccatggcattatgctatagctgcattcgggggtcctcacagtgctgctgttacattcctctttggctttatgggttaaactggagtgcaaagtagaaattggcccttagctaaatataactgcagatatcgcttgcccagttcttggctattctagtagggtttgttgctggatcacaaaagtataattaatgtgcctctctttccagctgacagaagttacctttaaagaactggtgaaacatgtttcttctgtaagttccaattcccccatcagaaaattatgaaattcattaaaaattttgcaatgatcataataggttacttgttatatgtgtgctttcaagatacagagaaagattcctgaaatcgcacaatggggaagaggggtggcaggatagatggagggggagaaaacactgtgaaaagttcttccttgtccttaaaaagatagaaaatatttctagggcatagtgttccatagaacatgctgaatggacagtcttgtgagacccagaggcaaattggagttttgcccccactggcctgccattatggataatacctcctctatcgatctccccatcccgactttccacccttcctctctcttctcgtagtatccctgtctgtttttgaacctgtgctaccatctacttcttggactctgcttgtttctctttttcttccttcctcctgtatcctctaacttaacttctatgcttcagtttatctctctttcattcatttatataatgcattgggaccacttcctctgtcttgcctgtgtgtatgagccccccaagccccccaacctgtcctcagtcattgactcacggcgttgacatcctttcctacacacctatgcccacacgcttcctgtacgacatagcttcaactgttcctttgttgggggtcctcctttgccagcactgactcagtgatgcttcctctgcaatcgtgtgttgatatctgtttggatcaatgcctttttagtttgacatgcagacaaagtaccactccaagttgttcctatggagcagagagcaaggataatgtcctggggaaagagagacaatgctacctgactctaaactcagtaacacgactcttgatcctcactgatctaatgaatccttacacgcacatgtaatctttttaatgagctctaggtcattccccacattaaatggttttgttcaggaatttttagtttgtgtttactatttatttataaaaatctaattttatttaatgatctattcatttacttttttaaaaaagatttttttttttaaagaacagttttaggttcacaacaaagttaagagaaaggtcctgaggtttcccatatacccctgctcccacacttgtatagattcctccattatcagcatactccatcaaatatctaactttttaagtttctgctgctgctgctgctaagtcacttcagtcgtgtccgactctgtgagaccccatagacggcagcccagcaggctcccccgtccctgggattctccaggcaagaacagtggagtgggttgccttttaggtttctagttgtatgtttttcccaatttgttatgtgatttatcttccaacctaaaaccttctccagaaggagctcgttccctttgtctctattctacagtagcaaccttcgccagtagcaatgtttccattgtgtcagttctcatgctgcattatagttatatgtttacatgcatcactttctcttgaggaagaatttttattttgtttcagtcagttccaagaaaattgtatagcaactacagaactgacctttctacacatgtggcagaattagtcatgcctgttctcaggaagcacctaaataaacagaaatggaaaaatcttaggttctacagtgcacagtcacataacaagaattgcataatctgaagggaggttcagaaatagaaggatcacacaagcaaaaatttaagtacccagaatgcttaaaatggagtctgtgcaatgtccctttgctaaggagcatacttttgctctatatggaagcataagttatatctg

SEQ ID NO: 47661 - DNA, 4669 bp, Bovine  19866880680556
  misc_feature (1)..(1): n is a, c, g, or t
naccttgattttattgacagaacttaggtagccctgtcaacatgaatttacagtagaatcacgagccctgattaattcacatgaagataactgagagttgacacgaatatctgacaacaatcccctgactcctttcacgggaacaaaagtctaacttcctcctggtttatctcaagggggatagtttggccaatacttcacctaggaatcaatactttacccaccaattaagtgacttagactcagctgttacaggtgggccacaccaccaatttggacccattgtaacatgcacttctctctgttgaatccacttcttgttttgctcttcaaccgtttccttcttccttttgccgtttcctaagaagttcttattctctcctcattaaagttttctagccagaataattctgaatttattcatgctcttatttaaaagttcaaaagaagcttggaaatcttaacctctcttagaatttacattgagcttcaagtgaaatggctaaaaaccgtatagcatcaatttaaaggtaggagaatttttagtactgggactctttcctaatgccttttcctgttttcctagtctggatcggcctgcatcaggcagcctttcatggtgatccccgcacttaaactttgctgtgctatttagatttctatagccagcagggacttaaagatgaatatatataatttttgaaaatgcaagctcccactaaattttaatttgatggaaatatttctcttctatgagctttatgagaaaaaatatctttcaaagtaacaattacatgtgggggattaagtttaagtaattgacagtcttgtctttttaattaaaaggaataaagctgcctaagaagagctcaaagagatttgcagcagaaaatactggcttgctgccccaaagggtgacaagacccaggatcttgaatggacagaaaatgcttatacaggtccctttggtctttggagagcacccccaggggagctcaccctggtgtttgcatcaagtgtgacatttagcaggtgggtagcgatgtactggggacttccagtacatccctaccaaaaggtaccaaaaggtagctcagacagtaaagaatttgcctgcaatgtaggagacctgggttcagtccctcagctgaatgttaaatagccatgtactttgaggagagttgctgagtgtagccaagaagatggtcctttctttggaagttctgctctaggttcagagaaaagatcaagagtccttaaagatcaagtggcactatttaagagtcaaaaagatgtatgtatatgtgtaatggattcccttgtacaatataaactaacacaacattgcaaagcaactatgctacaataaaaatgaaaaaaaataggtagaaagtttcaaaggaaaaaaagtcaagaaagaacacatattcttccaagaattcaatcatcagtaaagtcttggctcctgacaaatttcataggatagccccgcaaaactataatctttcattttagtctgccccttggctccctctctttctttttcacctgaaattcttatttttgttatctgtatttcttgatcttctttttctctacattttccaccatattcaccttgcatttttttatacactctttctttgacatccttcaaacaaaaccaaagaaaaggttttgatggtgttagcattcaattcttgacactggataccacccagggaagcaccacaaagccattatcccatctatctggagaggctagatacaaatgaaccttcacaacaacctcccttttacagtcactctgtccccacaatggtctttaatcatcacaagtcatttgtaggcattaaattaaacaagcactgccataggggaaaaatcccccagcttaagaggtcccaccttacatctccccttgtacactgctgtgaagaacacacctgccaagtcaggacacagtgtggcataatgagcttggaattccaatttaaggtgttcatttgtacccagatatatgatgggagtaggcagaccactcactaggactccaccgagaatcggcagcttatatccactgcaaatcagtaggaggagagaccttacaagtcatttatcatgcttcctaattggaccctggggacctgagaactgccatagtttattgcactattttactcatcacactgctggttgtaaaagaaaacgcttcccacgtttctgtaacacatatgtacgttttaatagctggacattaccactaacagagtatctttgctataaatcacagctatcagtccactctactttatccgccccatactcacaatggagattcttctgttttaaccacttaccttccaaaccttgtagttccagtatgacttttcttttttaactacttaagagaatcttgtttggggcaaccgtagcatcctgtggtttaaaaaaaaaaacaaaaacaaaacagataactgtgccttgactgagtacccatcccatgcaccatcccatcctctgtagcccgcaggacactgagcatccccacccatgtgctatgttggaaagttgcttggccattctgaagtgctttctcaattgtacatgtgaatgtttggagggcagaaatgactaagggaaaaaaggaacgtaaaaaaagcagtagctttcacttctctttgttgaatcacaacttagagagtaacttgggagatgtgttctcgtccctgcagttcctgaacacaggtaagttcattgtggaaggttgtttacttcatgtcacagtgctgaaatagacggcatgctctcacccactggaggttggtcttcccatctgtcattaaacgaatgcatcactttctattctgcctttaaatgtactctccacttgccttcgctctgtaaagttccttttttttctgttcatgttttcttttcatctgattttcaaccattaggaacaccagaaagaaacctcattcttgatgggcagtgaaaactagtttctggcccagatgaagtttatttgacaatacacagtattttggttacactattcattccttcaaagaaaaagtaccatcctagtactttcttatagctctgagctaggtactagctctgagctaggtacttgggaagtgctgtgggaagaagccagacacgacctccacagtaatagaccttacagacctgcccgggcagtagttgttgatgagcagttacgagaaactttgctaagttgaggagacctgtgtggtctatggagaactcagcacaggggcatcttagctaacctggaccagtcagttctcttaccagtgaaagtgaagtttaaaattaaggcagaaagaagagaaggtagaaaggagcagaacatcccaggattgcagagaattagaatccagagacagctcaacagtagtgtctaaataattttttaaatatgggggaaaaacccacatttttttcctaatagtttcttacttttcctcatttgcatctagcctgtttaaaaacaaaagaaaggtgataaaccagtggagttaaaagagaagagatgggcattactacctgttacacatttaagataagaaagagcagctgtcaacttgactactgtgcggacatgtgtggatagggtatactatgtggtaggtggtgttacagaggtgagttttctggaggatgctgagagccattctctatcagagcttctagagaaagcttttagcctctcaacaaggaggcttgacagtaggcttttaagttagttgtcgggatggtcaggtcagttggagccatctgtgttttccaggagctgcttgctctagaacctggaggtatattatgtctcaagtcagtgacacagcaggaattacagatacatccctgaggggtcctggtgctcccagtagtaaaggcattgccaaggttccaaagcagaaccgccttcaccaaattctctgccctgcggcggtcagtgctatagacgcaggctctggggtaactctgagcataccactgttttttaatcccttatcttcttatttgtgagagccttaaaatcccaggaaatctcacaaattcacttatctccgcattcaaattccacagcgagtaccttgtttcatggtatttgaatgtttttggtttcaaacatatgaaatgaaaacacatattacacggattaaggccagtcttgaatcccttagaatttaaatctaaaatgtattctgaaacggatctgcaattcacaatttagagcatggaaacagagggagaaaaccagacaggaggcaaatctctagagacctacacaaacctgtacttttaaaatccttttttagcaagtcaaatacatgaaggcgcagaaggcttccaaatgtacatgaaattatgtcttttcaactgtaatctactttgccccaacaataagtagattcggggctaggaagtagctctttatgaaattggatgactgttctttcattccaatgaggaccaaatgccaggattttacccacaggtgcaatgggtgtgttataggcacaggagcataagcatttgtttcttctttaaggcaaagagttcgtgtctggctctaataacttacgattcaaaaaatttacttctggagtttttctatcttatatgtatttttagg

SEQ ID NO: 47662 - DNA, 1594 bp, Bovine  19866880746679
  misc_feature (1)..(1): n is a, c, g, or t
nattccacctatctgattgatagttatattaaaggttgtagtcagttatataagtccctttgggttgcatatgataagagccttatgttttctttgaaatattatttcagtaaatattcggtatttataatttattgcttgtcctgctgtattttccaactgctgtccaccaaaggatcacaataggaatgttgtttggaaaatgttaattgttgaaaatgtgttttgaaaaataacacttaaggaaaatatattttaaaaaattgtatgcttcctgacctaaatattgacatttaaggtctgggattattgcagacctttcttgcattgatctttctctggtggctctagaaaaaaatcccttcgggcaatattatttaacataattggttttttagcatattgagagataaggaacaatgtaatctagtgttccaatttggaactggaatgtcatacagaccaaggccaaactgtgattttctctacaatagggactggtatatttttctgctgctgctactgctgctgctgctgccaagtcgcttcagtcgtgtcccactctgtgagaccccatagatggcagcccaccaggctcccccgtccctgggattctccaggctagaacaccggagtgggttgccatttccttcttcaatgcatgaaagtgaaagtgaagtcgctcagtcatgtccaactcttcgagaccccatggactgcagcctaccaggctcctccgtccgtgggattttccaggcaagagtactggagtggggtgctatcgccttctccaatatttttctaggttgaaatattcttaattgttttttttgtttgtttttgttttttgaatctcaatccatcatcagtattagaggtttctttctaaaagaaaataaaattctcctccaaaagtacgctgtgaagattgataataataatttctttttaaaaatttcatggatatatggcaaaaccaatacaatattgtaaagttaaaaaataaaataaaatttaaaaaacaccaaacaatggacaaaaaaaatattttctattgtcaatttccccttcttttcattataatcactgtgtatcaatagattgaaatgtatgaaataagttacctccactagttatctgaaagaaaaaaaatacaaaattatttcactaagacactatattcatctgcacatatatcaacttgtagccatctgtcttcctgttgtcatgcactaggctataagctcccatacattagagatgttcttagtacccagtgcagtggtccatgtacacaggattatgttctctgtaaagatccactaaaagatctatccactggagaaaaaatgcttcatccactactgaagaatgagacttatatataaggcttagtaaaatggggcacacttcttgactatattttatactgcaaagtaacccattctaagaagtaactgtgctactgtatctgtgctactgaccaatgcaaactggtcatcctcacagtgtcttcatagtttgattttgtatatatagttgggaatgttaatgcccatgaaagtttaagaaccactcagccactagtgcaaaa

SEQ ID NO: 47663 - DNA, 3825 bp, Bovine  19866880747157
  misc_feature (1)..(1): n is a, c, g, or t
ngttacaatccatagggcccaaagtcagacacaactgaagcaacatagcacacacaaaataatgagattatagtcattgactatcggattgacaaagatatccattggggggaataataataagttataatagtattgaatcaacattttaagagaaaaacatttattaaagttttaaatatacataaactttgattcagcaattccacttcagggatttgtcaaaaataaccagacatttgcacaactgcttttttcacaattgcctctaatagtataaaattgaaagcaaatgtcagttggtagggaattgattaaataaattatgatacaataaataaaatattacagaaaattgtgtattggtaaccagacagtaatcaaattcaataatgtatgtcaaatgtacatattgtacatgctgtttattcaaataatatgtattttgtgtcccttctatgtgctcagccctctagaggcactatagacatattcatattgttttatatggggtgttagataatgagagaacttctatcttctctttatatggatttaacaatcatatattatgaaaaataacaaatgtagcatcaactttgagagaagagttgtcttaaattttaaaacaagtggatatttctgttttgaaatattaaattgatttctccttttgtggtttttcttttttttcttccccttcttccccgacatgtggatccatgagcctctatacaaagtgattcctaactgtaaccaaggcagtattcttaagtgttctggaaatgctatgccttggtatatattgaattaatgagttgtcaaaaagaaatatttgtttaaagcctttggaaaggtagaaaaaaagttaagccatgtaggtgtcaaaatgtcattccagtgtaaagcatggagagttaatgtgatgtgaacctgtgaagaggaatgctttactcggtcatggaagttgacactagtgtcagtggaaaagcaaacttgaaaatgtaatgtatagtacagtaattctcaaaccttcctgtgatcagactcaactaaggagctgttttcaaatgtaaattcctagacccaccccttgcgattctcatttggtagatctgagtggtgtcgtttaataagcttcccaggtgattcttatatccattctgagttttaatatctacatttcaaaaaaccatgctaatgagtaagtttaaatagctaatctactttttaaaatgacagatttttgttaatcttatctactaagtacatttccagaagaattctttgaacaaggttctttaagggatcatgaaatttatttaggggcattgtgaggtcataggcaagctacattccatttaagacctattgactttctggacctcaactttgagccaaaattttaatgagctgccagtgtttacttctgtcaaataaaattgccatgcctttttctcaaacaatggcattaatatttataggtttcctttcattcttattatatatagtgttcccaagaatattgttgtaaaagaatgacaaataaaatacagataatagaccactacaaatgcagaattctaatcagtgaaagcaagtatgtagtatagataaaagactactttagagtacttacacactatcagaatatcaaatctctgagtcttaaaagactgaattatatacaataagcatatgaattgctagaatattttgccttgaaaataactctgaacttcctaaaaggaaggatcttgagatgtactgcaagaagtttacaatgtttttacaacataccatcacctacctgtgtataaccaaagtgtacactaaacatacaatttaactattttgtgatcatttaataactataattctattttaagtaaagtttatttggataagaatccaaaaagccttcctcagtgaagctgataatgaaaacacctgatcaatacagactaccaaagagttttatggctggaaaaccattcagttcagtgtttctcaaagtttaatatgaataagaatcacttggggatgttgttaaaatgaaaattatgatgatggtctagggtgtgggacctgagattcacattccaaacaagctgttgttccagggaccatactttgaattccaagtatttatgtaaacccttttgtttaatagaaggaattggcatggaaggagcatggcattgcaggatgtgactatgactctggtggacttaaagtcattggagctgaatggtattatattaatggcagttcctcaaactcttatcactatggtctctggtggggcctgggctgctgcccttcctgagtggaggctttcaacttttcctttcattctgtgagagcactgaaattgctccttgcaatgaattttctttttgcttgagctatccagagagcgtttctgatgcctgcgatcaaaaaaatgtaatacaggctctgggttgggacttccactgcaaaaaaaaatatttacatcacaagggaatagattcttcttcctctagaacacagtagtaaatatattttcttaaatgtttacacaaatccactagtgactcccaaaggcctctttccatcatttttccaggctctgtccaacttcctatttgatatctgtatttgaatatctaataggcatctcagacttaacgtattcaaaattgaatctcccaaatttgatgtttatgtgacaaatggcacatcttttcgttcagttgctcaggtaaaaacctaggaatcatccccattttttttttccttctcacattccacctattagcaagtttgttggttctgccctaaaaatctagccagaaattaaccatcttaatggttacttttccatggcaattttccatcttaattgcctcattctattctaaaccatcactatctctaccttgggcaactacaatagcttcctaatccttctttttgcttccgctagaccccttcctcatggcaactagagtgacacttgctcaaaattggtcagttgcttcccataccactgaggaataaaatcgaaactctttaccatgatctgcaagaccttatgttatctgagcctttactaaatctcctacttcatcttgctccagtttattccttgcacatgctgcaccagcttactgctctcctgataactcttcaactagaatataagtcccaaggacagaaaagttgtctgttttactcactcttgtatcctagtaccttgtgaggccctgagcagagaatccaggtgagctactctgtgcccagatttctgacccactctgtgaggtaataaaatgggcagtcttttaagctgctaagtttgtggtggtttgttgtgatgccagtagaaagcatacacagtaggagaactggaagagtctaatatcacaaaagctagtgtagaaagaaaagatggagtcattaagaagtcattggcatttcagaaagtagttttttctcttaatgaataaggttcacttatgatcagggatcagtaaccaccatgaaatatacagcttagatttgaagcccagtatccagcagatttagcctgatgtgaatcatttctttattagcactttatttttccaatgtacttcacttcagttggggactgggtctttttccaatcaaaatggcctcagctgcagcaatattagctcttattatagcattttgctgtgcagctggggcccttaggtaggagtgggaactgaagccagtgatagaggaaataggaaactgtggggaggatagaagcaaatcttccttggaggtaaggatgggagcacaagaagggga

SEQ ID NO: 47664 - DNA, 1529 bp, Bovine  19866880785315
  misc_feature (1)..(1): n is a, c, g, or t
nttagctttaaagcctaacctgcttagttagaatcccagctccacatacattatccagaggtcctgtctgagcgtcaggcctctgcagagagaggaaataatacccatctcacatagttaaatgaggatgaaatgtagtaaaacagacattactaaatatgctactcaggaggtgctccttgatccttctccacttccaagggtttccaggatcctttgttggtagttagagtggttacctcccctaatactcagaagcccagtgctcctccctcccagctgctactggcctcatccttggctccaggttctcactaaccccagaagtagctgcagcagcaggagtaacatcaagattttagggaaatgaaaagcatcacctccttaaacagctgtgatctactgctccaaaaccatgagaaaacgaaagatgacttccagatccctgaaaaggtgaaatcaaaacaggattaagggaaatggaatttgcaaagggcttagcagactggctagcacacagtacatgcttagtaaatgttacccgttcccataaattgtttttggaatgaatgactaaacaggtcagcaaggtgtttcaacaccactaggtgttttattgaatagtattaagtgaactgataatgatggtgaccatgaacatgaaaccacttctggataaataaaagtttgccaagatgaaatttctgatgaaaattgaatgggaggatatcacacttctctcaagacaaagtagtaggttaagttaagttgaggtataggttgcagtaaagacattaataccactctcagctgaagtcagcacagaatgactcctcacttctttcactttggatttcagaaatattattctgggacataatcatctctaatgtgaacaggagtgagagatgaagttgttctgaacttttcatgatagccccaaactctgtcaattttaccatcaaaatagaaaaagaaatagatcaaaaagaaaatcttatattgctggtctgaaagctataaaatgaaagttgcttattccacccccaaatcctcccacttgggtctgaaggaatattggtgatgagtaaaatgtcttgctcagaataataacattttagaggtcaggcatatcataaagattatccagatcagagatttaacctggagtccatgggattaattgggggcaagggtggggatcttaaaaccctctgaaattatgtgccaaatgtgtatgtgtaggtgtgtgttttctgaaatgtgggaaagctggaggtggaaatcagggcattgactatgatttctccctaggtaaggacatggccaagctgatgacatgtaactcaagaattaaggacccgctccttataaaattttccctgactagaagctcacaggctgttagtgtaagttcatcaatggtgaagcaagccctcagcataaagcaaagtggcacagcaagcattctccttctggatcaggtaagagcctatttgcacaaagagcccccaactagggcctaggaa

SEQ ID NO: 47665 - DNA, 2780 bp, Bovine  19866880800626
  misc_feature (1)..(1): n is a, c, g, or t
nattccaaagatatatacctactgttctgagagcaaaatagtttatctgatgccaagtcctgtgggttgaatggtggctccctaaaagatatgcccacatctcaatcctcagaagctgagaacgtggcccttatttggaagaagggtttttgcatatctaattagtttaagaatctctaaataggatcatcctggattatccaagtttgtaaccctgggtgcacactaagtcacttcagtcatgtttgattctttgtgaccctatggaacacagcctgccagattcctctgtccatgggcttttccaggcaagaatactggagtgggttgccatgccctcaggggatcttcttggtccagagaaatacaatgacatgcctctataagagacagaggaaaagacacagacacaaagggaaggccatgtaaagaaggaagcacagactgtagataaagagctgcaaaccaggaaatgcatggaagagcaagtaattctccccttgagccttcagagtgaatgtggcccttctgattcattgatttctgatttttgacctccagagctgtgaaagactacctctgttgtttgaggccatcaagttagtatgttatggcaaccccaggaaactgatatacttagaacaagaattgtttcacaaagaggtaatggaatggattagaaacaacatttatgcaagatagactcagattttaacctagattttctctgtacaaattgtgtgatataaaaaaggaagttacttaatatctctgatcgtcatgcttctcattagcaaagtgatggtaagttttcaatgtagggtcactgtgggatatggagatatgtaaaacacctcacttactgtaagcattacaacagcagaatattattctgatcaatattcaatactcgattaacctattaataattcaaaaatgtgccaaatatctataaaagttaaaaactgttgttttccttgagaataaacattttagcaaggtattaattagagcataagggattgattaatgtggaaactggttgtgcaataccaaatgtttcgaaaaacttttatttcaaacttactattcatgccattttaagccacctcctcagttgtcagtggaaccatattcagtcctgttcctttactgtctcatatttaacatcctccctagtttcttatagacaaataataaaaagtaatgccagagtattattggaaaatatttgcatctagcctgggcttaagtcagccagatacagaagcaaagactgtgttaatagaattctcctaaatgttagtctaagaaaattcacaatagcataataatctctaggacaaagttatcaaattcataccaatcgtgaacacctttggttattcttgacattaaggcagacaaaacaataaaggtaactctaacaataattttcctagagggacaatataggaatcacgcaatttgagcatttcatgttctggaataactccttaatatcagaaaattgagactctagtaaagctattgaaaacacatgcaacaaaagtgaaataaatttttaagaattgatgttttttgcttttctattgataaatatttataagaataaatactgtaaaaaataaaagtgaaaaatataacactagctataatactatgtatggctattaaaacacttatttattctttcactcactcattctctcaacaactatttatcaaatgtctcatcagtatcaggcattatgttaggtataagagataaatatcattgaatgagatataatatcatttcctatcttaaagaagatttaactaaaacaatcaattaaaataaggcttacattataggagcacaatgtaaggcaattaattggggaaagagagaagacatccaaagaaaatgcaccataaattgagacctgctaagttatttctgtaaggggaagaaggggaaaatgggagacgttttccatccatatggaggatatctgtaaagaccacaaaatgagagtgaggtgtgtgctgaaagtatgaaaaagaagttcagtatgattggagcatgggcttcccttgtggctcagctggtaaagaattcgcctgcaatgtgggagacctaggttcgatccctgggttgggaagatccccaagagaagggaaaggctacccactccagtattctggcctagaaattccatggactgtatagtccatggggtagcaaagagccggacatgaccaagcaactttcacacacacatgattggagcataggaagccagggaaaaagtgatttaagtcagactagaagaggagacaggggctagattttaagatttaatattaaggacatcaggagaatgctgcaatagcttgggtgagataagatggtactgtaaactagagtgttagctttggtatggagaggatacatatttaggagaaagatcaaaaatatttctaaacatactagcttgataccctatttaaatttactacctacctactcactgtatataagtcttcatctcttttgccctatatttaaaaacaaatttgttgaagcataattgtaggacgataattgcacagatttaaatttgataagttttgacacattgaccaatgaaatcactaccacaatcgagatagcaaaattatttatcaccttcaaaactttccttgtgcaagcattgatctaccttctgtcactatacattagcttatattttccagaattttatataaatggaatcttatagtatgcacttgtt

SEQ ID NO: 47666 - DNA, 2262 bp, Bovine  19866880819951
  misc_feature (1)..(1): n is a, c, g, or t
nagtgctctatagtggtgccaggcctctagcagtaccaactgttaaataataaacaggcccagtttgttggcagcctcttcccctcccgccaacatggagtgcccattctctgggtttacctgcctgcatgtgttcagatgcttagaacagtctgcttggtgtgtgaggtggtggtggcactgaggcatcagtctacaatctaatctgcttagtttattattctcccaggaccttgggtgagctagcaaacatgcagggctctggcagcctgaacaatggccatgctatcattctagataacgttacaggctttgcagactgcagtggctaattgtttttcttacattcactttccctttgtattctcttcttcctttgaattggtttgcagggagaggggattaggaagggtgagagtgattctgcaagttcgcttttttacttccaggaagttagaaagtatttgtgttggttgttttattttaatagcagcatgtatgtggtttattcacactgaaagtgagtcagacataagtagcatattcttactgaagacccacagggtacatagaaccctagactaggtgctcaaatttaactcatactttatttactgtgttactctatgacaactgacctggtaaggacaaagttctccctcagattctaggcaccatgtactggaaaagcaggtcaataaagagccaagccagaaacacgtgcacacaaacttcagacgaaaatgattcctaaaagtcctctttgttgtggagaatttttattctctggtcccgggtttagggccttggtaatctcaattttgtattgctttatggccaaaggaatttggtatgccacacagattcagtggtcaaaaatagactctcttaaatcccataaaccctctccaacccccaaccctgagcaaagctcaggataagtagaccatgataccaaatccaggaggaggatttttgttaatcagtataagtgaggcacattcatagtagggtaaacaacagcatgtggtggtagagaaagggtagctaggaagcaaaaaggctgttttgggggggtttttttgtccagaaactaattctaaaggcaatggccccaactttcaagtaatgacagtatccctggagcaagtttctaccagggtgactgctatgaaaaatagcccttattagaggtctatgttaaaacacatctttaaaaaaaaaaaaatcagtcacattccattataatgatggctcttacatgatgaagctttcccttggttggaaaaccaaaaccatttgcttaactgaaatgaaatctctcctatctcaggtcactaaatatgctttcagctgaggggtaatcattcagtttcttgggctagcatatttttagatcaggagtacttatttgaattaagaactctggtgacagttcagggggtgttgcagaaagttaagatagtattccatattcagcctgtgtgcgtgctaagtcgcctaagtcatgcccgacccttttcgatcctatgggccatagccccccaggctcctctgtcaatggcattctccaggcaagaacactggaatgggttgctgtgccctcctccacgtgatcttcctggctcagggatcgaacccccatctcttacatctcatgccttggcaggcaaattctttaccactagtgccacctgtgctgtgcctagttgctcagtcatgtctgactctgtgaccccacggacagcagccccagattcagcctgtgtgctcagtcgcttcaggttctttgtgaccccatggaatgtatcctctgtccataggattctccaggcaagaatagtggagtgggttgccatttcctcctccagagggtcttcccaacccagggattgaactcacatctcctacactgaaggaggattcgttacccactgagcaccagggaagccccatattcagcctaatttttcctaaattcatacctcagtggtttataatggatacacttgtgatggttctattttgctctatgagaaatgcatgatctcatcttctcattatcttttaagaaagagttagctaatttgtagtgtcaaaagtgctttttaaaaaacatcaggcagtattagttcactcagattgtttacaaatacatagtggtaaagtttatagggaaacaataatttaaaaagcaacttgcattatataacaagataatgaatttctaggactgtcagtctcctattggatccatatcac

SEQ ID NO: 47667 - DNA, 1599 bp, Bovine  19866880822547
  misc_feature (1)..(1): n is a, c, g, or t
naaaatattcaattttataaagatggtaaatttcccaaatttacaccaaaatatgatgcaacatcttaaatataacctgatcaaatggttctaaagttgaaaaaagcaaatatgtgagaattataaatacacttaggcagcctttttttccccagatacagaaatttgtcataacgtttcagtgattttggcattagtcaagaacagatctgggtcagagacaggaattaaatgtctgataattaaggtgtttaaaagcagtagggatgtaataaattagaaaaaaccaaaagaatttttgcaacaaactgctaatgatgaataaatagctaatgctaatgtggagaaacagacattgttttacatgctggttggagcgcatggtgaggcaacctggcaatacctacaaaaatttgatgtaactgcaacttgactttgtaatcttattttttatattgttgccactagaaataatattttatagaaatacgtgttgcaagattttttattttttattacagcaaaagattgaaagtgatacacatatgatgggaaatgatttccaagaaacagctttaagtgcaacaaaggaagtagaaaatagtatatatactatacttccacttgtagaaaaatggggacaattgtgagcatttatgtacatgtgcatatacttgaatatgtgcatacaccaacatacatacaatatatatgtatacaatatgtgcatacatacatatgtatatatatttaacttatttcttgtggctttcaaattttcagtcatgtcgccataatgctataaataaatttaaagatttttaagattaaaataaatcagtataagctgaactttccataataggctttgggacagtctgagttggctaatcctttaatatttgagtgaaataaatccccagtatgaagcatcctctgacatagctgtcaggcagaactagtgtatctccttctctggcactttggacatcattctgttatagcatttatcacattgcattatagttagctttgtatatttctgtcttgtctactagaatatgaggacctctatggggcagggagagatagatatttatacattcatttattcattcactcattaactaaccactagaaaaggtgtttattcaaccttgtatcttttatgcctggcctggcaactgacatataattcaatgtactgcttttgaatgaaagcatgaataaatgaataaggtgaattcagcaattcatcacaggattcaggatgatagcttctttattgtcctttagtctaaggacttccaccttttcttgcctcaaaagttaaactgcaatcatgttgcatatatgttccaaatcttatatgaaagctcttaatccgtttgtagaatgattaaacatattcattcaggaacaaatgagattctatagtccttcaagtaccattttactacttttcttctggtatatttgcatgtttgcaaatatcataattgtatcaaacagaatagacaaatataagaatgtatttttagtgcaaaatgtttgataattacaaagcatcatgcatcactgggcaaaaattttcccaca

SEQ ID NO: 47668 - DNA, 1542 bp, Bovine  19866880925300
  misc_feature (1)..(1): n is a, c, g, or t
ncccttttagcaccacccattcaaacaatccccagatcctgtcaatgttctttctactcccactgtactatctagaatcctaagtaatctaagtattttcatcctctaatctctgccatccatctttatgcttccagaattaccttccataaaaataaaggctcaaggaatttcccttacctccttaaaaaccttgggtggtttaccaaataaagtccaaactctagcataacattcagtctttcacagtatagcattaaactacaactcatggtaattatactgaatgtaaaagatattcagtaacagcttgctatgttccagactccatagcagcgggctggtagtaggaataaacatgaaccagacacagtccccattttcaaagaagccagtgcgatgaaaaggcagataagtgaactaaacattgtaatgcaatgaagtgagcacaacaaaggtacctaacaatagggagctaacaaaatagattatgcccaaactcaatgaggagaaaagtgaaagtaatatcttagtcctctgcttcagaaaatgatggaagcaacacaggagttaacctcctgcattaaacaactaaaaattggacaaaatactttatagacattggacaacaggcagcacatgacaaggtcagccccataatcactataacttactgtctagacagagttaccagatcacatctcagagcgggaagaaaccaaatagaccctgtgttgcccagggctacactgctaataaggagtaatttgggcttcagatagcagtctttctgattccaaagtccaagaagtttttacttttacttctctaccacctttaaatcattgcttagactgtccacctaggctagaaatcagctcactcctacccctccatattctctcgccctacagaaattatgtttcaaggtttcagtttaaacatcacttcatccaagaaaacttccctaattccattgccccaagccatagaaagaaaaaaatcagtattaccatcctttataatactgtattttttttgtccaagacttcatttttattgtttttcagcattaattttattctgctttatctaataattatattagttcaagccaatgtttatcagggcttccctgatagctcagttgataaagaatccacctgcaatgcaggagaccccagctggattcctggatcaggaagatccactggagaagggagaggctactcaccacagtattcttgggctttccttgtggctcagctggtaaagaatccgtttactgagagcttactgtattatattagtgctaaccaatgtttatcagggcttccctgatagctcagttgataaagaatctgcctacaacagagaagaccccgggtttgattcttgggttgggaagatccactggagaatggataggctaccgattccagtattcttggcttcccttgtggctcacctggtaaagaaacgtttactgagagcttactatattattgctctatacgatgtacatgaaccccatcacttaat

SEQ ID NO: 47669 - DNA, 1361 bp, Bovine  19866880926144
  misc_feature (1)..(1): n is a, c, g, or t
nttgaaacaatcgtaaatgcaaactgtacctgcggaatcgtggtctgtagccccgatacatattctgtctcactggtctaccttgttctcctgcaccctggttgtcagcaccctgaaaagggaacggaaaccaagccaaattttactcaatttacattagtgtaaaaacccaaccagacacaagtctgaacacagcagcagttaaaagtaaataaaaacacgtttacctccatcacttctccctgcacaggagggttggagtactgtggtcgacgcccatagggtctccgcatgtagtaaggtgggaacctccgcctgcggtagggccggcgctgttgggcctggccttcgggagcgctctccgatccctcattcttttccccactctcactattctggtagttctgctggtaattgcgtggaggacccctgcgacgtggatagcgtctgtaatggttacggtctgctgcgtatttactgccttgcactggaactccaccagggcctgtaacatttgctgcctccgcaccctacaaaagccatcatacagtgatcgtgacaacggaattaagtacatgcaacaaaacttacacaaaaaatacaaaaggatctctgtggccaggggtgcactgaaatgattaaacactagttcctcgctgttctgaagaggtagccctctatctgcagccagcacattagggttggtgcacctgtgttcaagtggtcacctgacccatccatgcaccttagagccaccatcctaatggatgagatctccaaaatatttccatacctgaagtcaaacctttacacaaaaagcatcctcaccttttctccttcaacaacatcaaactccacagtctctccatctcctacactgcgaaggtacttcctggggttattcttctttatggcagtctagtaatatcacattccaaaaatagattaacaggggagaataatgtgctttttcatttaaaatgtaccagagtcaatattattttaacttggatatacacataaaattagctttaaataagaccaaaccatcaataaatttaggaaaacaaggaccagtgctaacccccaacctcaaccaaaatactccaatcttacaaggccccagcattttatcactattttccaaactaaaacaagtaatttaacacgcaagacaaacacaactataaacatgtattttaaaacgctttttgcaaaagcattatatgtagctttgaacaaaatgaggatatccatctatccccaaagactgcacttaatagtagaagctagccccacatagggccagtttagatgacaggcgagtttagttttgcatgcgtcaaagttgaccaaaccaa

SEQ ID NO: 47670 - DNA, 1321 bp, Bovine  19866880950498
  misc_feature (1)..(1): n is a, c, g, or t
ncggctcctgatgtgggatcagagacttgcaaaactactgtttttgacactattgttttatgttaaaacttttttgtgtcacttttgagtttattttctgtgctggctgctttaggtaaggagtagttgcagatgtacttcctgtctgctgcactgtctcaagtactagagtaatgggaaaaaaaaatgtttgcacctgtttgaaaacctcaactgtgtggtggtgtggtttctgggcaacaggcaggaattctcaaaagcttggttgcacctgcttaattgttgtttgcagctgtgtcatatgattgagtgcacagagaagcttgttagcagtttgcttgtgctgttacatattttgtgtcctccaagtttgaaagattcttgcttgatgtagtccttgagctattacactggtttattataaaactcattgattctagttcccaaatattttatccaaattctttgttctcagtctcaaatattttcttagcaactgttgactgccctagataatgtgtatgctaagttctccaaagaatacctggggagagtggatctctcaagataactgggttgataataatttttgtcctcatagagacattttctgtttggctcagtttcactatgttggcaaccccactatgtgaggctggatgtagttattgatccatttagctgaacagatttgaaagcatttggctattagtggacacatggggcatattcagaaaatttaagtgatattaagaaaattcaagatgatttcttgatttgtgcatgtgtctccattgcagctgagtggaagtgagagagaaaataaggaaaaattagataattatctttgaagaggaactaaaatccagatgtaaaatttaagactggaatatcatcctttagttttatcaaatcctgaaattgaaagtgaaagtcgctcagttgtgtccgactctttgcgtgtcggaccgcatggactatacagtccatggaattctccaggccagaatactggagtgggtagcctttctcttctccagggatcttcccaacccagggatcaaagccaggtctctcgcattgcaggcagattctttaccagctgagccacaaaagaaatcctttatcaaatcctagtcccttgatgttttttcctaagcatttctgttagtgatgtttcttttagataacagctctacaaggtttctgacaagtatctatatttttaacatagacaagctaatatgaactatatcctgtactagttagctaaagttctataaatataatataaaaagcggcaactcaatatacaaagcat

SEQ ID NO: 47671 - DNA, 1390 bp, Bovine  19866881026917
  misc_feature (1)..(1): n is a, c, g, or t
ncatgcaattaagaccacttaattaaacttacatgttgactttgagcagagagatttttagaaatagaaaagataatgtttcatggctttcaggaacccaatgacatcatttttattcatagaaaagtgcatttttaaaatgcactcagttaaaaatgtcagagtctgtcactagtgaatttggggtgcttgtccctttgcccccttgtggaatttactttgttgaaatagattgtcactctcttggaagacaattgctttgatattgacagcaggccttcatgagatctagaaatgaatcataaggcacatgagtagcacagccatattcagccatacaaaaattagctgagtgttacacatatcacagaatatggtgatttggggtagggaagtagtccaacttagattcacttttgtgaaaaagagcacttagtaattattgtatcaacttagtatttcatccaaacctggaatttgtgtttacccaaaggaccgctctgagattgagcaagatgattgaaaatgatctgggccaggtaggctagatagagagcgggatcagctgacatggcagaatagggttttgtgttatcacctcaaaagcaacattaaattcctttctatgaaattatagcatctttcattttccaggaaaatctaaaaagtttattctctgtcatggaaataatgcagttaaatggcttgaaatttcaacagatcattgtaaaagctcaggtaaaaagtcagtattttaatgatagccttcaaacataatcagtaatgaaatttaagcaggacctaagggaatatgacttaagaatcttagaatccttcaataaagctacttaagaaatagaatgttcctattcctgggtaatatatgatgtaggtaaagtgactagtctaagatccctaagttggggtgtgtggaagaactgggtctagaagcaggtgtctggtctccagtcaagtgctttttttcttgtagagcttgattcttttgtatctgcacaacagagtcaatctcatagaaagatacaggtcatacatttttctaggcagataaatgttcatccactcttacaacatcgataacaatggaaagcatttattgcatttacaacctgctaggcaggacccaaattatttaacttacagtctgtcttttaaatcttcataaaatgccttacaaagaatgtactattgctatgttcatttcatagtatggtagaggtactaaaacataggcaggagactaagtaaatccacaaggaaacagatgtactaagtgatgaagcttagttgtgaatgaactcaggcagtctgagttccagagcttgtgtccttatctcctgtgtagcctctctcaaacgttgttagttatgta

SEQ ID NO: 47672 - DNA, 1805 bp, Bovine  19866881052291
  misc_feature (1)..(1): n is a, c, g, or t
nattttggaggaagacaaatctcacctgcatcctctactaactgggctaattcctgaccacttttgagcccacttcctcatctgtgaaacctactgattgttcaagaaagttcccctattcaaaagttgtttaaacttcctcttttaaacgcaaattcctttgaaattactaccagtttgttgctatttagttaccaagataatttttctcttcaatagaccttgaaataatgattgttatggtaaaaaaacaaaagcagaacacctaattgtgtggcctgctactaaatgacatgccctgatgaaagagagagaagaagaagggatgtgtgtgagggagagaggtaaacctggccaaatgaccccaaagctaacatcatcagtagcctgggaagagatatcctcttggactataacctgcgagtcaaggcctcctgagctctgctctggggaggtgaaggtgccgtttcttgcagtcctggatatgtgctttgttgcaggccccccactttgcttgtctttgcagggctgtcaccgggtgattcataactcagtattaactgcagacgagggaggagtgaataggggaatttttttcatgtgacataaagtaaccagcatcagggcttttccacagaagcattaattacccttgtcagtctaaccaagaacagattttaacttcaaccaaggaccatggtatttcattggcacccagcaaatgtgcaatgaaggctttgctcttcatccatgagtataataaggttaaagtctcttgtgatttatgatattccccctttctgtttaaacgagtatggtacctattaataataagcacacaattccagaatgtgagacaagacaggcggaaggttattggtgacgagaccaggttatcagtgtggaaatgaagttttttccgacttctctattcattggttttcttaccctttttcttattttattattccctttactgattgtggaaactaattgaatattagaattagaaagagcccaagagatcatctaatctagtttaaggaaaaattgtgaaagactaaaatttgatgagtgtcctgtttgattcttatctttgatgagaatattttacgactctaccaagataaaagttaatttataaaaaactgatagtagtgcaaataatagcgatttatagaaatgcatgtggtagagtccagttagttttcgctctatggatatagattagttttactagttttgcgtttgtaaattcagcattccttacctgactccaattatgtggcaccttgcattctgtttttaaccagttgtggtatcttcttggttccctcatcaaaatcttggcctgtgttgattttacatctgtacaacaaatatgattgtcttttttaaaatgatgccttaacattacagataatgaaaaaaagagagagaggaagtaaattacacaaattttttgtcattgttgaactcaaatccatatctcttgaccttgattccagaaactgaaactgacaccatgaactcttccccaatctaattgcctgtattctatacttcctcatgttttcttgaccctttgaaatcagaccacatctccagagcacaataattgatagcttcgatatctacttggtatgtttccttctgccccctccccctataagatatgtagcaattactttgcaaaaggtagggaaggtgttaactatggtgtatgctctgaggagctaccgagatcctctccgcttccttctccacactccttttccctgactgttcaaaacgcatcctctcat

SEQ ID NO: 47673 - DNA, 1693 bp, Bovine  19866881063649
  misc_feature (1)..(1): n is a, c, g, or t
ngtgcacgacaactctttggaggagcccctctgcctcctcctaccgtgccgtgctgccacactgcttggtgctctgatgcaccaccaccttcccgctctcctgctgctcttgaggactcctactgggacacacgcagcacaatctggggcacgggagcagctgtccctgccaggagccctctgctcagagatggaagcataaccctgttaaattaacagttgtgaatggagcatgcagccaagatgttgttaatttattttactctatcttgaattttctgaatgaggcaccgtcttatgtgataggacatctgcacttgggccttgatgccaaatggttctttaatacaagtactggtacttgtgagagtaaacaagccaaatatttgagtaggcaagtgcataaaagaccgtttggtgactcaagaaaactgcatcaccctttactcttttaagaacacaaaagaaaagggataaactcttaaaactttggaaaatataaaaagaaggaagttaagtctgaatgataaaaagagatactttacaaggaagctgagtgtctgaatgatataaagaaggttactttataaggataaaggaagagcccctctaagttcttttcacctccatccccaatctgtttttctctctctatctcaatttatcaaatcgtctgtcactttaactttccaaatgatgaggacttaagcttctgtgcacagcctctgtgttgaaatggctatttagaaaggttcaaactagacgtgggtgcgaagattgtgggatcaggctcacctgaacaatccaggagtggaaggggcacaagataggaaggggtggtcaggaagggagagaatgtgaaaaaaaaaaacatggttagcagagaagtgagacaaccctacaagagctgggaacccaggaggtaaatacacccaaagaagtgcccaaagtacccccacagacatgcagcttctccaggaggcacttctgggccccttaatatcatcagagatttaggggagttggattttaggaattaagtgggaatagacaactaatacaaattgtacagatcgagggaaagagacagatatgagggaaccgaaagggaaaggaaagacaggggaaggaagaagaggaggggagtggggaggaaggaggggaaggagaaccagcctaagatgaggtcagcttaaatgactgtacagaggcatacagaaataaaaatattttaagtacaaaccaggtcttaagccagaaaatgccaaagtgtacataatttctttggtgcttgtaattaattccataaatatgacaaactccaggttattttctggtaaatttcctttcgcagtcctagaggtaatagcagtggtagtatattttgctgagaggggagacaaggagggaaggtttcccaagactggctgtgggggaagccacagagcatcagaccacatagaactttgcccagctggaaatagaagagcttgccccaaacaaggaacatgtgagcccaggaaaccagagatcactcagtacatttagcacaaccctttcagcttctaatggggaaagctgtgccctgaaaatttgcttcagtttatagcatgagtgaatcagtcagtggtctcgtttgtatttgaactcaggtcctctcctttcctacccaactccaagtccagttttattg

SEQ ID NO: 47674 - DNA, 2418 bp, Bovine  19866881084990
  misc_feature (1)..(1): n is a, c, g, or t
nttactattattttttgctatgtaatggagatagtgtaagagggagagaaaagatgtctgaactgtacatggattgccatggaaacagcagctgaccaatcaatggagagcactcagaacatatgccttctcttttcaacattcttgatgaactgatgttctgatgttgaatccttttggctcttatatcagttgcagtgagaggggttttttttttttgttgtttgtttgttttttgctatctaaatatatgacacacacctgttataaaaaattcagatgtatacatttttaatcttaagatttttaatctctatgtacatacacccacacatgcagttttttcttactccaaaacattccccaaatttctcatatattctcctttcccaatcatttaactcaacatttcctcacatccacttgtcatccacttgtctccaccctccccaccttaacatcctaaaacaccgtagtctagttgacatagagcaattttcacattatcaagaaatatcaatgtgtaaacatgaaactctttaaaactcttttcaatattagatgtaataaaaagagcaagtgaaaatatatttagaggaagagctacaaaagggtcacccaccagaaacatgaaaaaatcaatttcatatttctttactgaattaagaaaataaaaaatagatctgcttctcaggaaagcttggggaaaatgaatgaagaaaagttaagtccttgggggcatagtctattttataaaaatgagtaaactttattttgcaataatttgccagttctgagactagtttcattgattagaaagtgtttgtaaatttctcttcagtggtgaatgcttgatctgcagaaaagtttaggtttctgggtcttaaatgaatctcttatggagtagcatgttctctacaacagcttccatgagctggaaagatgataaagacaaaatcaggctctctggtctttgctgttgttgctgcataaagatttgaagagctgacttccactgagcagactgaactataaacaatggctgctgacatttaaacctgtctccagatcacacagtcaatctgtggtgagaattgagcacaagtcttaggaccccttactgtccaactcattcactgggagaacaatggttgatttgctaatatactaatgctcttaatgtttgggctcactaaagaattaaacatcttgaaaaacaattctttttgtatataaaccaggctttaaaagtgttcaatacttacctccttgaccatgtgcaggaatttttctaggatcttgggatacatcagtgaataaagaaggctttcctgatctcacagggcagacattctagcagagcaggcaaacaagaatgacatattaagcatattgtagataatatgctaaaaagtgaatgtttctgtgaaggtgatcagtagcctcttgattactaaaaacttgtcttttttgattccctcaaacatcatattgttgaacctattcttctccatctgttttttgaacgcctgggcattgtggtgggtgtcaacagagcacatggcactttttcttgttcccttctcctctagcacttatctcacttttttaagccactgatcacttcctctacctcttcagcaggccctttctcttctgtgtgctccataaagaccagaggtctacttctacaaggttttatccactgtcctctccttgagctacacgtttctttttttttttttttggtaatctcactgtgtaccttcaactatacatgcattgatctacatcctgctcagtaattcattgagcatttactattttccaaccaaccattacactaggagctgggaatttaagaatggataagaagcaccttggagaaggcaatggcaccccactccagcactcttgcctggaaaatcccatggacgcaggagcctggtgggtcgtagtccatggggtcgctaagagtcggacacgactgagcaacttcctttcacttttcactttcatgcattggagaaggaaatggcaacccactccagtgttcttgcctggagaatcccagggatgggggagcctggtgggctgccatctatggggttgcacggagtcggacacgactgaagcgacttagtagtagtagtggtaagaagcacctggtctctaccctcatggagattacaatctggtggagaaggcagacaaaaagtaagtaaagaagcaaatgaataaaaataaccatacacttgtgacagttttcatgaaagaaacaaacaagaagagaataagaatataggaaacctactatgagatgggatagtcagggtggactctgaggaagtgaaatttgagcagaaacagaatgatgataaagaagcagctttgtgagagtcttcagaggaactccat

SEQ ID NO: 47675 - DNA, 1420 bp, Bovine  19866881136034
  misc_feature (1)..(1): n is a, c, g, or t
nctatggttttttgagtagtctgtatggatgtgagaagtggactaaaaagaaagctgattgttgagaattgatgcttctgaactgtggtgttggagaaggctattgagagtcccttggactgcagagagatccaaccagtccatcctaaaaggaaatcaatcctgaatattcactggaaggactgatgttgaagctgaaactccaatactttggccacctgatgcgaaaaactgactcatttgaaaagaccttgaagctgggaaagattgaaagtcagagaagaaggggatgacagaagatgagatggttggatggcatcatcgactcaatgcacatgagtttgaataaactccaggagttggagatggacagagtggcctggcctgatgcagtccatgggctcgcaaagagttggacacaactgagagactgaactgaactgaattgaactgaatagaagcctatgaagtcatgaaaaagatggacagaaagaatgtgagaatcctaacactctgctatgtatgaatatagatccactcactaaaactcaaagtggttaactttaggacaaattagaagcaccgctttacacaatattgagtgaatttaaagtacttgttatctcattaaaatagtaaacatataagagttataagaaacacttaaataatttcatgagccctggatccttaatgattcagtggaggaactcagaagatttggggttgggggtgcaaaaagaaccccataatgctcagttcccacagcccttccctgatcctctgccagaggcagaattctgggtggactgaccttcaccttgccctagtttagcattttttatactcgcttgcttgcttctgggagaagtaatatgctgctgtggcaaaatttgtcctcacagggctctggagtcaatttccaaacactgaaaataatcccatttttttctcccttaaagacagaatggtgtggtgtaggggcaggagtggtccaagagaagctgagcccctccctgaactcccagagcagcttccctaaaagtctgaagcctcctacttgagttcaactcctagatttcttgagtacaaacctcttctctgtggtgccttctcttccctacactgtgcctgtggtgaagggggttgaatcattccttctcactctgtagttcaataaatttttttgttctctcttcatctcctgcccctcccctctagggctaagtctctcttgaagaaacagccatgcttcatttaatcctgctgcagccagactgctggcagatgtcatgcttctgatgagacattaaatcaaggtaagcactaatcccccaggctgaagcatctatgaagacaagaaaaatgtggcttcacctcacagaaacactgcagtcaattcagccctcgactctgcccc

SEQ ID NO: 47676 - DNA, 1671 bp, Bovine  19866881210214
  misc_feature (1)..(1): n is a, c, g, or t
naaatcccaattgtccatctgtagcccaaacctttctccctactccagacaaccaggtcactcaactggtgtatgtaatagataccttaaaccaaacattttggaaaagaaaaaaaaagaactcctgtcttttctcccagagtctgctccttctcaagtttccccatctccagaaatagcaagcccatcttttcctgaggctcaggccacatatcttggaattatccctgactattttgtcttttcctgtattaaatctgtcagcagatcttgttggctccactttcaaaatatatctaggatctgagcacaattttattttctcttgcttccatctcattccaacaaaagccaaggtcttaaaatggtctccaagccttgcatgattcacatcctgcaaaggtcaccactgggagttggtcttatctgttctctctctcctactcccttctagcatctctaatatctgtgctaaaaccccagtgaccacatgtgctcacagccacggcattgtgctactgatctctctgcctcaaaactctttagatgctcattgagttactctctatcttcagcttctgtccacatgtcaccttctcgaagagactttctgtctgatcttatcatgctgccttcatccctgttctccttcccaacattatgtttttcatagctttcaccaccacttgatgtgctatatatttcacctgcttatttatagaataatataagctccacaaatggtgttttttgtttttattattattaatattttatacactgctgtatccccagcagctagaacaggtacagaatgttcaatagatgtgtgagaaggtagatacctacttagtcaaacagcagttgaatcagtcctgatggtcaatgcataggcggcaaaactgatccaagatcactgtcacattcagttggtttactccttatcaccactgaaggaacttctcctctgccatctggacagacattcccccatcttcttgtgccctttcaagttccttggagactaactcctctaattcttacaggtaataccatccctcctagtgattgaaagctgttggcagtgaccctgattgggatgtcagtggcaccggaaggccagacctgtgtcctagtctcactgcattatagtcactccctagatggaacacaatcatagagaagagagtgctttcatctccccatgcaaggatacatctgtgaaagagagccattttattaatagcaattccaaaccactaggaattctgctctgaccaaaaatagatggtacagacacatttttgcttaggggagatctgcctttctctcaggttaagtcatcagatcaaagtcatggaagctttaaagtctaatgaagagtctctggtggattaaaatgttctacttttcacaaacgatagttatagctaactcagtatttacctgttagtagcccttttttgtgggaaaggaaatggcaacccactccagtgttcttgcctggagaatccaagggacagaggagcctgatgggcttccatatatggggtcgcacagagtcagacatgactgatgcgacttagcagcagcagcagcagcagcagcccttttttgtggagaaggcaacggcaccccactccagtactcttgcctggaaaatcccatgga

SEQ ID NO: 47677 - DNA, 819 bp, Bovine  19866881217196
  misc_feature (1)..(1): n is a, c, g, or t
natatccatatcagactgcactgatgtcctgaggataaaggagacccgttatctctgtataatcatacagctcctagaaaatacagaaacctgctaaaaacccccacccccatcaatgagtttggtaaaaacaattgaacattttaaatcttagctgcattggaaagtatttaaaatcttgaaagttaaagaatagcaccaaatttcagtccctctaaatgtgtaaccctatgaaatctaaggactctaaaatgaatttctaattcctgacttataaaccccgaagaaggaaatttataacaaaaccagataaagctcttccaactgtgcctatgacaccatagctatacaaatctgccccattttatagtacacaaagaagactggaattcagctgttatcagagataataataaacttctggtgagtcagtcgctcagcctcatatttacattcccactgtcagcaacagtttttaagttaaacattttttagaagtaaaaattcaataaacaatatttatattaccaacagaatgtgttttccttgctttggtgataaactatctgattattttagacgttgctctcttctctcttttgtccatctcttagctacctcactaaaagccatgccccctcttcacacttgttctctccctgaagcttcaaggaagaggactgcaaactgcctggatgcctggaccctcacgattctgagattaaacccagatccacccatggcatgggtcccattctttgtctgaagccagcatcagatgagtcagatataagtcattatcaaatgaacagcgagcct

SEQ ID NO: 47678 - DNA, 1106 bp, Bovine  19866881217767
  misc_feature (1)..(1): n is a, c, g, or t
nttatacaatatggatatagtacaaaagagaaaattaaaactctaacaatccaaatagaaaccacaggcatgtttttttcctatgtcaaaaggaaaaataataataattcttgtaagtagaagctgctaatccctaaagcctccaagtagagcggagaaaccattgagaaagaaattaacaactttcagagttgtggctttgaaaattgaattaataaaaatgtcccccttttaagccagtataataggaaaggttctattttttttttaaattggcaaaaaaaaagagcacaaaaacacataaattcccatggaggacacttacaaatgttatgcttcaggtcctcagcatcagtgaaggagcaagtggcacagggaatattcttaaatgtttattttattaaacttcttaatgattttaactctatccctctctcacttttcccagacaattggaagatagctcccctgttgaatttggaccttccctttctgctgaacatacatccttactcattctgatacaggaaacaaaaaaaaagtccagttagttaagtccgctaatatgttattttcaaaacccagggctcatcagaaagcttaaaaagagttgtgccatatgcaacagagaacatttccttgttccagtgactgtggcaggttgaaaagtgagccttatgttcaaataaataccctggaattagaacaactgtgcaaacaatacaaaccctccaactctatgtatcctacctgtgaactggaatgaatgcttataagcagaggattagaggtaagctgtcagagcactagaaatcaattcttctcctcatgggtttgttgtaccctcacctcctctcccagatagaattcaaagaaggagaaatgcggtaactcttcataaatatagatacagaaatttcctcaggtagtgagggagtcagacccaactgagcgacttcactttcacttttcactttcatgcacagggagaaggaaatgggcaacccactccagtgttcttgcctggagaatcccagggacgggggagcctggtgggttcttgtctatggggtcgcacagagtcagacacgactgaagcgacttag

SEQ ID NO: 47679 - DNA, 992 bp, Bovine  19866881220420
  misc_feature (1)..(1): n is a, c, g, or t
nagtaaaagataaaagcttgacatctgacaaatttcgaatagtaataaaataatgactaattctattaatattcatatttttaaggtaagtgcaagtatgtctacagtgcattttaagtcaaaatttggggtgttattggctagacacagtcatttctttgccagagatactaggctgtgtaaaggctaaccatctgtcaagtgatagagagacaaagaaaggtttaatatatactagcctaaaatttccacaaacttgttttgaattgtattgtcattttgttttggccttcatattctgtgttgagtatgtactgggtcagtcaccccactttgttttatgaacaaactattcaaggtctagataaggttattgttgcagctgatctgatctcgaggcaggataaaatatgttttgattttgtttcagtgtaatggtcaaaagctcacaagtgggccacccattggcagttatacaagtgacttcaagcacacttattttcacccacccattctgaattttgggtgtcttaattcttttgctttatatattgaagcttcatatttcaaacccattcctgagctattgggggggatggggagagcaacaggaatccagattgcatgttttaggtgcaatatggtgagatgtgaaattgaaacagcagattggtgagaaactttagtttcaaacaaatataaactcgtttgtttagtgaagtcatacacaaaacagtagtctctattgacagggcaatttttttttttcccgtaacttccacatcatgaagtcaccattgttgtttgggccagcagtctgtttctgaggtatcatggaagaagaagaagccctaatattgctgattgtaatgatatacttagatataccaggctgaggaattatttatagcagtgctaattatatcaataaaaatagcagtattaatactgtgagtgtcaaaatccattcttgacagtatgaggtaaacaga

SEQ ID NO: 47680 - DNA, 1680 bp, Bovine  19866881269316
  misc_feature (1)..(1): n is a, c, g, or t
ngtggtggaattgaattgattgtgggatacatagctggcacctggggaatggctgtttgcgtgggacacccccctccactgccacattggaattgggttcaggaccctaattttagaggctgacatttattgatcacttttgctaaggcactgagctaaaggttttgcgtggaaaatctcataacaaatgcatgaggtaggtattatgataattttaatgtatgagataagtgatattattttttacagaaatatacttggggaggttccatatttaataagtgtagtgctctgatttgattatttaggtaggtagaccagagctcatcctctctaccactctaaccctgtttcacatagtaaggccttaataaaagtctggtgaatgtgtgttatagtttggattaaattgtttctttcctgagaatagttgataataaggaagattgaaaaaactgacagagcaacttaaagagccacagcagaggacgtcaaaggcaggtaagcttcgtagaagggagacatgagaagtgggtgccactgaagctggactgctttattattatatgtttttttaccacactgcaaggcatgtaggatcttaatccccctaccagggatcaaacccagtatgccttgcattggaagtgcaaggtcttaaccactggaccgctggggaagtcctaagcttgcctaccttcaaagagtcctgccctgtcattgctcagctgtttgctcagctcagagggtgcacagaggcactcagacctgaatctgggtacaactgctagagaaatgcaaggtagaagcaatctggggaaatgcacagagagacctactgagccccagggttagggtcaggcctgtgagcttgcagcacgccagctgctctcccagaaggagagaaatgagctgcagctgggaggccacttgtgcgagagaaaaaagactgtttttttaaccatcagaattgagtctgttgcttatgtgtaagaggttttgtggaagcagcttagatggtgctaagtcactagacaaaagatcacaccctctagctcaagtccctgtctctagggactctttcttacagtctcaggtctgggtgaggacagagcagtgaaaggcatcttgatcagctgagggagcatagcgacctggtaacaggagaaacaagggctcctgaaatccccagggctgttctgccagtgagaaaggaaaggcaaggaggaaagatgctggctgctgttctgccgctgagtacatggagtgaccgtgtccacgcttccaagagctgggtcccccctcccgccgtcctccccccacgcagatctagtcatcaggatctgcattctcacgaatcctttgcacatcaccgtgtgaaatgtcctggcctatggtgctcagactaaacacacctgtcctggaagatccacagttccttttgaatatttcttcaaacgaaaagtgcaatttcagagatgcctctattatggaattcagagaaataagaagcagcagataaattagctaaagccatgaattggcaatcaggagaccagtgttgtaaatctgacatgtcccactccactgtaaccccatagaagtttctgtttctctggaccccggtttctgtgtctgtacactgagggggtgactatgagagtcaagactcaaacagtc

SEQ ID NO: 47681 - DNA, 1150 bp, Bovine  19866881329137
  misc_feature (1)..(1): n is a, c, g, or t
natttaatgtgttgtatgagagactatatatgacctaggatagtcccagtgagctcagagaaggtacttgttcactcaatgtcagaatggcctcattgttaattagacacataggatttgtactggatgttaaacatcagaatcataaaggtcttcatggctaatgtcacatcttgattgttattgctaatatgtagtttgtgtaatcattcatgctctttatcagcctagtatttccaagatgaaggatatcatgtgtgaaaaatgccagtgcagtaacatgtacactatagacacttgaaacaagccaggctcttctttctatttcctttgaactcactcactagctttctatttttgcctaagctcttcagcaataaataatatacataggcaccctggtggctccaacagtaaagaatccacctgcaatgcaggagacccaggtttgatccttgagttgggatgattccctggagaggggaatggcaacccactccagtcttcttgcctggagaatcccatggacagaggagcctggtgggtcagagtccatggggtcacaaatagtctgacatgactgagcaattaagcaggcacacacacacacacgcaggcaataaataacagacttcctgccatttccatttctttaaaggtggaaatctggaattggaccactttctttcaataggcttatcctgcattatctgtttaaagacagggcctctgaaggagctcacaaaacaaaaatgctacatcaaccttttatatggtctttgaaaatcattaaacctggaaaaatatcttggcctatcatatttatgtttgtctcacttatattttgccaggttacttcctttctcaggagttaagtttaattttctctgtttccttaatgtttccacattaagtgaaaaaaagcaatgtgtacataacattacccccatcatcatcaccacacccagacacacatttgcacgtctatctgtagatttacaaagattatttcatagttgacttcttttatacccctgctaaatcagcatgttaatttattttcaaggctacttataggactgaacatatgaaagcttgagaaaagttgtgatttatgtgtatgtgttggcagagagcagtgagactataa

SEQ ID NO: 47682 - DNA, 956 bp, Bovine  19866881332918
  misc_feature (1)..(1): n is a, c, g, or t
ngcatgcctggtaatcttagtgctgagacacagtttggaagtgatgtgggggtggggacgaggatggggagaagcagccagtttagcaaatggagacgagaaatctaaatgtgaagaacaggctaaaacagaaaaagataaaaagaaaaatagaggataaaaagaaaaatgtcttttaaccaatccttggtgttgcatgacaatttgaacatctgcttatttaacttctctcactgaagttttcaaaggaaatgatagaaatatgctacgttcctatccacccgagggttttccaggtggcgccaatggtaaagaattgaccttccaatgcaggagacataagacatgtgggttctatccctgggttgggaagattcccctggagaagaccatggcaacccattccaatatttttgcctgcagaatcccatggacagaggagcctggagggctacagtccatagggtcccaaaaagttggacacaactgatgtgacttagcatgcaagcacatgctcccacccattagcatggtatgcttactctttagagaacaggagaggaggagtgaaaactgaaaatgtgtgtatattctatagagagcaagagtactcctttacatagaaccatgagtactttaggtttcaatatgtggaattcctcaattaataatactttgcacttgaaaaacacattgtttacaaaacacttttatttttatgactttatttgagcctcacaccaacttagtagaaaaggcaggtctggatttggagtattctttgtacttgcccacttatatagatggataaactgaggctcagaaagatgatgttacttacccaaggtcacaggacaagcaattggcagagccgggtctagaacccagggtagggtttattccactacaaagacatgaaacaggacattaaatacacaacatctaagaaaataaga

SEQ ID NO: 47683 - DNA, 1097 bp, Bovine  19866881393051
  misc_feature (1)..(1): n is a, c, g, or t
ntgaggatttcatttattaatctagatataaaacaagcttaaagagtaagtgaggaaatgcccagcatgcttggcgtagtgcagggggtggtaaatacagaaataaaaagatccaacaattgttatcttcatggagcattcttgcagcttcaagtgacatctctgagaagcctcccatcaacttataatttatctcagaaccctaccatataacatttgatgaagtgatacataaaatgcaacaaaagtgagaaaaggagaaccaacatcatttctgaaagagaaaagcattttacaaggtagaaataaaagcagatttataggaaaggtcatcagtggggcatctgtgactaacataggatctgaaataataccagtaataattaaaagcacttctttctgaggtgtttcaaatgaagaaaaactcttctcttctcagcaaacttcacaatgttttgcttatgacaaactggtgtaataaagataaagacacattgaaatggaatttttacaattgtgagtcttaaacacttagctctgctgtgggaaaaaaaatacaatatacatttacacacccaagctatcttattttagcactgttttgcaaacgagagttttaacaatcagtccaggttaaaattaggtcaaaacttatactctgtaaatgaattatgttgaacatgctcagggaatataaggtgattttagttcttcattttgaaaccctaccactggtgtttttcgtcttgcttagcagctttttgcctatagcagggttgataattataatagatacttttagaatatatacatgtcttagagatgatggcaattttgaagctgaaacagtatgggagacagaaaagacaatgggcagtgtttcaagagtagatataatctctgctctgagagcttttggagtgggtaataaacatgaacacaactgaatccagttaggggtatcatggagtgagaacggaaaccatccacactgcttatttttagattaaactgactttgttcttcactgctgtcatcaatacaacattatcgtttccatgtagaggaggaaaaacttttcctctctcagttctacc

SEQ ID NO: 47684 - DNA, 1096 bp, Bovine  19866881403074
  misc_feature (1)..(1): n is a, c, g, or t
naccaaggtgtatcatgctccctcctatgataaaggaaagaaagataaggcaatttgagcatcttggtaaaagtaagcaatagtgatccaataggagcttcacattttatttaggtaaaccaaatatttaagccgtgttttgcctacttttactggtgttcagaactgtgtacaggataggaggtgatcaagattccgggtagttctcatacagtagtgcttcctaaggctgggtccctgcctcagtttttggtatactggaggggggcagggtgggatggtatggttattaataaaaacagattctcaggccccactctacacctatggaaacataataataatctctgtgttacacgggatctgggtatctggtttttaataagctccacagtagatttttatgcacaatgtagtttaagaattattgctctgaactgtaagtcctctgaaacaggaatggaaatgcattcatcattgtagccttttcagtatattgaatagaataggtggccaaaataacatctgttgagtaaacgaagacatgaagaaagaaatgatttcatccttgatccttctagaagcatgttttcataatcagagaccttggcaggttgtatatagggtgagtaaggcaagctttaagctatacctcctgatgaggagggagctttatatacagaaaatgcccctttcaaaatgatccaggaagacttttaaggaaagcctccagggagctaattaaagagtcaaaagcagacaggctgctgaattaggtctttggtaagccgctgaactcaaggagggaaatcgtagatgggcaataaccttcgaaaacccggcagctggggagatacacactcaaagcaaaaggtcagaggacagaccacgggcagtaaactggtagctagaagggacgaggcagctgtacatccagcttctggaaagcattaagtctgtgtccagcgtaggggagaagattggaacgtgagacatatctgtgtctaactttagtgaaccttgggtggtgggggtgagtggacccatgggggatgttaatggagcagaagagctgtctgagcagtaaagcacagaa

SEQ ID NO: 47685 - DNA, 822 bp, Bovine  19866881576371
  misc_feature (1)..(1): n is a, c, g, or t
ntgggaaaaagttaaaggaatgttgtcagtttgcttaggtaccaaattaaaactaagtaaaaaaaaaaaaaaaaactaaaactattactagcaggagactatgaatctcttaggtgatataatttttctgggagatagtatgcatgtatatgaacactgtatgattattaatataaacaaaatccccttatttagacaccaagacatttaaataatgagaagatgctcctctcttttagtgtttaaataggaactaggcaaatataaggggcttccctggtggctcagaagttaaagcgtctgcctgcaatgcgggagacctgggttcaatccctgggtggggaagatccccgggagaaggaaatggcaacccactccaatattcttgcctggagaatcccatggacagaggagcctggtgggctacagttcatggggtcccaaagagtcagacaggacttcactttcactttcactttcaggcaaatataggtaatctcagggacggctttatacggttggtttgttgttgtttttttttactgtttttgaatactggacacactaaaattctttttgacccaataaacgtactttgggtctgcgcatacgtaccatcatctccatcttctggattgttttcacttgtcaccccagctttatattgggcaaaaagagctgaagtcattcttactttttctagttgttcacatcaacaaaaagctttatcccttcacctcatctctagaggagagaagaatagagatgattaagaagcaaatgaagataagaatatgtataagtaaagctgaggggaaggga

SEQ ID NO: 47686 - DNA, 1343 bp, Bovine  19866881612862
  misc_feature (1)..(1): n is a, c, g, or t
nctatctatctatttaggagttcattttatacctaaatatatccgattttattctattatcaatggtattttatattttctcctctaaatcttaatgttaatcatttttaaaatgggagtaacaatgtagaatctacctcaaaaggattgtcaggagaatatatagaacagagtaatagtcaataaatgcgagctaatgttattacttgtaaagcttttccctatttctgtatatacacatactattcataattcaaaatccagttaaaatgcacttgataagaagtctttcctctacatccaagctaacagtgtgctttcttaaataagtcattaataaatatttccccaaaacaaataaacataatcaagcattactaagaaaaggttttcacaagttcatgaatcgacttaaacctactgccatcattgtgtgaaaacccttgcttacacaaagatacatacgcttgcaacattttcttatctaacaatctagtttattttatcaaaaagaaaaatgaggttagtatgacatgacttgctcttggcaaaataatgatatgggcgttaatagtcactttggtttctacatgatcacaataatctattcatgtttagaatagatttcagaattttgctggagataaaattaactctgtagattacagaattcatctttattttatttttaagactttatacatttgcttatatccagtattttatacttttcgactctctaaatgtgatcatatccagaagttatgaattttcattggaaaaaaaacactggttttccatcggaaaaaaactgcttaaggcttcacagagcaaaagttgttaggtttggattccaggtggtccatagatggaccactatgtagcttgaaaaatagtatttaatattagttaacacatctatgctgctgctggggctaagtcacttcagtcgtatctgactctgtgtgaccccatagaggcagcccaccagattcctccgtccctgggatactccaggcaagaatactggagtgggttgccatttccttctccaatgcatgcatgcatgctaagtcacttcagttgtgcccgactctgtgcaaccctatggacagcagccaccaggctcctctgtccacaggattctctaggtaagaatactggaatgggttgccatttccttcttcataactcatctatacatggagataatagcatcttcttgggcatagtgaatattaaatgagagtaagtattcaaaattctttagcttttctgtttcctcacctataaaatgggaatattcatccccccttactactcaagatcaccatcaggaccca

SEQ ID NO: 47687 - DNA, 744 bp, Bovine  19866881715057
  misc_feature (1)..(1): n is a, c, g, or t
nttatatagaaggaagctcaggtgaagatttgggaagctaaagacaggaaagactagacaaaatggcaccaggagtgtagagcacactacagaattattctggggtaagtcaaggaaaaagaaatggaaaggcatcttggcaaaaaggtcaagtctaggagatcagctgaatagacagttgattataggtcagtgaaacgaagggtactttcaagaacaagaagcatgaatcagaaaattaattgaggatctgagtttcactataaggagttgggacaataagacagtggatcatttgatgggaattactaacaatgaccctgggttctaagaaatgaaattaccattgccactaagaatcccacatatgttatgcccaggatcaggattgagccagactactgtaaagtcaacaaacagaatagaggaggaaatattttagaacagaatgggtagtgatgaaacagggtgctgtttataagaatgtctttcacagtcttcacataacagacgttcacaatccatataatttgaaatagaaataaagaactgattgaaataaagcatgatttcagaatttataaagacatttttggtacatatgcccagaggcatctaaaaatatggccatgttttgcaaaattaagaaaataaactgcatacatcaatgacagaggaggcatcgcactaaaatccaactaaaatccagtttaaaaatatatttgtaaattattttcaagaata

SEQ ID NO: 47688 - DNA, 1141 bp, Bovine  19866881765817
  misc_feature (1)..(1): n is a, c, g, or t
nctgcctgaactcttcctagaagatccagaatattattatatggcacttacataatcctttatcattgtgcaaacatcccataatcatttaatggaagtcctcaaaacactagaataggttgatcttgttattactgttgctgagaaaaggaaataaagatgaaatgatgaaaacttgtcagatatcacatctcctactaccaggaaaaacaggattagcactcagtctcttattctctgatctgctgatatccattgagctagagttatcttagcatcagaggaagaaataaatccattcatttctaagaattataatttggaaacgatctgttcagtgttaaagaggaggttctctttattttcaaaataaataaaatgcaaatcccggtgattcttgggacttgggggtgggaagggagacaagaaaattgcaatgtagggccagtgagcaggaaggaggtaaaagagatgggaaaaaaaaaaaaactgatggtgggtgaatcctcagtctatcatcacatgggagaaggagttaaaaagccaggccactgtcttttctcattggtttcctccagaacctgtgggagaggaagaaatactgctgtgccttcgtttggggagcagcagggcaaggcagtgtctctgcagccaaaaggatccctttctgacagatgtggggttaagtactagaaaattattccctaaaatcactattgttagtcagtcaaaacaaacaagcaaacaaaaaacagcttcaaagagaaaacaagatagattaaataacatacaaaatttgatgtaacaatctattgtttttgtgggtttagggtagagagtagaaaacaccctgagttgggatttagaagtcctggttttagttagagcagttacatagctagctgtgtgacttcaaacaagtggcttaaactctctgggcctctgatccttcatatttaaaatgagggggttggttactaagtaatgtctaagagtccttctagagatcgaaatttcccaatttataatagcaataattaacattttacagtgccttcccacctacaaaatggttttcacatacattatctactttgattcttgtgccaggtctgaggcagtattatgagtatgcccattt

SEQ ID NO: 47689 - DNA, 791 bp, Bovine  19866881874960
  misc_feature (1)..(1): n is a, c, g, or t
ncttttagagtttgaaatagctcacctgggattctatcattcccactagctttgtttgtagtgatgcttcctaaggcccacttgactttgtggtccaggatgtctggctttaggtgagtgatcacaccattgtgcttgtctcaatcatgaagatcttttttgtacagttcttctgtgtattcttgccacctcttcttaatatcttctgcttctgttaggttaatactgtttctgtcctttattgtgcccatctttgcatgaaatgttcctttggtatctctaattttcttgaggagatttctagtctttcccattctatttttttctctatttctttgcattgttcacttaagtttttcttatctctccttgctattctttgtgactctgcattcagatgggtatgtctttccttttctcttttgcctttcacttctcttcttagtagaataaccagccaaaaattgctgaccttacatgtctgctactccactactgcccttctactagggatctcagttgtgagttctgaattccagtctccattactactgcttcagtgtagagaatgatgctgagtgtgtatgtttatgctgataactggatactcatatggcaatgattagagtggttaattaataacataaactgaaggggttctagggctcctccaggagagattaaatgaatctaaatcccaacaaacttagatatatgaggctatgtgccaaaagcaacagctaaaaataagttaaaacatacttctatagaggggaaatggaaggaggggg

SEQ ID NO: 47690 - DNA, 607 bp, Bovine  19866880460175
  misc_feature (1)..(1): n is a, c, g, or t
naaatttgatatttatcaatgtgaattttggcaaataaataatattagatatctatttttgaaagcagcacagccatttttattagtaaaatttacatttagcattttttcctgttgtaatttagtggagttctaacattcttacatatatttcacatctttccttctgtctcaacaaaggcaaagtgttatcctggtacattttctaacaatgtccttgtatatataatgagtctggaaaatctttgttggtgtgtgttcattttacaaatggagagtttttcattataacttctcttttgaaataaatgttaccagtgttttgaatgatcatgagaaacttggccccagggctgttgaggtcaacaatagcactgaatgaagtgtctggttggaaagagaaaccaatcctggctcactttgcatcagcatcctttgagaaggctttccaaccactaacatttgcatgataaatttatggactctggctctaccagcttgattgaacacattgcattttgctaagaacagcatgtcaactagcacagtcagcatccatatacatctgggaaaactgcaactgttagaattgtgccatgggactgaa

SEQ ID NO: 47691 - DNA, 1056 bp, Bovine  19866881052379
  misc_feature (1)..(1): n is a, c, g, or t
nataaaagatacttaacactatctgtaagtgctttagaaggagaaagacaaagtgatttagagcctattacattccccaaaatttatacatattatcacatttccttctcatcattggaaactgatgggccaaggtatcccttatttcttttcatttaacaaatatttattgaacaccaacttttgaaactattgtttccagagttaagatatatagtgcaaaactagaaattttaaaaaccacttgacttcttacaaaacacagcataataagaaaagcaaggttacaaataatgaattatatattttttaggaaattaaaatattttgtaagacaaagtttatagcagatactagtataaaagctgaaatgtaaatgtttattttccattgtaatgatcaaagattttttcctactctatcacatgattgaggtattaaaattaaattcctttctatgcaagaagttcctaaaatcttaaacactgccttaaatttcctaagtactcatggaagagagggccttgaataaaattcccttaggcatgtaactagaaaactttatatcaggccatggaatagtgagatgaaatatcaagaggtcttgtaagtagtgtgattatataacttatcatccagtgtagtatgtaagagtggaagcaagactattaataattacacctataaacaggacagaactacctggctgttccagataaatgataacaaagagtcacagtgttgatcttgaggctaagaccctgctgacctctaatcaaatctggaacaagctcttttcaatattgcaacttcaaagaactcacagtctttgtttcactttactaatatcatccatctgaaatcctctacctcttagaaaaattgtgatggacgaaggcttcctggcaagtgtaagcatgattcaccgacttatcctgtcctgagtgaaagataaacaagtgaacaatcttagaaacatatacctaactttgcatcagatatgtctgatagaggtcacagtggcatcaggtggattctagttcaaaatgcttgagt

SEQ ID NO: 47692 - DNA, 1019 bp, Bovine  19866881107197
  misc_feature (1)..(1): n is a, c, g, or t
naatgagctaatggttgaaaaacaaatgaagccataccaactctgtttgaaatcaagtatattctaatttactatcactcaaaaaaagacaacaagataagcacaggagggagaacaaacacaaaaaatcagttttatgaaagaggatcaatgtgatagcacactaacaaacctgctttcaccctggacaacacacacaccatgtatggtcggaagaataggctagataagaaagagagatgccagaaaagcttgatgctaaacaaaatccagaaaagatacagagtagcacagaaatattcaagattaacacaggcagaacataattttttacttaacattaaaaatttccctttattttctacataataaataatcttccagtctataaaaacagatgctactgctaaggctatgcttcacactatcattttcctctgtatgctagttcacacttttttccttcagaaatcttggatatataccatatggttctggtgatttattgggcttgaagtgctctacttgctctaactttctcattttagatgtcaatctttgtcaagggtaccatctgatgttctatgaaaactgtcttaggaatagaaaatttcccaaagttgtctcaatattctaatatgaaaaccattttctttcctctcctttctattaacaacttttaaaattctcatgaaggacttaaagctctcattattgatccttttttacttaatgtacatactttctaacttttctgagactttttttgtttcttattgctaattgctagatttggctaaccttttgctgaacttctatgattgtttgatttaaataaaatctgtacaatgctacatctaatccttaggaaatttgaaatataatacaaatgataaatcacttaagtaataataattagaataacagttcacattctctaagttgattgatttttatctaaggaaaattttctaaggtcctaaacagcttcaagtttatggttttcaaagctaggaaaa

SEQ ID NO: 47693 - DNA, 1231 bp, Bovine  19866881249652
  misc_feature (1)..(1): n is a, c, g, or t
ngatagcttgcaagcaggataaaatctcactccctttataattctttataggtagtgagttaaaaaagacctgactgagcaaacttagtaaaatatcatcaactggggaatctgggtaaagactatgtgaaagtttcattacaacatttctgcaatcttgattccattttcaaattactctaaaatacaattatataaaaagttatatgggttttagaataaaataaaatgtatgtatttttaacaacataaaagtctttgaaattgtatttaaatgttaaattattatttaatctgcatataagcaggctttatctacgaagatagagccagatctgtcataaaggagtcaggcagttattctcacttggcctataatatatacgttacactcattttcagcctgccatttatattttcaaaactaattatcttactaccatttaaagtaaaatgaattttactttaccatttaaagtaaaataaattctgagaatttagttgcattttaatgttttcataaacaagcaacagtattaaacaaaaaaaagcaatacacaagcaaaacacagatgcaggtagagaataaggtgtcgtctataacactaatgtttcaatttttcccatttgtaatccatctaaagtgtacaaacacacgcacaaacacatgtttagatattctcataatgtcataacttttttaatcatgaaaaatactgccctcagaaaatatatcctccacattaaacatgaaatattaatattttaatttagcatttattaggagtgaaatatccaaggtgacagtaaagtaattataactgcagagtttgaaggcaaagtgtttggagttcgttcttgtgtgtattctataacatggttcatccttaattttctgacctgtaaaatgaggataatagcaacaccatagagaggagaaaatgtaaacgatctggcacacagtaagaatctactatatcttcttttgtttcacctgcctatgtttttcttttttcatgtacaaaattctagggaactatgaaaatatgtattccaatgggaataatactctattttctaataaggcctaatttccttagaaaatatttatttagcccagaaagaaatctttttctttccctgggtctcttgtccaaaatttatcatttgaatgagctctctgacacagatgaccaaagcagtccaaaagtacacaccaagctgaaggtaa

SEQ ID NO: 47694 - DNA, 1080 bp, Bovine  19866881500119
  misc_feature (1)..(1): n is a, c, g, or t
nttgaaattaaagaatgttccacattccttactggtcatttcttcatattaaacctctgtagaataatgaaatataaaagccctttctaaaatacccatatcagtatgtatttgtggttgtatttttaactgtgccacctactttgtgaggttctctgtatttctttttcctaaattctgctaccagcaccactccatactcttaacagacacacagacacaatatctacctacagctgattcagttattttgatagtgctcttttccttagtttgtgagcttttggagatcaggcaacatgtacacttttttgtgggtacccaggatttaattacttgcttgtcataaaaattgattctcaataagtgttttctgaattaatggatgtttataaactgtttttaagccaatacaatatgtttttccatagtctctttacgagttttaaattgagatatggatatatgcaggaagagggactgcacatttacaaattcatgccatacaggaaatgtttttcccatctgttaacctatgctattgtaatattgattaaatattatttttatatacagtaaaagtagacacttcatggtccttgtcaagtaataaaatgtgttttccagttccattttcattttgatgaatgtcaacataatgtacaaactattttgagactttccacccacaactccggtccagtataacggcattttactgaggaacatggttactccagagcatcttagttcaaaatgaagatcaattgcatatatatttgacaacgcagaatgaatttagattaatacaaaatcctaacattgtccattaagagaaaagcaaatatcatatattagcacatatatatggaatctagaaaaatggtattgatgaacctattagcagggaaggaatggagatgcagatgtagagaatggacttgtggacacagtgggaaggagagaatgggatgaatggagaaaacagcatcaatatatatatagtatcatgtgtgaagttgatagctggtgagaagttgctacatatatagggagccaagcctggcactctgtgatgaa

SEQ ID NO: 47695 - DNA, 948 bp, Bovine  19866881966463
  misc_feature (1)..(1): n is a, c, g, or t
nctccctatacccatttaaaattacttatccaatgctgcagtaagactatatccctgtttattcctagcaagataactgatccctttctggagtagattaaaaaaaaaaaggctttcctgatgttctcattttatttttctttaatttgtttttgtggtggtggtttagttgctaaatcatgtccaactcttgcgaccccatggactgtagccctgtcaggctcctctgtccatgggattctccaggcaagaatactggagtgagttgccatttccttctccaggggatcttcctgatccaggaatcgaacccggtcacctgtctttcaggcagattctttacccgctgaactatgaaggaagatccaaaatttatattcttatttctattcattgcgaccattgacctcagattttaaaaacctagtttcaatgcgatttataccatgcaaaattaaattgaaaggtcaaataggtactttaatcatttttaaaaattcttcttaaattatgcagataatataataaaattaactctcaagcagaatggtctgtagacaaacccctgcagtcttcagaactggttgacattatgcagctatttcagataatgcaagaaatgcattattacataatatcttgcctgctttttgcacgtgacagaggaactaatgatattttctaaagtgaatcattgccctgtagcattactctctgccaagcaacctccagctgctttctcagacccactttttgtgcttgtaattttcttttgttcctcatctcctgaagtattaggactaaggctgggtatttctcttgttcctgtgcctttacttgacctctctctttacctctggagctgtcagaatccaaagagtaatatatgaaacaccacattgaatattagcaacattttcatccatcaatagatagtgagcaaaatgt

SEQ ID NO: 47696 - DNA, 1241 bp, Bovine  19866880475739
  misc_feature (1)..(1): n is a, c, g, or t
ngactgctgaccccacatgacttttgcataacatctcagtgtataatagtagaccatggaaaataaagaattgggatcagtttctcgaaatactggtctccccatgtctctctctctctcattctggctgagtctccatctggagcacggaacccaccaagcttactaattttgcctgggcttctaagatctgaccggggaggcctcagtgtctcctctccttcgggagaacggaaggacgcctgcggcctacgtaagtggtgcaagcttcttgtcttgaagttttattggtcccctgtgtaaaccaagctactcagcctcttttctccactgaattttcctactgagctatccttattctattactctttatatctttaattaatatctaattgaagctattgtatcctgaccctcgcggacgccgtccccgctttgaactccctggatcagccgaggctggacccccgcaggtattctttttgctttggctccatcccttcattctttctggagttatttctccactgatctccagtagcatattgggcacctactgacctggggagtttctctttcactatcctatcattttgccttttcatactattcatggggttctcaaggcaagaatactgaagtggtttgccattcccttctccagtggaccacattctgtcagatctctccaccatgactcacccatcttgggttgccccatgggtgtggcttagtttcattgagtataggctgctaaaatgacttctgagtttaacccttcccacgaattttcctcgaacacacaattatctctcatcagtcttgacagtgaattgtcttgttaaaaagcctgcaattctgttacagataagcttcaaatattgatttgaaccttttacttccttggtctgagatatcatggtaaggctaaaagtgttcaaatctattgctgcagaaaagcaaagaaatgtctccagagaaagacagatctcagagacatgcagaaaacagtttgctacatttctatttcactggacaccatgtaggcatggcctatgttggttcaaagaagaagggagtaccaaagggtgagcagtgaaggtagctctgggacacagtaagtgttcaataaatacacaagtcagggggttataaagtgaggtttctgctacacagcctctgagagccacatcatggcagtcagcaggaaagaagtgctgggagacaaaaactcaacaata

SEQ ID NO: 47697 - DNA, 921 bp, Bovine  19866880486727
  misc_feature (1)..(1): n is a, c, g, or t
nctttatgttttctgcatctgacatttacatcagacacattcaaaaaacagtgaaccaagtcttatgaaagagatagaaggatcattatttaaaatattgatgtcagaaaaacagaattgctttttgatttaggatatgtaaatattcactcttcttgaaagactgactttaaaacatgtctaatcctgctaaacaatagaaaaaacatagaagaaacttaaaaaaaaaaagaaagaaaatacaccacataaagcagatataacatcatggggaaagtaggtactttctatatcattgtcaaaaaccaaaaattgcttcttgatttaggacaccgtaaatgcatacagaggtttgagtggctggaagaaatcaatatcatccattgttccttggatggtggactttgctcatgctctaaactctgaacatttctaaaacagtctccctcaaagctggcaaatttggaaaaaataaattccttttatagatgaatcattttataggtgatgtatcttataatgaaccccttacgattttcatttaatattcaactaccctgacctgaatatttctatcttctcctctaagtcagtacttcaggaaaatatgatgagcagactgacagtgttgtcaggattgtgattgagacgaagctgcaattatgagcaatgtgaaatacaagtcctcctaggtcctgacccatcatgtatctggtttcacaacctctgcttcattcgtcagtcataagaagacctgagattcttagtctggtgacagaaacttccttttcttttggtctatcagaaagggtcggtttggtttagtggctaaagtcgtgtccgactcttgtgaccccgtggactgtagcccatgaggctcctctgtccatgggattctccatgcaatactggagtgagttg

SEQ ID NO: 47698 - DNA, 3791 bp, Bovine  19866880587311
  misc_feature (1)..(1): n is a, c, g, or t
ntcaagtacacaaagcaccaaaaagcacatttctaaaatgtccctgagtgaagatgtgagaaaaccccttgaaacccattattatcatggagatattacagtggcctccttggttgctctcttagataagattgtgtctgcctaaatggcactgattccatttatataacaataacaaacgaaaaaaagaatatttggaaaaaagaaaaataaatagctgagagaagcactgtaaaaatctgtggttaacatagtactccaaatgtatatcatttgctgataacacatgattttgctaacagtgtcacaacaaagcatgccaatctatcagtcctgcttgtgcttataaccagcatgaatatcttaatgaaatcagtgggtttggggttaagggtcacccaagtggcctcctttggaaagttaaaacagtacttcattcccacatgtgtcatctatgcctttctgctgttccacttcaaattctctctctaattctagtcacgtactttttctgccctctgtgccatgcaaaaatgccaccaaatttgtcagaaaagatttgccctttgtgaaactagcctgattaagttttatcagctcatctctctctggatgtttggtaacctcattccttattactgtcttagagatcttgcctacagccaagggcaaatctgttcatttataatttcctgattctttttctgttcttttctcacagattggggtgaggtatttgtgttttcattttgcttctctctccctgtaactgaaacgtttttgctaagctttcctcattttggttgaaaatttacttagaaatagatctatatttttttccggtttatcataatgactgttccttataaatttaaaattattggttgataaaaacctctcatgcatttcctatactttccaaagtgatctttcttatcatgaagtgccccttagagcagatgaatatttattctctttatttttctcttgctacatcagtttaagcttcataaacaccataattacactagagcaaatttgaatatgaaataagaaaatgaaatagcatcccctgatccattaagctatattgtcttcctcccaatataaagattaaatgacagagatagtttatagaaatgacaaacatgagttcaatttattttttcaaactcataatcaacaaaagatttttattttccatttatgagtaggaaaactggctgattccctatgtgagagaaacatttgaaattttctgtttattctttcaaggtacaaccagttctgaagttctgaattttacctcttttttttttttttcccctccagtgtttgaacataaacagtttatcctgtgatgctatattgactttgtaaacctttcacaatgatgagaatgtatcaggcattttcttctcttcttttatattcatgttttcccctttctttatgttatttatcaacttgtttccatgttcttcaacacaggtgaaacgttagccaagagaaatacatcagatatctcattgacagggactggtatggatatgtaggaaaaaatttgatttgatttactcaacctgcattgtttaaagttttaattttatgccattatgtaaataattgatgatcattataatggggcttcccaggtgactcagtggtaaaagtctgcctgccaatgcaggagacataagagacatgggttcagtccctgggttagaaagatcccctggagaagggcctggcaacctactccaggtatccttgcctggaaaatcccatggacagagatgcatgcaggctgcagtccatagggtcacagtcagacatgactgaatcaacttatcaccatgcatgatttatcaagaatacccaagatattgaaaagaaagtctaattaaggaaatgaatggagtatcattaaaactttagttaaaaatttactaaaaaagcccactacatgcaataaattaaaaaaaaaaaaaaaagaggattttagtatgaaaatgcagtgtgaaaatgaaaaagaccaaaaacagttgaaaatttgttatgtgaaaaggatggcattctgaatcatgtggaaaatgttggcattccccaaaatgtgatttatagcaaaggtaaacaacattatttcatatggttctgttcagttcagtcgctcagtcgtgtctgactctgcgacccgtgaatcgcagcatgccaggcctccctgtccatcaccatctcccggagttcactcagactcacgtccatcgactcagtgatgccatccagccatctcatcctctgtcgtccccttttcctcctgcccccaatccctcccagcgtcagatggttcagaggagaccagtttaaaatgataaaactacttattttagctgatatataagaaatttataaaacaagtcacatatcacacctgttccctccaaaattatgaacatataatttagggcaagagtatattaagaagggagttaagacaaatttaaagaaaatattagacaaaataatattatcttagacaaaaatatattagacaaaaaataataatattgtgcagatggcatacagatacaataaagtgatgaaaatgtatgtaataatgatttttagaatacttgcattatttattaaaagatgctatgataaatagctattcatctggagaaatattgagttaggtaaataattcatagtctataaaaaataagttccagaagcaataaatttcaaaaaaatattaataatacactatattatcagctaacaaaaattttagaagactttattatagtcctgggaaaaggcattatttagaaacaaatctgaaactcataaaccatagagaaaaatattgccagaatttattccaaatcatttaagcacattatctgagtaaaaaaagtaaaaataaacaaagtacaataaaaaaatatataaaacatggatacaataattgccacaccacatgtaaacagaagaataattaactgctgcactatatgctatatgaagtgttctacaaatgaagaaatagataattaaaagaatggaaatatggacacaccctatgaagagggtgttttaccccaagaaatacaaatgacaataagcatacaaaagatattctgccacacaaatggtagaaaatgcaaaccaaaccaggaagatactacttttactaacaatattaggaaaccttacattcttaacaaaacacaatgtgaggaatggtgtggaaacaggcattctaatgcagtgtggataagatagattgtaacatgcaaagtaaaaataaatgtatgaaattgcatttggaagctggagtggatgtataaacacagagatttaactttttacttaatatattctgtttcaaggtagttttaaaagaatttgctttttgtaattaaaaatgttaaatctgacaaaagtttaggaaaaaatgtacatgaatagattagtaccaacagttaaacttggtaatgaatatgtgaaaaggggctaaatctcactgaagatcaattgaaagcaaattaatacaattgaatgtaactctcaaataccaatctcaaggacctatgaaatcaagaatatgaaatattgctatcttggaggaaagaaagtaatttcgttaaaataaaagagtaagctatgtcttgatttcaaaaaggcagttggcagtatagataaaaaggattatttttacgttgagttttagtccaaactggctcatatataagagtgctaggaaaataccaggatgtctagtgtag

SEQ ID NO: 47699 - DNA, 3583 bp, Bovine  19866880639882
  misc_feature (1)..(1): n is a, c, g, or t
ncaaatttggaaaactcagtagtggccacaggactggaaaaggtcagttttcattccaatcccaaagaaaggcaatgccaaagaatgttcaaactaccacacagttgcactcatctcacacactagcaaagtaatgctcaaaattctccaagccaagcttcaacagtacatgaaccgtgaacttccagatattcaagctggtcttagaaaaggcagaggaactaggaatcaaatttccaacatctgttggatcatcaaaatagcaagagagttacagaaaaacatctactcctgctttattgactactccaaatcctttgactgtgtggatcaccacaaactgtggaaaattattaaagagatgggaataccaggccaccttacctgcctcttgaaaaacctatatgcaggtcaagaagcaacagttagaactggacatggaacaacagactggttccaaacagggaaaggactacatcaaggctgtatattgtcaccttgcttatttaacttatatgcagagcacatcatgcaaaatgctgggctcggtaaagcacaagctggaatcaagatttcagggagaaatatcaataacctctgacatgcagattacatagcccttatggcagaaagtgaagaagaactaaagagcctcttgatgaaagtgaaagaggagagtggaaaaagttggcttaaaattcaacattcagaaaactaagatcatggcatctgttcccatcacttcatggcaaatagatgggaaaacagtggaaacagtgagagactttattttcttgggcttcaaaatcactgctgatggtgactacagccatgaaagtaaaagatgcttgcttcttggaaggaaagctatgatcagcttagacagaatgttataaaacagagacattactttgctgaaaaaggtccacctaatcaaagctatagtttttccagtagtcatgtatggatgtgagatctggactataaggaaagctgagcgccgaagaattgatggttttgaactgtggtgttgaagactcttgagagtcccttggactgcaaggagatccaaccagtccaacctaagggagatcagtcctgaatattcattggaagaactgatgctgaagctgaaactccgatactttggccacctgatgtgaagacctgactcattggaaaagaccctgatggtgtgaaagattgaagatgggaggagaagggaacgacagaggatgagatagttagatggcatcactgacttggtggatatgagtttgagtaaactccgggagttggtgatggatagagaggcctggtgtgctgcagtctatggggtcccaaacgttggacacgactgagcgactgatctgaactgaactgaaaggttaaaagaggttagggtagttaaatagggactgctacctgagaattaaatggcatgggaaaataataggcttctatacatagaaactgagataaaaatatcatcattgtgagtattatgctttgatactatttgcaaagtatttattcactatagcagtcaccttgtacttggaaaatccaggttctctgagaacctcaaattccattaagcatcacggggaaaaccacacttggtggttctgtgatgtggatagtgttctcccatcaattataataaatctgaactgaactagtcagaaagcaagctcactgtggatactacagtatagggggtttatttcagaatgaagatcttgtacagttgtgagggaaactggagtactaagggcccaaatgtaatgtcatcaacaagccctcagggcacttgggcaggtggtaagtcagacattgcaagtggatctggaaaggcagcagattcagctgccagagaggacatgaggagaacttcatgtccactatctctgaagctgacagcagacttaggatcactcttggtcagcagtgctagcagttaggtcaaaagctagatacgagaaaggagacagggaccctctctcagtttctcaaaatctctctctcaccacagttacttccatgtggctttcagagaaccttgtcatttcctcttcccaaatttcatccaattaaaaaagaaaatcaaccccagaattcagaaatccagaattctatagggaagggaaatttgggaacttagttttagctaagctaattttattgttctctcttatctctgaattaggatttcttctgattatcactcatttttctaatgaaaataatcagtagtgtaatcaagtagaatccaacaactatagattgtcttagtgtttaccttcttaacacatcagctgctaaatatgtgtttcagactgtctcttcacattaatagtttgtttggaatgtctgagcatctcactgagttaaccaattgaccacactgatggacaggcagactaatcaatgagttttgaaagttggaatttgtatataacagaaccttagccacagaatcgtagcattcaacaacttgacaacggcagtagagtttaaaaactgttacccatctgtgactaaactctatcagtgatgctcttgaaaataatttcaaaataacaatcagaaaacgtttgataaaagaatagcacagagaaattcattcataattacccgaggggatagcatgagatggataaatcaattcaaatatgagtcccaaggtgccttttagctaaaagaagcagtacggtcctcctatgttatgtgaaaaaaatagtaaaattgtgtaatgattttcatcttaaaatcattgaatatcaggactgtaaagggttatggctgtctactgttatagagatgataaatgctaatgttatcaagggccaaagcggaaataggctgagactctaatccccaggtgtagattattgttcctggtctcatttttcttcagtatcccttttctttcttttttttctacacctacatttggagtgatttcaatgttgtaaaactataggcaatggacaggtgcaagggtacggagaaacctggcagttgaatagaagatgtttttttggaaccagttccctgaacagcccatctgcatcatcagtcctcacatgctttggactctggaaatgtgttctcaaacacaaagcatgatccagcttctgcaaatattttatcacacaacagcaaatcatttggcaattctatttaagagagactctgagtctggataagtaaaataagtgtgtggccacgaacttagataaattaaattatacctttggccttggattcagtttggtgtgcacactcagtcatttagtcggtctgcctcttggtgaccccattgggactgtagcccgccaggcttctctgtccatggtaattctccaggcaagaatattggagtggtttgccatttcctcctctggggcatcttctccacccagggaacaaacctgcctgtctagcatcttctgcattggcaagcgggttttttaccattgagtcacctgggaagccattcagtttagcaatgctacataagaagtataaagtaaaaggacatttagcaattattaaaagatgctgtggccacccagta

SEQ ID NO: 47700 - DNA, 659 bp, Bovine  19866880843704
  misc_feature (1)..(1): n is a, c, g, or t
naatttaacatagaatcccaattctatttcagtaaaaagatatttatttacatgaagcttgtcttgttccctcaaagtttaaaagttgctcacaaaaatacacaaatgaatgcactaaaagtaagtgggaaaaggagacaaataagtttaggtcacctaaaacaaagccacaggtgagttcaaaatatttgtgatacagatttgtagggaagagacaatggatattagaccacattaaacagaatacctatctcataacaccataaggtaatgtttacaaagttcctatatagtgctcagctcatagtaggtactcaataaatcttaactctctctatgctaccattaactggacttaaaactcttgatatacagccccattaaaggttaatcgtttaaaaataataagagtgttcagaatttctatttggctatcacaaaatgagttttatgataatatatacactcagaactacatcatccttcacttccttaatggggaagctcttaaaacttgctagcacagacagatctcatttcctagcaatcaacatctggtgattcacattttgcagcacaggcaaattacaggcatgttggccgtgtgcagtaattataacagtaagccaggacattaagtgaacttatgctattcatgg

SEQ ID NO: 47701 - DNA, 1065 bp, Bovine  19866881053165
  misc_feature (1)..(1): n is a, c, g, or t
natctgatattttagatgtatccatatttataaaagtgtaaagcacaatggaattatgctggaagtctcaaataatatttttcctactttatattcatggaagagatgagctaaagagagaacaataatgagaaatggtggtgtgtttttctaagcacttaagacataattgccaactgaaaccctaaaaatgtttacatgtcattaaggtttgcttcttgtaacaattttaaattgattatgaagggattgggtttgtaatctgtggtagtatgtatcctagttgccatagtgacgtaagtagggttgtgccaaagcttactttgtttatatcttaaattgttggattacatcatcaaagcagataaaagatatgcagaactggtttacctgattttcttttggctagaattaatattcatagtagaaccttattaaaatgtatttgtattgtaggtggtgtttgtattcttatgaatatgtatggtttaaaaatattttcagtatacaagaaattcaactttcccaataaacgttcaacttcacgtactctaaaaatgtttgccttttttctatccacataaggagagtcagaatttacatatcaaccttaccttcagttgcctctgatcctgggatatctgtaaatgaagtataaattaaaggtataagtaaggtattttgagctgaatgataatttttacaaatagaccatttaatatcatctacaaactgtaatatgccaataaactctacagttacgataaatgtaaaattaagatgaacatatattcctctgattggttttagaacaatgtgtaagtgttcctttgcaaggaaacatccaataggctgcactttccaccaaggctagtgggtaatcggaacacctgatccggctcagcagaaaaatctactgaaaattgtgatttctaaaaagcattttctgtgtactaagcagtttacatacagtatatatacttttttattccctcactcctcttagaaacactttagaaaggtggggttgtagtttaaagttgacttattcatgggtagaaactt

SEQ ID NO: 47702 - DNA, 1005 bp, Bovine  19866881103808
  misc_feature (1)..(1): n is a, c, g, or t
nggttctaaggtaatttctctacacacaggttcatgtgacagaaagaagcaatgtaacacttattttactaattcatattggggaggggttagggttagggttagggccttgaggtgtatttcgaattgttttttgagagaggcttttgcaccttgagttctcacctgaagggtgagctttagttaaaagcctcagtcacttgtaacaaagactctgcacaagtcaaagcagagtttctgctaaatttttgaaatgaacataaaccccttgaagccaaagctattggataaatataaaaatcaacagtcaatagatcttaatgagtgcagtgaatgaacctggtctcacatgacattttgtttataaaggagaaagtgtagaaatgatacatggtgtctaaaataattaaatcaccttcacagtataatacatttcaccatatcaaaagtaaagtacattttccccatttactatcttgatataaaactctcaatggtgggctcataaaaatcataggtttaaattttgttttagaggtaatgttccattctctcttcagatacaactttcaggtttatagaacaattgaatttatccagtagtttggagcatctctctgtaatagaaagataactatttttgcttgagcctagcatctgtatttgcatcaagaagcgttgatgatttagcttaaaaatatatatatatatactataaaaatgtcagcaaaatgattgcagtggtggcaatagtgactacaggccaataaagtgtaggaatcttgtacttctgtgttatttgttttctaagtcttatatctcccccccgcctcagttagttccttcaatatgtttctttcatttttggctaatttttgtctagtgtaccattttgatttcatttaactgccttttctgtatagtttcaattattctccaaatgtctgctaccatgaaaaagtaaacattttaaatattaacacccttaatttataaaaatatagt

SEQ ID NO: 47703 - DNA, 949 bp, Bovine  19866881246173
  misc_feature (1)..(1): n is a, c, g, or t
naatcaaagagtttatagatttaatggtagcctgttttcaatctccagtatagaatggaatccattttatataagtacaatatatatattccatatattttatggaatacatttcatataagtccatcagccaccatgtatctatttatttatttaaaactttttattttgaattgggacatagccaattaacaaacaatgttgtaataaattcaggtgaacagggaagggactcagctatacatatacatatatccattgtcccccaagtcaccatctatttaaatactaccaattagataatttttactatcactttgtgaatatattttgatactggagaattataaactctaacaaatagccctgtaaaatgtttgtatttagtattccccaatgtttaaaattcctatattttcataatcacatgctggtaaggttttataagcaatttgttttcttcttatattttgaatatatcttttaatgtgctttcaatttgtgtatttaataagctaattctaaatatgatgctaccaaggactcatatttaggaagtttccatttgttcaaaagcaagattgctacagaatggcctattccatttttagtatatcttattttttgttataacttacaaatagtatattaaagaaaggaactctgttgtacttggttgcaagcagactgcacacatacatatgttggtgtattgattggggcatttttagttatatttaacaaagtccactagaaccaatttaaagataacaaagaaatactatattcattttatgtatcacataaacataaaatgacaggaatgcatcagcaatgaagaaatgaactggaaaaaagggtccaaattctgaaaaaacattcattctgtctttcatatctgttctttttctttaatctgctttattttccttccgagtcacatgccatt

SEQ ID NO: 47704 - DNA, 1819 bp, Bovine  19866881339583
  misc_feature (1)..(1): n is a, c, g, or t
ntaaataagcagtggagggagtggagtgggtcttggctgttattcttacagctcccatggaagagcactgatcctttctcctagcagcttttctctccagcccttcttaattaccctaacttcttttaaacctttctctgtcccccaaagctaaccttggccctatttcctcaagttccatgctttaaaatgagggcatgtggtatttcacacgcaggaagtaaggactgaaagagctttaaatcactctgcctctgagttgacttattattgatttgaccatgatttttagtgcttttacccaaagaaagaaaagtgcaaataggtgtggaaaggcatcaatctgtaataaggctacagagatgtcactttctaatagaaacatatacagtgctatgaagaatatagggtattttcacacatcttctttgcatgcatgttcagttactctgtcatgtcaaactctttgcaaccccatacactgtctagatgccaggctcctctgtccatggaattctctaggtaaggatactgaagtggaatgccattcttatctccaagggatcttcctgatccagggatcaaacccaaatctcctgcactgcaggccgattctttaccatctaagccaccagagaagccccatgcattgttactattcccatttcgtagataaggaaataaaaattgtagatcgtaaatgacttgctcaaggaaacatggcagataagtaacaagttgcattttagcatagattgaatttagaattcacactctcagctcactatattctgtccatgtccaactttaatcctcagtgcttatgtgatgatccagattttgactggatatttagctattcagggatgttgcagataatgatgagaattattcatatttctttagcatagaccatatttaaaagaggctaaaaataatatgaaagagctgtatggtcaagtttcagagttgagtttgaaaagtcattctgagcagtagaatttcagtgaattttatttctttattgtgctttctaaattttcaagtgggtttacattattttttaaataaatagatttttaggagtttttaaatagattttaagggttttactagttaaatagatgacttgacaagctgaggcattttcccctccaaactggtcagaaaattgacccaaaactttccactttatttgataaaccttgaccgttctaaatttccaaacatcaccaaagattttgatttgataaattatcaaatacttaactcttttgtgtattttcttagacctctcaagttatatatatggcataggttatagtcatcttaagttctattataaaagggtacttataatattcttattcacgtatattattcaaagttcttcaattttcagttcagttcagttgctcagtcatgtccgactctttgcgaccccatgaatcgcagcacgccaggcctccctgtccaccaccaactcccggagttcactcagactcacatccatcgaatcagtgatgccatccagccatctcatcctctgtcgtccccttctcctcctgcccccaatccctcccagcatcagagtcttttccagtgagtcaactcttcacatgaggtggccaaaggactggagtttcagcttcagcatcattccttccaaagaaatcccagggctgatctccttcagaatggactggttggatctccctgcagtccaagggactctcaagagtcatctccaacaccacagttcaaaagcatcaattctttggcgctcagccttctacacagtccaactctcacatccata

SEQ ID NO: 47705 - DNA, 803 bp, Bovine  19866881812761
  misc_feature (1)..(1): n is a, c, g, or t
ncatccctgaattagaaagattccctggaagaggacttggcaatccactccagtattcttgcctggagattcccatggacagagatgtctggcgggctacaatctgtagggtcgcaaagagtcagacacaactgaagcaacttagcatgcacacacatgtgggcattaagaacatggactccgggttccaactgcccgggtttgaatactgactctgtcacttattatatgtgtgatttgaggcaagctggttaattcttctatagcctcaatctggtcatccaaaaaagggattatagcaacttcagagtgttattgtgaggctcattatgcaaatgctaccaatttctttctttcctttttttcttgctctcaagttttcacctgtctgctctgtgaagacagggagtagctatttcttatctaccatttgatctttagtccctagcacagtgcttgatgcatataaataaggtgttttctggttgcttggctgatgaataaataaatggccattaatttattcaaccagtctagcatcagtcttgtaaaactaggagatttcagcaataatagaacaaactgatttaaaatggtatctgtgattaaatattaaatagaggaggaccaaaaagtctattcataagtaacttttatcccagtgtttctctattcattggtagaggtatatattatgagtctcaaaaaaaaaaaaaatacagctcagtgaaatcagaggtttctttcaaaatcctctaccttttctttactcaaggatgacattttaaacagcaatgacagat

SEQ ID NO: 47706 - DNA, 862 bp, Bovine  19866880237511
  misc_feature (1)..(1): n is a, c, g, or t
naattttgaacactgtcaaattgacatcatagctccacttaacaaatcactgatgttcaatggagtgaactggaaaacgtgtggaaatctcacacgattgtcattaggcaatcatgacgtaggattagttgaagaatagaaatgaaatattatatttgttaacccatcagctggtactcctataacattacacatctgctattatgcaggcttactctgcaattacctaattgtgtgatttctactctctcagtaatcttataagattttatcatttaccctgtctcagacttgaggtaattcctgtgtctcaatatacaggactgtgtaacagcagactcatcaacacctactcgcaccccatttttggaactgctttatagatatgtcctattctcttttctataaaaatatttatttttaatctcactaataaagggcttcattcattaactattttgtattttaggtcttagtcccagatcaccttctctccacagacaatttagattcccatcacttcatgggaaatagatggggaaacagtggaaacagtggcagactttatttttctgggctccaaaatcactacagatggtgactgcagccatgaaattaaaagacgcttactccttggaaggaaagttatgaccaacctagatagcatattcagaagcagagacattactttgccaacaaaggttcatctagtcaaggctatggtttttccagtggtcatgtatggatgtgagagttggactgtgaagaaggatgagcactgaagaatcgatgcttttgaactgtggtgttggagaagactcttgagagtcccttggactgcaaggagatccaaccagtccat

SEQ ID NO: 47707 - DNA, 1848 bp, Bovine  19866880347716
  misc_feature (1)..(1): n is a, c, g, or t
ntcgctcagtctgtccgactctttgtgaccccatgaatcgcagcacaccaggcctccttgtccatcaccaacgcccggagttcacccagactcacatccatcgagtcagtgatgccatccagccatctcatcctctgtcgtccccttctcctcctgcccccaatccctcccagcatcagagtcttttccaatgagtcaattcttcgcatgatgtggccaaagtactggagtttcagctttagcatcactccttccaaagaacacctagggctgatttccttcagaatggactggttggatctccttgcagtccaagggactctcaagagtcttctccaacaccacagttcaaaagcaccaattcttcggcgctcagctttcttcacaatccaactctcacatctatacatgaccacaggaaaaaccacagccttgactagacggacctttgttggcaaagtaatgtctctacttttcaatatgctatctaggttggtccttacactgctatgtataaaatagatagcaaatgagaacctactgtacagcacagggagctactcagtgctctatggtgacaaagagaggatatatgtatacatatagctgattcacttttctgtacagaggaaacctacacaacactgcaaaagcaactagactccaattttaaaaaatcgtgactgacacccagatagtcagaaaagactgccctaagggtacatggtacttcccttcagaagacctgagcagaagtggctgtccagggagcctcgtcattatttcagttttgtagcccccagaagaaatcgttctgcgtgccgctgttcgtcttcacagcgtgttgctgtttctcctgtgttaagagaaaactctcaataggcaggttggttataggagggattttcaaccaaaaattaaatattagcacccaagcaccctgggcttccctgatagctcagttggtaaagaatccacctgcaatgcaggagaccctgatacgattcctgggtcggacgatctgctggagaagggacaggcttcccaccccctggtggctcagacagtaaagactctgtctgcaatgtgggaggccttggtctaatctctgggttgggaagatctcctggagaagggaaaagtcacccactccagtattctggccaggagaatactttgcaacttccacggggtcgcaaagagttgcacacgactgagtgactttcactttcacccaagcacccagagcatctatgtgacattccctggctttccccccaccccccatttaaaggtgatgcccatattattctgtctcggcactgtccgtcacagcacagataacagcccttaagtccttgatttgtttgtttacctgtttatcaccttttccactagactaggctccctgagggcaagggctgagtcagttctgtttactcctctctcagctctcagcaaaacaacacaaagcatatacgtttaataaacagctgttgagtgaaaaaatgcatgaacagaaagtctagtatgatccagttctaccaaatccaagatggggaaatggatttctggctggtttctgtgctgaacatcctttcaggagtgaacagggctattaatactactgctgtttttcaatagagtccaattataattactgttcatttacctgtgttctcctggaaggactacttaagccaattactaacattaaaacatagaaatgtgaaatttcactgttgagatggcaatctatttaaaatgtcctaattttactctcttgttagaaggttctcctgacaaacctctttataacagctgagtcctcccctaattgagcctaat

SEQ ID NO: 47708 - DNA, 1190 bp, Bovine  19866880454268
  misc_feature (1)..(1): n is a, c, g, or t
nttcaggacttatttcctttaggattgactggtttgatcttgcagtccaagggactctcaagagtcttctccaacaccccatttcaaaagcatcaatgctttggcactcagccttctttatggtccaactctctcatccagacatgactgctggaaaaaaccatagttttgactagacggacctttgtcactcaagtgtgacctcatcttaactaattaatatggaaataacctgatttccaaataaagccacacaccctgaggtcctggggagttaggacttcaacatatgaatttgggggaacacaattaaacccataacacagtcatgctccacatcgtccttcatgctctccttgttcaggaccttggctccttgctgccttcctcttccttgttttctacggtctgctgaaaactagtgtctcataagcccacacccaggagtcacctacaacactgctctgtatgctctgtattctttgctgacgttgcaccttataattcaggccttgtgctctgaagggaaggagatttgctatcttgggagccctccagattataaagaacaaacaggacaaattgtttgaaggaccttttgatgactcactcatcattcctaccctactattgtctttgcacgtttctccttactcactgacctttcttcttggcaaactgctccagacaaagtgctcaccttctctttcaactcagcccacccagcagagggatactgtgtgtgggccatgcattggaatgatcagcatgggcaccatggagcaaggttaacaaggaccagttttaattcttcacacccctcctctccatttatattttcaacatatggttggctttataatgttgctttaatgttttctcttgtatttaattatttaaagatttaataacaaactgctgagaatcaatcgcacacaagggacacattgctttgaattcttgctctttttttctgcttttacgtaagagtgaatttaagtcactggaaactaaaaacacaaagctaaagggggaagagaagagaatgacttaaatactttcagaaaagggtatctggaggtgaaatcaaactctcaacaatatctgatacctatctcttatcagcaatggacagtggtgataaccaaggagcatcaaaacaagcagctttgattccattttctttctaa

SEQ ID NO: 47709 - DNA, 2886 bp, Bovine  19866880498950
  misc_feature (1)..(1): n is a, c, g, or t
ntgattcttgtgatagcaacagcatctcccagctcttcttttaactgttcatatgatttcccctgcctaggaagaagatatagaaaacaggatgagatgctgcttatagtggagggacgtctcaggtctggtctataacccttgagagaagcaaaacagccaggggacagaagacatttcagagataagcagaaaggaaaatcccctcttccaggtctatgcagggttggaaggtacttaaacatgatctgcactctttgctggtgactcctcaatattccatactaagagcagttgactaggagtcagaaaacctggcttcttcctactggttgtgactgtagacaagtaacttctctgagcttcctcatttgtaacacaggcaacaatgttcccctggctatcaggatgtaatgtgtgtggacagacttcacaaactttactacttctcacgttgcctgttcctgaggcacgctgtgaatttgctgactagacttaactgctgtgcagggtgcgaaagagaaggaaggtaaaaacgggagaggggagaagggagtgggggggtacagtcctgggttgactcggccctcgagtaccctgccatccttctgaggtgtcagtgctgagcaccctggcagtaagaacatctccctgcttctctgttcttacgctccaaacgtgagggtcccaggccaggaaccagcctgtgaagatgggaggctcgaatccctgtttaacgatcaggatcggtgtgccggtgtctcggccgctggggtgagtgtgcaggtactcctgggcggtagacagagcactcttcttctctgcagcgttggcctcagccccgatccacaggaacacctgttgttgtagagacctgttactgcgctcatgccagaggctagtgctagatagtacgcactgccccgtctttccccgtcagcagtttacagcctcagcagagtaaagtttttctcagatttgttttgatttgtgtatctcccacatctacatctccagtcctgaactctctgaacgtcagcttcctgaatccagcttcttgcaaaacatctcctctcggctgtctccaagcacctcaagtataacacccccaacatgtagctcttttctaaacttgtatctgtgtctccattcttggggaatggtgtccattcagtcacccaaggcagtaacctgggaatcattctgaatgcagtctgtatccccaggacttagctagtttacctctcatgcttttgtcaaatctgtcgccatccatccagctctactccactgcttctgtgggccagcagcagctctttctggactaggaccatgtgtgctgacgggcctcccaacgtacagtcttcttttttctcacaccccctccctcgtctcctacactcgctagagtgagtgatctaaagcacaatctgaccatgtcactcacctgcttaaatttcagtagctttccagggtaagttccaaacttcttgacttggttggtaaggtccatacctacttctttagcttcacctctagggcactctttaactctgtcttatactctgataatactctttgtagttccctatatactagactatttcctgccctgcttttcttttgcctggaatggcctctttacctgattaatacctgtttctccttggagtctgggagacatctcctccagagagtcttctctgagcccccaaactgtgttgaataccctaatttgtgctcctgaggcacttcatatgtacctccatcacagtaaaatgatgatcctccatctggtctcctccaccctccgtcagcctgtagactctgagagtggggtggggccctttgccttagcgacaccacgcccagcacagtgattagaaaggaagaggtgtttgctgagccaaattgaagaaaaccggatgtggcagaggggtggccttgaagatgtccccttttatccctttattcccccaaaggcccatatctccaggtgtgcagcctactgctcttggtcctgagagaatggagtgtgtgataggatggcatgatattcccagagcatagtggggaaattcccaggatggtgagttttaaacaacattctattctctccagccctggcaaaaaagcaggctcttccttcggtcaccactgacaattgtttgattgacttggggatggtccagggctaccctggcttacctggggtttgggggagagatactatacaaaaaaatagcctaaagcttgaggatgtctgtcatttgttccaagctctccggctgtgtcttacctggtcccaggtatccaggagcatcacgtcacctgggttcaggtcgtcctgggtaaagtctatgatctcagtgacagtgaaccggccagtcttattggaacattcaaagagacgagactggacatctaggatctcctgctgtagtctgcaatacagtccatgtagaggagctgagctgcttggaaatcacctgcagttcaccagtctgggaggcagggggagccaaacggaggggatgctgtggtcctgtaccttttgtcactggcatagggagttttccctcccagcaggtcccagaactcagctggctcctggccctcagccactgtgttctcagtaccgtcacagagaagtccggccagctccttagccatcgcccgctcatccccactagacccctgagaacggggtggggagaacacagatgtgagtcacacacaggcacgttgatgtgggaataaagtgcttagactaataactcagtgtagaaggaaatggcaacccactccagtgttcttgcctggagaatcccagggacgggaaagcctggtgggctgccgtctatggggtcacacagagtggacacg

SEQ ID NO: 47710 - DNA, 812 bp, Bovine  19866880525084
  misc_feature (1)..(1): n is a, c, g, or t
naaatactgtaggtccttctttgaagaaccaaaccaatgtgctcccagcaattttttttttttttttaaagaggacactggacttttgaacccatttcagttctgtaaaactctcaggtgcttcagtaatactgcacttagtatggtgcctgatacttgatatacactaagtagaatttattaataataattgtttcactgttaacactctttaagaggggtcaggttagaaaagcagtaaccagtacctaactttctcatccaacaatacttttacttacctgttttttgctttcagcatttgaaaaccttaatatctttttttttttttttgcttacgtcatgtaatttgctgtgcatttaaattctcagacgggacatctatgtgaaaagttgatgttagaggcacttgggttccttatattttcctgtaattttaacaggctcatagattctttagaagcggtggtggggggctccggagttgtctaggccttttcacccccatcactgaccagaaacctctgtgccatcaattgaccagagtgttttagagctctgttggaacaggttatctttgaagccctttgaggctaccaggcccttgtatcgactgctgtaattgttggaaaaaccttttctcatgccgagttgaaatgtgctccatgtaacttctgccctttggtccttgttctgctctctgaagaaatgttggcagaatctattcccacatgacaccccttcagatacttgaaattattgtggccttagttaaatcttttttttttttttaactttaatctttttatttt

SEQ ID NO: 47711 - DNA, 2312 bp, Bovine  19866880545346
  misc_feature (1)..(1): n is a, c, g, or t
naatgtttgtgagagttggacctaaagaaagctgagtgccaaagaattgatacttttgaactatggtgttggagaagactcctgagagtcccttggactgcaaggaaatcaaacaagtccaacctaaaggaaatcagtcctgaatattcattggaaggactgatgctgaagctgaagctccaatactttggccatctgatgcaaagaactgactcatttgaaaagaccctgatgctgggaaagattgaaggcaggaggagaggggaacaacagaagatgagatggttagatggcatcaccaactagatggacatgagtttgagcaagttctgggagctggtgatggacagggaagcctggcataatgcagtccatggggtcgcaaagagttggacatgtctgagtgactgaactgactgaccggcttttaattttatctgaactcggtgagcccttcagaggattttgctcctgcagtaatttgcctctttgtgagcatgtctgaaaggcagcatgtcttggcttctacttagataattttctcttagaatatgagacccaaccagaactaaaaatgtcttaaaaatctctcgatgaagtttgtttttaagaagcttcaaaaaaaaaaaaaaaaaagtttcaaagtgaattacaattgtataagcagcccttaagaacctcagtgagaacaagatgaaaatctttcccaaatgtgatcccaaaatgtaataggtgtagggccccaagtccattaagtaaccctattagtccttgcagagtcaagacataaaccatatagcatattcctctctaattacagacatcagctatccattcgtgggggtgtattttatgttggccaacacaggagccacaaggaggtcaaagtcaccttgttttctgaaatctgttaccatctggtgaatttccagcaaattttaggaacattctgtccctcctcaaggaggctgaaccacagtaaccattcataggatctcaaaaaggaaagcaaatctatgtccaagccagaaaaatgccggaactcaaatagcctactcctcccaaggcgagctcctcttatgcctgagaagaggttccaagttcattatctatttaaaagattcaaatgatttaccttcacaaaaaagtgaattgttacctaattaactgtcgtgtcagagttgctttccttgtcaaacaagcactcagtgctgctgatatgaatgacattacaaccgtattttagctaagaaaacacacagacctgttgagatatggttcatctctccaatcagaaagttggtacaaaggagacagcaagaagaaaaccaaagagctagagtccaatcaaattaatcacattttgcaaatggattttcctatgaatcagtgaccagaagaaaactcaaactgaatataactttcaatgactcatggccaaagaaatcgggagcacaactagctgagaagtggaaattttccctgcaagacccagagcccagagttagtgacattccatctctatatcaggaaagatcaccttaagatttctgtcattctggccacacaggtcggtggcggagtgtttactgggcccctccaccagcaccagttaggtacaatccacaaaggtcttgctggatttcattgcttcttctcagaagacagttttacattcctctgaatgccttaaatttacctctggtgggatatcatgattgattccttgacttttttctttttgcttataaataattctttatgtctcccccatgcaatggagggcagagcagggggttgtatccctgccctcatgcagggaatggaggtcaatgtatactgatcttattgccagctgccctgtggccttgcggtgggaaatggtggggggtggtctacagccccctttcttctaacattggtctctcttcaccacatcaccatagtggagctgaggggctggaggtgctaggagctgaggtaaggatgcttatctagggaaaaaaaaaatgtccccacctacctgcccactggttgccccaggaaagggctggaatgtatccagatgtctctgcccagtgggcagtagaggctagacaatgtctccagattgggctgcctacagaaatcctcactggaggggacagtgtgccccaaacatcttgtccaggtggtacctccagcagcgatgacagtcatgaaaacatgacggattactcgacttcgaacatttgtgtattgatttatactttttgaatttaagacaaggcaaattgctcaaaataaactattctcggaaagcattccaaaga

SEQ ID NO: 47712 - DNA, 1371 bp, Bovine  19866880559802
  misc_feature (1)..(1): n is a, c, g, or t
natgtgcctctgatgagaagggaaaaaactttctaaatcaagacacaaaatgaaaaagcagagtgtgatggcattgggaagcagtagagagaatataagggattagttaactggaagaatcaaatagcattattgttctgaatatgccaagatcatattaatctgaaatatgaaaatagtgctggcagtcatatcttgggtttatatcacactcttcaaggagatatttccaatacaaagtcattcaccttggctgtgaatgctggcagagataatattgccctaatccaaattatgaattgatcttcatgagtcatttgtcctgaaattttaagcagacactctaccttgttccctgttaaaattttctgtactggtgaagctacaggataaatgcaggaagtatcaactgctgtcatggattaaaattatttctaaattgttactagctgcctttcttgttgtgacactagggtagttacaatgagtccaacaaactaataccccctttaagtcctattagaaattcttgatactttcaacatgtgacactacatcttcaaaaaattttggaaagtaacttatttcctctaaatgtatcaaagtctttaaaaagtgataattatatatataactgaatataaccatgtataatctaatatatatatttatataacatatttatataactgatgatgggagtaaagtccgatgctgtaaagaacaatattgaataggaatctggaatattatgtccatgaatcaaggtaaattggaagtggtcaaacaggatatggcaagagtgagcatcaacattttaggaatcagtgaagtaaaatggactggaatggatgaatttaactcagatgaccattatatctactgatgcaggtaagaatcccatagaagaaatggagtagccatcatagtcaacaaaagagtccgaaatgcaggttttgggtgcaatctcaaaaatgacagaatgatctctcttcatttccaaggcaaaccattcaatatcacagtaatccaagtctatgcccccaatgaataatgctgaagaagctgaagctgaatagctctatgaagatctacaagaccttctggaagtaacgcccccaaaagatatccttttcatcataagggactggaatgcaaaagtgggatcaagagatacctggagtaacaggcaaatttggtcttggagtacaaaatgaagcagggcaaaggatagcagaattatctattgccaagagaatgcactggtcatagcaaacaccctcttccaacaacacaagagaagactctacacttggacatcaccagatggtcaatatcgaaatcagattgattatattctttgcagtgaaa

SEQ ID NO: 47713 - DNA, 1661 bp, Bovine  19866880569073
  misc_feature (1)..(1): n is a, c, g, or t
naaacttaagttgtgcctatgatctgccgtcaccgtttaggtgctaaaaagctgagaatgtgatggtgaacaatacagacaagctccctgcttttgaaggtgtcggggagtggggcggagagacagtgagtgaccaagtacaaaaggactgtaggcgctgagggaggcagggtcgggtggtcagggaaggccctcctggggaggtgaccctgcagctgtgacctaaacaatgaggcggacctggctttctgatgatctgggagagggatgttttttcaggcaggagcagtagccagcagaaaggctcatgtttgaggaacagaaaaacagcaactggctaaagggctgtcagtgaagacagtactggcctgtaagacgaaatcaggtgggcaggggccaggttgtatagggccttggaggccatcgcgaggactctggattttaagtgcagtgggaagccattcgaggtgtgttaaatagaagagtatcatctgctataaaaacccactggtggttatatggggatcagattgtagggacagaggtgaaaattcactgggggcctatggcagtggtccatgatggctggaccatactggcagcagagagatggagagcagtgggtggcagctagctgatgggttgatgtgggaggtgaggaaaaagaatcaagaaggagccctgggtttctggcttgagctcctgggtaggtcagttgtctgctgagtatttacactgttggccgtactccgagatggtgcttctgcagcgctccactcatgtcagtcactcacctcctttttggcagggttcacatcctctggcaactcctgactctgatttttcaacagaacttctagggggtaatattttggctcagaattcagggcaagggttgtgtctctcatatcctagggaagataagaatgtagacacaataaaagaccactcaggtctgtgcaattgaagttctatgtttataacattaaatttttttttttttaccacttcatgctttataatcatcttttagaacagtggtcccctatgctggctgcatgtcagagtcatctggaaatctaaaatagtttagtttgggggttcttgagaagctgattcagtgagtctaaggtaaatcctgtatagtcagttggcgtaaatgttttgcataaatctcacttaaatactgtgatcacatcccttctcttggtacttttacttgggctctacatttctggccttgagatggtttcaaattgaagtcatatttctcttaaatacattttaaagatgctacgttgccatgagttttgaaatcttgagtttgtagagcacaaacagcaaaacaccagatggtttggacagtggtgctgtgcactgtcctgatgctaaagagctgctgggttctcggccaggagctccacttctgggggccgttaaaacaggggtaatggcctgagtttctgtggatgccactgtcagaaactaatagtgtcacctgggttacaagcttattatttctgaaaaatactactagttaatttaatctctcctgagtgacagagttgaataattcgatttggtaacagcaaggtctgttctaaattctggaaggaagtaaaataaggaactcggctctgaagcctgctctttctaccgat

SEQ ID NO: 47714 - DNA, 1195 bp, Bovine  19866880658634
  misc_feature (1)..(1): n is a, c, g, or t
ntggaggaattaagatcccacatgtcatgtggtgcagcccaaaggaaaaaccaaaaccaaaaaaacacgctgaacaaaatgcttagtgaaaattatttccagtttggaagcctattcttggtcaactattaattgtgagggtagaataaaggcattttagacacaccagaatttggaaaatgtacctcccacatgcccttttttagagaactaaagcaaaacgctggacactcgttgggtggtttcagagcttcgagtcttccctacttatccaagttgtcttcagtatccagccttacctcaggcagcttgctgtgtttaagggaaacttgaactcaccccccttatccacgggtgggcctgattagtataaagctaattcttcttcccttatattggttcccatactcaggcacgtaaagtcaaatcacagcactccccccagccacagggattggttcaggaatccatgtgtgagatgatctggccagggacatgcaagaagattgttgctaggtgttctctggaaaagaagtgtctctaccccaaaaacatgaccagaaaaaatgcccactctttcttcagaccagtggtgtggcaatggaagtctcaagctgcctcagacatttcataagagaagttgccctaaggataaagccaagcacgagggaaacccagacaagcttttcttaggacctgagcctctagatccttcccagcctaaagccagtcctatctctgggctcccagttcactgagttaagatactgtaaagtaaaaaaaagaaaatcatacaagcttattttcagatgcagacacatcttgattactcaaatgaaggagacacatagaatataccaaagaatggataattctcaagccatttataaagtaacacaatgatggataaaaatgataagacatgaactcttggttaattaaaatttttgcttaataaaaaataaaaaaaaaaacctgtttgtttttttttttttaaaaaagaaatactcttaagagttcaagcctcctcagcagtttccctgttacctgcagctgaaagctttatggagactgtggattcaatccaaagtgtgtacgtgggaacatgaaggaacagaatgaacactccacaggggttcagaggactgctggctcagactacagagaggccagggactcccaagaggggaactca

SEQ ID NO: 47715 - DNA, 1692 bp, Bovine  19866880667794
  misc_feature (1)..(1): n is a, c, g, or t
nttaattccctattatatggcaggcgactcgctggaactttctcaaatattttcttatcaaatcttctagcaatcctgtgactcagatcggatgcggaaaccagctcagggaggtagagtgatgttcccaaggtcacacagatcattaaaataaatagaagtgaccagagatttgcataatcaagatatctcacctgctcatggagtaatactaaggactatttaacatggtaaaccattcttagattctgccaatgactggcaatagtaacaaagccttcaaagacctggagcctaatgggcatttgaatgtttgttttatgagatggtaatgatctcaactaggtttctgctaacaaaaagttcaagtctcctgaaatggaacactgtattatagattaaataaccttagaaagataataagaaatattcttcaaatataagaagtataagcataatttacaaatttatcaccagaaacaactacatcaaaacctatgagtttgcaacaaaggatgtgggttagatggtggtgagaaaatgacactcaggagaaagaaatcaatttccattagtcaaatttcatggattaaatgaatgagcatgctagataaaaagtaaaagttaatggaattttgaagcaattcaataaatatttagagacactctagctacctagtggcaaaacaggcataaggttttgggggaaaataatcaaaaagcataattatattagaactgaagattgttgatgtcatggaattaagtatcaattaaacaatgaaaaatatttagtgagctctagttaaatgcccaatgccccagttctctttggcaaccaccccccttcaaaagaaatatcaagagacataagcatgcaatgccctggatgactggatgttggatgggacgaaggcagagagaagcggtccctgtccccatgctaggagttcacaattggttgtggtgacaggtacacatacttagatctttagcatcaagtagagcatagaaactgttttgagttttagtacttgtgcccttgtgccttgtaagcagagaagttaacattcactgggaccgttagttgcagtatttggaggaaagattagagtggaagatacgacccctgtcccagattaccgacagactggttgggacaaagctaacacactgggacattgattttgacttattctgcctatggggagactgcctcaaatctaaagcaagacttctccctgtgtcttaaagttctcccaacattacagtatctacttcaactttaaggacaaaaggctgagataatttgttggggatcaccatcatttggactcctctttaaagtcatggtggttgttgaatttacacgagatatttaaaatttccttggacaaaaccagctgtgactgatcagaagtagaagataatgtaagaatgcttacagaaaataagacaaaacaattcttccccaaactcacacagactcattggctaacagcatacagtacaatgcttctaacccttcaccagctaagctatgagtgagtggtttccctggttgtgatgctataatgggagccatctgcattctctttctttcctctgcatattcttagcagtaggcctagtccagatatgtgagctggcgaaaaatctggccagcaagttgcaagaacaagcatgaggcca

SEQ ID NO: 47716 - DNA, 928 bp, Bovine  19866880686598
  misc_feature (1)..(1): n is a, c, g, or t
ncctgctatgtctgactcaaaggaacactggaaacaggggattccaaaaatccttccctcctgtgactcagtagaagtcatgtcataggctttctattctctttaagaaacaataatattcttcatgttatttgatggaaaattaactttgatattctaattttctttgacatcaggtattatcagcattatggtcagaatgccagtggctcctaagggcataatgaaattgttttgatggtttatagtccttgagagcgtgaaaaatatagctagacatcttgtcaaaggtattagattgatttttctctgttaccgtccttgttttatactaacagaaactctctttactgcatttccccccacaaatattcctaaatgcatcatttctatattttaccttttttcagatacaaggaatccataaagtaggcagacagtgttattttaatgaatttctacgtgctctaaaatattagtttatccagtaacttgaaacaagtacattaaatgattagcattgtatattcaggacagctttatcatctgagaactggtgttttttcaatcctaagggtatgtatcttaaagtaagtagaattttgctattttgcttgtatttgcacgtatggcagggaactttcttctttctaactttttactttcctaaaatatcttaagttagctccccctctagctttaacattatctatcttcctccctctcttccttttttttctaacagttttacaaaagtagccctaagatatccaaaactagatccaaaagataagttttattcctttttttttacataggaattatgtttagctggtaatgggccacaaaataatgtttaaaaatgaatacagtattcatttattcatcactccttctagagcaagctttatggaaagctatgaattca

SEQ ID NO: 47717 - DNA, 987 bp, Bovine  19866880697142
  misc_feature (1)..(1): n is a, c, g, or t
ngtcagcgaacatcagaaactgcgtgtctgcgcaggggagcaagagaaaagtgcgcccaagaatttggaaaccagggaataaaagcacccactgcacctagtgggctaggataaagacatgaaagtcacttttgagaatgactttaaatgaagtcagcaagactggactgtaacctgattagctgtattaacatatctaaagagagaacttatcattcagaactgcagtctgccagcagaggaagaacagaaaatggaaagtcagagaggcagacattggcgacattgccctcctggaacttcccaggggaggaggaatctgaactaaggactttgaatatttcttgcccattggcaaaccatctgcatggtgggatgttatctcaggctgtctacccaatgtcactacacagtcaaagtgtagaactgacttactttgtgagcatctcatacttctcatgaaatgtgattataatttagctccccatagagttttcttggggcttccctggtggctcagatggtaaagaatctgcctggaatgcaggagacctgggttcaatccctgcgttgggatgatcccctggagaaggggatgactccagtatttttgcctggagaaaaagtaacacatgggactgaagatgctactaacctttctgaggcttacatttaccatggtaaaatcagaagctggttttctcgttgatgcttcagtcttttgtgaacttagtaagccagggtcagcttccctgagcctgatgatctctgggacttgagcttggaatgccccaggtccacaccaggaccacctcaggcagcaatgagcccagcaaggcaacgtgtgtcaccagtggtcaccctcgtgacctgggaccttgctgcacacctcccactcaccatggggaaagaggaaaatctaggaacaggaaccacacactgggtttgagtttcaagcgaacgggaggagttttgccctgattgaat

SEQ ID NO: 47718 - DNA, 4327 bp, Bovine  19866880703643
  misc_feature (1)..(1): n is a, c, g, or t
ntccctgggcttggtattgaacgtggaccatacagacaggtggagaaactgtcctttccctctgatttctgcatagattattcagagtaggaaaaagtccaaggaactcttaccttgcggtctttaagtactggtctctgctcacaggtttgtctcctggacgcaggggccttgggcaaggtctccaatgcagcttcttccttcggaccaggatccccagtccctggaaatcttgctttttccaccagggccaggagctcaaaagtgatatccaggtttttaggctaatcgctggggaagcctgaacatgttctgaaagattgtaagtggtcataccagtgtcaggggatctgcctgatccagggaggggagacggctagactggaccgactggtgcctgatctcagcctctctgttgagccagagctgagtcaattgttccggggcggtgctgactgccacttgactgatggtcaacagccatttcctcatccttggtcccaggaacagagtttggttttccctcctctccaggggctcaggcagtccaggaactgggtgttaaacgtctcttccatcacttatataggagtggcctctgagcaggtgcagcatgccctctgaggactgagccgagggagcttggccttgctgggatggcggtttgggtaccaccttgcctcccctttcctttcttaaacccaacagcgcatggaaggttgtcctcattggtagcattctgtttgtcccctaccctcaccagagatggaggtatttccagtgcttattttcctgcattggagtttgccttaagccttaaagtggagtggggacccaggagagcaggcctgtggccgaggaccgttctggcagcggtggtgcagtgccacctcctggccacggtacacatcctgacttcctactgtggctccagttgctgaaacagttcatctaaaaataaaaggaacttgaaaaagattttccaaagtctggttctggttgatcctgtaacacctatagctttttgtatcagcttgacctttctggggctgctttaccaagcctccaattaagatggctttgtatttccaaagcccaaattgtcaaggcaggacttagcagttacagcctagaagcagggacatcaacccagaacccagcgctggatgtatgtgtcccaagagagtgaccttcttgtggtcttggaggagagggagtggtaaggaaagtggctggaatgtgggaagggcacggggtgtgaacaaagcatgtaagttcttcttgagactgaagctgttctgctttctagtctgggcttagtgctgccaactgatcgggcattgaaggaagctgatccaggacaggacaggagttctgctaacttgaaggggtctagctcactcccttctctagaattggtagtcttctgggaactggtgatagggaggatttggggttttgtgaattcatcttgagggatcccttagtgtgctgttaccaaagtggattctgtacctggccccatctttcagtgccccttcccccactgtgcaattaagagcaagttttatgcagctcatttcccaaaccagggactggggattcctgtgtttctactttacagagatgatggaataaacatgtacatttcactgttgaccgtatttggttgttcaccttgcccgtgccatgtgccccagtggagcttacagactagagggaatacagcatgggaagtgggcttctgtggatgtcctgtagctaatgtctcttatcgctccctcctttctaggcctggtgtccaagtcctctcctaagaagccgcgtggccgtaacatcttcaaggcccttttctgctgttttcgtgcccagcatgttggccagtcaacctcctccactgagctctccccctacaaggaggaagccaacaccattgctaaggtagctggatccaaggtggtgtggtgccagcaaggatgtgactgccatgggcgagaaagggtcaatgtaaccatagcaggagggcaagccagccttgcctgcgtcagatctctgacccagaggaggcccttcctctgtcctttccatcgtgggccatcttcttcctgttgattcccatttgtggtgtgggccaccttggatgtccttgtggtttctgagggcccctgtaatccagatccttccaagttcctggaactgtccaaggcactttgcatatgttgtctcatatgacccatagcagccttgcaaatagactcaaggatttcagctcacagacatgaaaactgaaacccagagggtatatgtagccctgaagagttattggttggtaaatagtagtatcaaggtttgaactcagatctctctggctgtaagtcctgtgacttgtttttatttttaactaagcaaagataacctccaagttatctttcagggaactttcagggaaccaaggaattgaaagtctgtcatatttcttgataaccccttgcagcactctgacctgtacctgttagagacatttggaaatatgtagggtgtctttgattctcataattaccagaaaatacatctggcatctcagaggtggggacagaaattattctttccccctaggccattggtatttctttctgaaccaccaagttttagctgtccttcctctctttcaaagccaggctatagacatgaacttcactatccaaaacagggaatgggttcagtgaagtacaaggtgacagtattaactgaactgttaacttttaccaagagttcacaacaatgtggaagtgttgagttgcaacattaagtcaaaaagcagaaaggaaaattatgtatcataagggggaaagactgctaaaacaagcttgaaggaaatgcagtaaaatgccaacattgtttctctaagtgctcggattttcatttttcttcagggtttccattaagatcacttatttgctacaaccataacatttttattattagccaaaggcaggaaaacggttctgatctctctgcactctatctcccttcacattttaggaccacagtatgggttcacatcggcttacttgtgttctgtaggggctcagcgtgttcacacacacacacacccgccatctatgcccccagcggagaacatagggaaaagacaggttctcaaagaaaagcctggtttctggactaagcaagaggctaagcctctgtaataaggggttctggtttggattctggctctgtgcacctgcatcagctgcgtcagttccctgttcctctgagaggcaatggtagccgagctcagggacgctgccttctccatccttcatcaggcctagtacggaagggagacttcggcccctttcctgcccagctctgaaggaaagtcacttctgttatgtcagggttttccaaggggctgggatcttagggagaagattgccctgcagggctgagtgggctttagacggccaggaaaggcattagtggctggcactgaccacctccttttctcccgtagtcggatctgctccagtgtctccagtaccagttttaccaggtatgtgactctgacagggcaggtgctcagaagccctgagacccagtgagccctgctaacctcatgtggtgacatcctgagtccttgtatcttgcgggctagctccccacctgggaagctgtttgtcccagacatttgctgacggcccactatgtgcaaggcattagatcgttgaggggacagctggcctccaccctgtggagctgatcaccagccctggctccctctccagtatctggatcacatcacagtccctggggaaggctgaagcagggagttagtctctactttttctcctcttggtcttctagtgtcacctctcttgggttgaagtggggggcatctttcgtctcctcaacgggcctagctcttcccagagttctgttgagggaaagtaatctttcttggtggcagattcagcaccttggctctggttttagattccagggacctgcttgctcccagaggtgacagaggaagatcaaggaagaatctgcgtggtcattgacttggatgaaacccttgtgcatagctcctttaaggtaacgtggcctctggagcccttcctcacccatctggggctgtcctgggaacctgactcaggtgccatgaattggcctaaagttgatgctggaagagtgattagagacaggagggccggcctctgggatttggccacactggcatcgcagatacctggaggccactccagagaatgttgagcgggagctcctgctctctctggtcactgccaacaggctgcagctgccc

SEQ ID NO: 47719 - DNA, 658 bp, Bovine  19866880725094
  misc_feature (1)..(1): n is a, c, g, or t
nttccttagtggtggggccttgtggatagagagaagctactcctgccagggccccaccacaggattgaaggctggggtgggcaggaggatgtggcggatggtgttgccatggcagcacttcctccctgtgttgtcatcattgctttaatggcactaaggaggtagagcggaaggtgtgtgtgtgtgggggagacaggaacaggagcacggggaggaaaggggaccgaggagagtcctggggacttctctgcactttcagctgtgcagagcatgctgtgtgagtgttatgtgtgtctgggagcctgagatactccgagtggtgtatttctggtatgcgtgcatgtgtgtgttctctctacagctggaaaacaagaggtcactgatccttcgtgggtcctgggaatgaccatattatccggtcctggaacctcctgtcccaaactgcttcctgccccagactcccccagcagggtccaagtctaccacgggtctgtcacggcctgtcttcctcatgctcacccacttctccattgccaaggtcagctcagcagtgatctgtattttgatcccctgggaggatgagcagagttggggaaagaagaagaatgacacctcctctgtctttttacatcctttccagatgtattctttccccaag

SEQ ID NO: 47720 - DNA, 2233 bp, Bovine  19866880726906
  misc_feature (1)..(1): n is a, c, g, or t
naatatcccctggaggaggacatggaaatccattccagtattcttgcctagagaatgccatggacggagaagcctcgtgggctacagtccatagggttgcacagagttggacacgactgaagcaagtaagcagcagcagtctaaacctcgtattttataaatgggactgctgaagcctagatgtgacacattgaggccagagaggtaattaatagtcaacgttggacaaggtcccagttttccaaccattcagtgttctttccaacatcaccctgtacctctgtcaacaactctgctttatcgactaagaaagagttcatcaagtcaaatcccaggaaaataattcctactgtgcagtctattaagttaagtcagcctttctacttaagttgcattttaagtgatttccattttcagtgcaacgggttggagatcccacttacagtcagaatagttaatcaatggctggattgtgtggtagccatagaggtgccccaatacacatctccctttaagagaactttctatgaaggacatagctccctaaaaacctccaactctcacacttttgtgtccacccaggggcaacatttgcaccaagaccacattttcctagggctgttctcagaaactgaacttggtggggcaattcctatccaacatggaattattctaaagcaaagttaagttaaaaagtttaagtattttttttttctctaaagtgataataaatattttagattttatattttttcagcccttcattctctgttgcaactactcaactctgccattttatcatgaaaaacagccaagggtgatatgtaaatgaaagggtgtgactatattccaataaagttttctttacaaaaccaggctagatctgttccatgggccatggtttaccaactcctactctaaaggatttagtcagggattccccactgactgattggaagtttctcagaactatgctgtggtctgaagctcttcctacttaatcttgccaaggctacaggcatcagacctgcttattcctgctttccttgcctacacctcctccctcctcctttattcttcacagagggaaaaagtgtgatgtgatggaaattacaatctggcctcagaagatccaaaatgagctcttgctttgctattttctggccctatggacttcaaactcccacagctcatctcaggaatgtgttaatcctgctttgtgtacctgaaaggattgttgagagaacatgtgaaaaaacaaatcactatcattcaagacactacccatgtttgacaccacgtttgaaatcactacacttctttttatccttaggcatgtccatagcatttcgttgagaagttaaggtgttgttttagaggaaatagaagattattccatgtaaagggataacaaagcttatgcatagttcaaataagctgttctgactaaagcaagagggtgatgcagccaacattgcaaacctgatcccctcactgaccaattaattttgaactgacaacaaataaggcatctctcacctatatcaacagccctgcctccaaagggaacagacacaccatcaccattacagcagtaaatactcaaaattcatatcctgtttactaataagcaggagtgtcatcttgtaattctgagcacagccccgccactgcctggctaaagccatggatttctcattggccactcttgtctgaaatggattggtattcattcttcagatacgaaaggaggcaagagaaataactgaaaatctcttccagtttgcattttattagagcagggaggcacagaaggcaacagccagagcagtcctgaaccagtgtgagtttcaaaagtcaaccttggtgtattggagcaggttacataaaataactcttttgtcaagataacggactgagcgtaacaagctcaagaactcaatgtgcaaaaagatcacgtgaaaggaggaaggcaagaggctggggaaaggcttttaaggacgcttattgaaacttatggttactaaagaaaaaaagggaaggtgaagggatagattttgagtttgggattaatatatacacatatttttatgtattaatataaaataaacaaaaaggagctactgtatagcacaggagaagtatgctcaatattttataagactgatgttaaagctgaaactctaatactttggccaccttatgcgaagagttgactcattgggaaaagacc

SEQ ID NO: 47721 - DNA, 1548 bp, Bovine  19866880780027
  misc_feature (1)..(1): n is a, c, g, or t
ntagtaaagccagcacacaaaagcagacacaccgggtggtatgacctgaccccagatgtggtgctcggctgagacagttcctgtagatggcagtgtagcacttcagcagtggatcttgctgggtgttcctgggatgtggatgagatgcaaaggataaaagctgctgcgagagcaggctttgccctccagccagcaatttaactaagttgctggtttgctactcgatttcatagttgccctctaaatgaatcttttctgaactcagcaaaagtacaaattgttccttcatacaccccaaattgtccttttggtgaagtgggtttttatttttttatgccttctattttttgaatttcagttattttgaaagggttataggacttcaacattccttttcttgaattgtaaatgcaattagcttagctgcggagcactctttgagaatgaaactctcctccattgagatgattataaactacatttcatacaatccaccagagcacaatccaaaatgaagatctttctatattaaccctatggccagatttccaggatgatttttcttttgttctgattattttccttccttcactttttctaaagcctttttaaaaaattgtcctcccctctgctcagagaacatggatgactgggaattgaaaaacaatctagaaattacagacttaggtaatttataataaaataaaagtatgatgtcaattattttcttaattgttttaacctttaaagccagatcagggtcatattctactgtggagtaagtgagtgatggcagtcatgaaagaatttgtggagttgtgctagtcattccaggttaagttttcctctcccgcctccccaaacattcctcattgcttcagcaagcagctgtgcagcagcagcattaatagcacacattcatgatgtatttgctcctctaatggagctatgttcccatgaactggaatatctgttgtaaccgagaagagttttcatcctctaacttttgccatttagccacaaaatgtatgtatattaagaagtggcaagtttagatatgaatgatgcattggaatctgttgttgatataattggcatggaaattttataggcaggatctggtatgtaacaggcaatcaatgccttctgttgaataaatgaattcttaaatggaagtaaaaatgatgagtatactaaggaatgaagagacattgactagctatctaaaagcccagaaaaacatcagaaaggcttaagagcaatgggaattcagagatgaggaagccaaagtaggggggaaaggaggtaaccaatggtgctggacttatgcccttagatataggaagagggctacagcggagatcaaagaatctggaaggatgaaggaaaggcatgtcaagatgcatcagaggagattaacaaaaaactgatgatacaacattgagtggtcaaagaaagattaaggaatctggaaatttggaaacaccatcaatgggaggcaattgtgcaggtgacaaatggggccgagaggagagaaaggccgaagga

SEQ ID NO: 47722 - DNA, 2328 bp, Bovine  19866880833913
  misc_feature (1)..(1): n is a, c, g, or t
nttcttttttcttttattgtcagaacaaggactggtggacatatgaattctgttatggacgccacatccagcagtaccatatggaaggtgagttccacctatgttttccctaagccctcagaaacctgtcatggaaggtgacctgcctccccagttcccttccctcccagtcctctgagaacagggtaaccatgcttcactgttctctttcttgcagattcagagatcaaaggtgaagtcctctatctcggctactaccaatcggccttcgactgggatgatgaaacagcaaaggtggcaggagtgtgggaccaggagagaaaggggtctgggctgcagactgagagccctgtcgagaaggggagggtcaggattaactggcgtgtttctctgggcttcgtcttaggagagagtgctcttttttttcctccttgctgtctttctcacacccctccctcatgcctgatgtcctccccaggcctccaagcagcatcgcctgaaacgctaccacagccagacctatggcaatgggtccaagtgcgacctcaaatgggaggccccgggaggctgaagttcgggtgagtcttgggagagggaagttgacactccgacagtggcaactcagagtctaagggaagagggcaggattgtgtggtatcgtcaacagtgtctctaccaggccctagaccctaagtttaagactcatatttccagctttgtgtcactgcctcaattttcacaggcacttctgtttttttttttaataggtgtataattgctttacaatgttgtattaggttctgctctacaacagcatgaatcagctatatgtgtacatacatgcccccactcttgaacctcctgtgtcccgccccacatcccactcctctagataatcacagccctgaactgagctccctgtgctatacaggagcttcctactagctacctgtttgacacatggaagtgtatacctgtcagtgctactcggttaactcatcccacctactgcttaccccactgtgcccggaagtgcactctctgtgtctgcatctctatttctgccttgcaaataggttcatcagtaccatttttctagattccatatatacacattaatatatgataattgtttttctctttctgacttcactctatataacagaatctaggttcatccacatcactacaaatgacccagttttgttcctctttatggctaatgttccatcgtgtatatgtaccgcatcttctttatctcttcttctgttgatgaacgtttaggttgcttccatgtcctggctgttgtaaatagtgctgcactgaacactggggtacatatgtctttttgaattgtggttttctcagggtgtatacccagtggtgggattgctgcatcatatggtagtttgagttttttaaggaagctctgtactgttctccgggcttcccaggtggcgctagtggtaaagaacctgtctgccgatgaaggagatgtaagagacttggattccatccctgggttgggaagatcccctggaggaggacatggcaacccagtccagtattcttgcctggagaattccatagatagaggagccagcgggctacagtccatgcggttgcaaagagttgaacataaccgagtgactaacactttcactttttcatatatatgtatatacatacatattggagatggggacgacagtccactccagtattcttccctggagaatcccatggactctagagaagcctggcgggttacagtccgtgggggtcgcaaagagtcggacacgactgagcgactaacatttcacttcatatacacacatacatacacacattcttcttcagattcttttcccttataggttattgcaagatattgagtagagttccctgtgctgtacaggagaacctttctgtttatccattttatatatagtatagcatgggtgctcagttatgtccaactcaacacaaccccatggactagggctcctctgtacaagaaagacaatagcgtgcatatgttaatctcaaatctcctagtttatccctcccccactctttccctttggtatccataaatttgttttctatgtctgtgggtctatttctgtttctgagaagcaatttaaaaagcaaatacagatgcctgtattcacccctagagattctgataagattgaccctgagtggcagtccctgggatactgttccaaaaaattcctcagtggggtgtaaagtgtgagggctagaaaacctagttggagattaaatttatctgaaagggtgaagcagagagagcatgtgtgctag

SEQ ID NO: 47723 - DNA, 957 bp, Bovine  19866880874955
  misc_feature (1)..(1): n is a, c, g, or t
nacagagcacaaaattcctgaaaacatgtgataactgtttatttaaaatcacacaagcttattttcagatacagacacatcttgattactcaaaagaaggagacacatagaatataccaaagaatggataattctcaagccatttataaagtaatacaatgatggataaaaatgataagacatgaactcttggttaattaaaatgtttgcttaataaaaaaatttttaaaaacctgttttgtactttgacagtgtaaacaagattttcttgatttagcaagtagaatttcatgtctaatgttgaatcctttttttgaagactgaagatctggcaccactttggtgtcagtaatgtgaacataaatgttcagtgtaaaaatgaagaatggggggagctttgggctaaaggtgcaccagtctgagaatgtattccctgatgtattggtttaaaagctaaattctttttaaaaaattaaagaaacaattttgggggccagatggcatgtgggatcttagtttcccagtgagggatggaacccatgtcccctgtactgaatgtatggagtcttaaccattggaccatcaggaaagtccctaatgtctagattcttactatgagtgtacttactgcttttgtgcttaaagtcgttgccaaggggactgtggaatcaggaagtggtgaaaaattgaaaagtgagggatcatccagttaagttctagttcactgaaattttacacgctttgtctcactcccatcattattatgggggggtgagtatttggcttccaagaaaacaccagtgaagagttatcctgcagtcagcttgccttactgaatccagtgtagactgggtctacactctttatattggttttggaccactggctttctggtcttgtgtattactaacacatttcttgagtgaattcattggttctgacaggatccatattttt

SEQ ID NO: 47724 - DNA, 1317 bp, Bovine  19866880885839
  misc_feature (1)..(1): n is a, c, g, or t
ntggaattccttttattttcctctcttggttatctgctagggatgaggcataagcccagtgctgtcacatggagaaaaacatgatgcaattaatgaagttgctaatgcgtcatcttgtggtgacctccgccatcgccagctcagcctggccaatttcagtccatcttctacatcccacagagccaactggaccctgagaggtcattctggcccacctcctatctcccctccccccacagatggagggcctttatgctgagatagtttccaggacagtgcctaatgctctgtcacacggacagtaagttccttcctgaaggagagagctcaagttaagcaaatagtctcgattattctttaaatccggaagaagaaaaatagaagttaacataggggttcaagggaatagcactccatgcattcggacagataccaacttcatgccgttatcagggagcatctcctgtgtgcctggccctgagctgagcaccagggggaccgtggagacaggacacacaggcccctgccctaaccttactttctgcttccccactctgtcaccccagacaggaaagactttcctctccccccagcacacaaatgtcccctccccagcccacacccagcttgtgttgcccccaagtccagctgcatgtgtctcacttgtctgccaagagctgcttctgtcagaaggcgacacctctctctggtgattgggtggtgggtataagaaataacccaaaggcctatccagaaagtgagatcaaagttggcagcctcctgggcccctcccaaaacttataattcaggccccacttcactccgtgcccctttctttctttgctcttttttctgagggacccggctgccccccatccagggctcctctttcctaagcttcatatgccaggggtctgcccatcctcagagcctccctaatgctctgagtaccatattctcaaggtagcctctctgcttccgcaggagcccaagcacccagccctgcacagatgccaagccaaggtctcttctgttgccttaaggcttcttgttgagggtactcagaccttcacccttaaccgcaggccctgtcaacctccacttttctaaccccaccccactccaagaccatacccaccccttattccactcttttcctgagttaggtttctggcttccctcagccattcatcagcatggcctgataacgtgcgaagggagatctggcgagaagcctgtggtgaacaaacattttaatgaacaaacagaaatgatggctccaaactgaaaacaccctggaagccacaaactcagtga

SEQ ID NO: 47725 - DNA, 1364 bp, Bovine  19866880893588
  misc_feature (1)..(1): n is a, c, g, or t
naaaaatataagggagtaaaacattttatttaaaaaaaataaaagagtatagaataaagttatactgaaccaaacctatcatttgtaacaataaatatgagtagattaaacttgtttaagacccaacttaaaactccaataaagttttcttcattgtgcttttctttagtttaaaaactgatttcaataaagatatgtcaattttataattataaaagtgatgactgttgctataaattaaaggaaaaaactaaacgtaagtaatggcgtctgttttgacatgcacatggtaaattcgctcattcttgtaatgtcacctagatgctgctggtaccacactgagcaaacctgagaatgccccttctgaggcactgctgccccacccacaatcactagcagagcaccccgctctgctgctgacacactgcctcctctccctcctcagcaccctggccagagctgattagacagattacccaaggtcaaccaatccatgggcttacttatggcttggtggggaaagctgagctagagtaattagattcccactctggggtgtattggaactggacacatgggagaaaaattcagtcctcagtgtgagtgaaagttgttctgctcctaacagctccctaggtagccctttgacaagttctccttcttccaggggcaactggagcagctctgtttcagcactcaaaagagccaaatcaaaatatgatgggaaagtggaagattccattaattaaataatctactccacatcaaatgtaaaaattgactaaattgactgaattgattcacttttaccacattgcaaggatatgatttttcactctacaccagagttactctttagagttctgcctagtaagatatgccaagaaactgtgttaaaatgtttagatagagtgactaaaacaattaacaagttgccaagtgtcttcacatttatctgagtgaacacccacatttgtctctccacactgtagagaaacaaatctacactgtcctctatattcaggcaaaccttttacagggctagttcagttcaagttcagttcagtcgctcagtcatgtccaactctgcaaccccacggactgcaacacactaggcttccctgtccatcaccaactcccagagcctactcaaattcaagtccatcacattgggtgatgccattcaaccatctcatcctctgtcaccctcttctccttccgccttcaatctttcccagcatcagggtcttttccaatgagtcagttcttcccatcaggtggccaaagtattggagtttccacttcagcatcagggcttgcaatgaatattcaggactgatttcctttaggatggactggttgga

SEQ ID NO: 47726 - DNA, 1259 bp, Bovine  19866880893671
  misc_feature (1)..(1): n is a, c, g, or t
natgaaagactcctggttcctaaagtcctgctagagtttcttgcacagttttgcttgggtaagggatgctgcacattgaaccacacagggtcagtgctgggaagttactggcttcataattgaaatgcttggttttgtccacttgaacagatccattcaatttcagagagagatgtaaagtctgaggaccgtcataaattgcagccacaaaattcatatacctatttatttttcttctcattgtatcctagaaaagattcagagtgtctttcaaagaggctaacaatagagcaagataaagtcaattaaaaaaataagaaagatgacacagagggaagaagaacagtgataggaaacagcagctataaacccacatgacacactggccttcttctccttcctcacccctgtcaggctgataaggtggaccctcttggtaggagtgagaaacttcaaagtgagataataccaactttgatttttttttccctctaatttgcctaaattcaatgaaaatttcaggctgttgcttcaaatagaaatgagctctaattatccttctgcttttcatatcattttcaataagtcagcattactgttccagttatccaccagaaagcagtgaaaaacctcacattttctggggcctctgcatccttttaaacgtgcacttctgaaatgtttaaaaacaagtctgcctttggagcatttgtgtggagaaaaaaaggagagagtctggaatggtttaacatgctgttgtttgtggtttatcaaatcaggcacgcacacttctattaaagcacagacaaagcagcctggcagttatcgtttcatctgatactgagccttttctgggtttttttggtcatcttcagctacgtatgaaaaatttatcctgctctgtctaagggagcaaccgtataaataaagaaggacatacctttgtaggaggctcaactctagaacaattctatattgttctctgtggggcttcccctgctgaacagaccccaaaccatcatctggggacccaggcttcatagactgccttgggttaagttgaactgcacagataggaacctcataatcatgttttaaatacctaatatacaaatgtgcttttttttttttttaagggcatcctatttacatgactctggatgtaaatgaactctatttggagaatattttaaaaggaaggtcaaggaaaatggtctactccggctcagtgcttgtgattatacagtcatacttgacag

SEQ ID NO: 47727 - DNA, 1134 bp, Bovine  19866880926837
  misc_feature (1)..(1): n is a, c, g, or t
ngtttatatgcaaatgcatgctgctgctgctgctgctaagtcgcttctgtcgtgtccaactctgtgtgaccccatagatggaagcccaccaggctcccctgtccctgggattctccaggcaagaattctggagtgggttgccatttcctcctccaatgcatgaaagtgaaaagtgaaagtgaagtggctcagttgtgtccgactcttagcgaccccatggactgcagcctaccaggcccctccatccatgggattttccaggcaggagtactggagtgggggcaaatgcatgaattccatataaatctatatacctctgtctctgagatttaaaaaaccaaccataagagccacctccttttctctctctggctgccatcccaagggatctcccatcctttattacagctgagcagccccattaaaaggaaggattagggacatcaccccaattcagtttccccttgggaagtcttggtgtgttcataaaatctcagctatttcctgagaactaggtttagtaaactttcatctctactctcaaattcccaaaggacatcaagtatcacacagagaaatatttgtgaaagaggtagttgtcaacaaagtcttgctgaaaaattcctgaacaaaacatacttaacatattgggacttctaaaattaaaatttagttagcactgccctaaggaatgatgctgaagctggaactccagtactttggccacctcatgcgaagagttgactcattggaaaagactgatgctgggagggattgggggcaggaggagaaggggacgacagaggatgagatggctggatggcatcactgactcgatggacgtgagtctgagtgaactccgggagttggtgatgaacagggaggcctggcgtgctgggattcatggggtacaaagagtcggacatgactgagcgactgatctgatctgatccgaaaacactcactatttttttttttctgagaactgtaggagacttaggtggaagtgataatttgtccagataataaacacttaagaacaggagtggtaattgaagtttcttctcaaccacatctcagactaatggagcaggagtgttttctatttgggtattcttcactcctgcacacctg

SEQ ID NO: 47728 - DNA, 1258 bp, Bovine  19866880951273
  misc_feature (1)..(1): n is a, c, g, or t
nggctactacagcccctacagcgtcagcggctccggctccaccaccggctcgcgctccggctcgcgcaccggctcccgggctggctcccgtcgcggcagcttcgatgccacgggctcaggcttctccatgaccttctcctcctcgtcctactcctcctcaggctatggccgccgctacgcctcggggcccacgtcctccctggggggccctgagtccacggcagcctgacccctcctgctccctgcctcccgctctgcatgtggcctcccgcccaggacgctggggtctctttaacattgaaaggtgtcttcctcccaagcggtgcctaaagtttaaccaaaaagactagactaacatattaatatatacctgctgtccagacagcctgttcccggggacggggccagcccagccccactgaccactccaccccccgggtctccctgctcctctttacctgccactcaccacagccaggtgccttggagggtccagaggtgggcccccaactcagccctcccatctccccgaggggttccgtctgggcgagcttcccccagccctgtagaccagccccacccaacccccagcccgacctgcctgggcagcggacgcagcccctagcagcagggccgtcgggaccagcgcctctgtctccaggactgacccgctcgctctgcgcgggcggcagcgagtcctggtcccctcctctcctcggctgctcaggaagccccttccccatgggagggtgaggtccccgagcagacccagctggcccaggccaggccccccagaccccaggcctctggcttcagccttccagcctcagctccctagtaagtgccttctgtgtcccccttcgcaccccaggccccaaggacccagacctggggtgggagacagatcctcctggtgaaaggctcgccactgcccagctctcaggcgtgccagccaggtacaacgggtcccctgtaggtttctgcccgctgtgggcccagcgccccccaaggcctgtggggcacccctcccccgggtgctgactgcctgcctctcccagggagcctcagccccccgagtgggcccgggacgcggccgaggcggtccgtgccaaccaggccaccccgccggtgccacccgctcctgctccatcaccccgggccctggcggctccacccccacctccaccctctgactgagctttgcatgttccactaacccagggaggtggcgggtggaagcgctcggcttcggctgcct

SEQ ID NO: 47729 - DNA, 3448 bp, Bovine  19866881010408
  misc_feature (1)..(1): n is a, c, g, or t
nctgaaccttactgtgcctccattttcttatctgcaaaatgtagattataagaatacacacttcatagtagattgtcatgaagattagagctaacaacatacttagaaaaattcctggcacacactaaacactcggtggtacaacttattattactactactattattatctgaaagcagcctgttttttacacaaacaagtgataaactactcatagttctatctcaattcattccagcaggttaacttaaaatctcttgcaagcagtatcatgttgcctcattcacatttctaagcatctttgaaaataagaacactgcagtcctaaaaaaagaaaaacaaactttttatagtttacttttccccacttattttttattgatggtaattttctatgttgaaagcaaatccaagttatccagcccattgctgttgtttagtcactaagtcatgtctgactttctgcgaccccacagactgcagcatgccaggcttccctgttcttcgctatctcccagagtttgctcaaactcatgtctattgagtaagtgatgccatccaaccatttcatcctgttacccccttctcctcctgccctcaatctttcccagcatcagggtcttttccagtgagttggctcctcacttcaggtggccagcgtattggagctccagcactggagccaaaaaaataaaatctgccactgtttccacatttttcccttctgctcgccatgaaatgatgggactggatgtcatgatcttcattttttgaatgttgagttttaagccagctttttcactctcctctttcaccctcatcaagagactctttagttcctctttgctttctgccattagagtggtgtcatctgcatatctgaggttgttgatatttctcctggcaatcttgattctagtttgtgagtcatccaacctggcatttcacatgatgtactccgcatataagttaaataagcaaggtgacaatatacagccttgatgtactcctttcccaatttggaactagtccattgttctatgtctggttctgactattgcacttgacttgcatacagatttctcaggaggcaggtaaggtggtagtcccatctctttaagaattttcaaaaaaaaagaaaagaaatttccacagtttgttgcgatccacagagtcaaaggctttagcatagtcaatgaaccagaaatagatgattttatggaatttccttgctttttctatgatccagaggatgttggcaatttggcctctggttcctctgccttttctaaatccaacttgtacatctacaagttctcagttcacatactgctgaagcctagcttgaagaatcctgagcactgccttgctagcgtgttaaatgaatgcaattatatagtttaaatattttttggcattgcctttctttgggattagaatgaaaactgaccctttccagtcctgtggccattgctgagttttccaaatttgctggcatattgagtgcagcactttaacaccatcatcttttaggattttaaataactcagatggaataccacctccactagctttgtttggtgtccaatcaatacctggggcgttgttcctttgtttcctgtcaaatccttataggatcttggaaaatatcaccacctgtaacattccccactgtaagacacaagataaaattcctttgtttttggcatgggtcatttatgtatactggaaattatataatcatacatcttatttgctaaatactaaaaggaaaggagacattataccttacagtgtctcagaaagaggtaaaataaagagaatgcgaacaagtaacagtttcctagttcatttggattaaagagaattcctagttacacacgatgaggttttcacaagcagcaagttagagaacctatatttttgtgtcaatacaaaactgccaaatgatttttcccaaaatttaaatttttctatctaacaaaactgattttcttgagtccaaggagggtatgttattcatccagcagtatctagcaaatatagattgtacaatacttattgacctaagtaaatctgaatggcacagcactgggctcaagggagacactcaaatatttttcgaatgaaatgaatgaatcagacaaagactaacggaaactggttctgggtgatctgtcttgctggttgtaatagagattaagagagaaatataggagggtggaatggataccatcccaaagctacacacacacatacatatctaatacagaaagtcccctccatactaatgcattccattctgataccacgttccatttgttcagttgactgacaagtccaacaaaggaagcctaggtacccaactgacacaactgggtacatagtactgtactgtaataggttcataatacttttcacacaaataatacattaaaaaaaaaacacaaaaaaaataaaataggcttaatctttcagtacaataccttgaaaagcataataatagagtacaacagtagtacaggagttggcatcaagtgaacagacaagaagagttactgactagaggagggagaggaggtgggagatggtagagccaaaggatcatcagcagtaggagatggaaggcaagcttcaatttcactcatgcctgacattgatggcataggttctggttccatgctgaaaccagatgcacatttcccacctttgaaagtttgcagcttgaaggttcctaggtagcagagtttttatatatgcattcacatacacaacctgaagcaatatcagtaatctacattgagaattaataggagccagcacttctcttgctggtctaatggctaaagactccaaagctcccgatgccaggggactgagctcaatccctggtcaggaaactagatcctgctttctgcaactaaaagatcccacatgcagcaatgaagatggaagatcttgcaagtcacaactgttgtataaataatgacaatattaaacaaattgcttggatataatccaccatttacaataggcttgatctgttcttgagggagaaaatttccccaatttgtatcattttggcttttaaatctgaaaaaaaaggaaagaaactttctgaaatgtctactgagatagatcgaagctgctgcatccctgttcatcacattcaggtctagggtaaccacgtgtcatcatcattccccagcactggaactgagaactgagttcagtcctcccacatgacatcattattcctaagatctttcaagacatttgaaagcccttcaaactctcttattcttctcagtccctgtccagtccaaccaggaaggcagacagttgccagaacggttaggtcaaggattgaaacaagtggggaatatctctttctacaatgatgagtatattcatcctatgcaaaaagataagtagatagaggtaaat

SEQ ID NO: 47730 - DNA, 848 bp, Bovine  19866881040808
  misc_feature (1)..(1): n is a, c, g, or t
ntcatactctgaccttgtggccgctctttgtgaaaaacccttttatgttttctcacttaagtagaattaacatttttccctctgtggcatgaactcatggtagacgaaagctttcatagatagcaagtagtttttcaatgtcacattcctatcacagtgttatggaacaaaactaattgtcatcaggattgaaggcaattctattcacagcaagataaattggatttctaaactgtgatttccattgtgttacctctgtgtatcatgaaagttatcctgatgtgcacagcagtcaggctacttacttatacagtgacgtccagctttatgctgaatctgtcatcttttgcttcccaagggaggacagaagcacaacagaagcataatcgtagaccaccattcaatggaaggggttaatgaggatacattgctttaaatatcagtgtgaacattcaaagactacaagaaaatagtccattcccttagaagagtaggcatccttgtgaattgtccatttcattactgtggagttttatgtgcatgtgaggttctctctctctctctacttttttaataatacttttttagatatatgcatacagtataactgggcttcccaggtggctcagtgataaagaatctgcctgccaatgcaggaggcacaagagacaagggttcgatccctgggttggggaagatcccctggaggaggaaatggcaatccaccccagtattcctgcctgggaaatcccatgaacagagaagcctggagggctacaggctgtcacaaagagtcagacacgactgagccactgagaacagcatacagtataactatttcaaaatgt

SEQ ID NO: 47731 - DNA, 1083 bp, Bovine  19866881053210
  misc_feature (1)..(1): n is a, c, g, or t
nactggcagcccccactgcaccactctgaagggtgaggggaccattcacaccatcatctatgttgtgcaatgcagggcctttcaggctgcacacagcagcaccgctgggggagcaccagagtaaatcaaaccctctctctcctgcttgcccttcacctttaatgacaaaggaagaaagtgaaaagaaagttaaaggcagcttgagctaccaaaactaactgcatattgcaaaaggaaccatttcacttgactgaacagttcaaacaaatttcagctcctgagcattttaaacacggagagaaaacaatataaataatgtatgtgtgtgtgtgtgtatatgtgtgtgtacatacatatacatacatatatatctatatggctgttaatgaatcatttgcaagggacattttgaatgtaaaatggtgtgaatttctacactcccttctttctggctttccaggcacaagtcccatcaatctctaaaccctgacaccaggcagttcattgtttttcaaatttatgacatttttcagtccactgtttttaaactgtcgccctcagtgggtagctggcacaactcattgctactctcagctcccactgagctcatcgccctaggagtgatgtgctagcaaaatttccagttgactgatctccaggatggtaaacactctctgtgtgcttcctctgatgacatcattagttttgtcctccaaccttatccagaacagaaataattaagattgtgtttgtccatcccaaacacagataatgaaaatgaaggtaattgaaaatagaaccagtcattctactcaatctcttggtgggatggaagactaactctctcccagacatcccaatagttttatgtcatcattgcaaaaacgtctctaatattgcagggtctatctggtctattgagagactattctgtatctggttcttcactgaaacaggcttattttgacctgctgaattttctcatttattttatgaaatgcataacttacgcactcaattctcatctcagaaaacagtctgattttctcccagagttctcaaactaagtacaggaattcagtg

SEQ ID NO: 47732 - DNA, 950 bp, Bovine  19866881124436
  misc_feature (1)..(1): n is a, c, g, or t
ntataataaggtatacaccatgatattaataggatttacaaatcaatttgtgattctgggtcttttttacctttttatgtttataatattttctacttttttactctattttttcaatttattttctattgaagtacagttgatgtataatactatatggtatataggtgtataatatagtgattgtattaatcattaattttctaatttttcactataccattctaatctgttttattttgaatagttcttatgcaaatatttttatataaaaagatttacagtgaagtcaattttggaagctaggaactctttaataaagtcttctgatcattcagttcagttcagtcactcagtcgtgtctgactctttgtgaccccatgaattgcagcatgccaggcctccctgtccatcaccaactcccagagttcactcagactcacgtccatcaagtcggtgatgccatccagctatctcatcctttgtcgtccccttctcctcctgcccccagtccctcccagcatcagagtcttttccaatgagtcaatgcttcacatgaggtggccagagtctgatcattagctgacatttattgaacagcctagatggattgagcaaaatcttgccgttaatgtctgtctcaaaccaccagcaatccacatggagtcattaagagtgaacaggtggtacctccacgaagctgatgtatcttccaggacaggaatcaatggtacccagagaagcaagagagaggagagggccatggctgtgttcaaaggcttaggaactcaattactttctccatcacatttcagttcatgtcccatcagagagaatttctctcattcttgggtaattatgagaactgggttaaaataaaaagccatttatttaagacaagtttttaaagcatggctttaagtttctctgtgagcttacatgctcctttg

SEQ ID NO: 47733 - DNA, 1323 bp, Bovine  19866881125931
  misc_feature (1)..(1): n is a, c, g, or t
nttggagcagtcttccagatcctctctatgcatataatgtttcaagctgtaattacattgtacatgctattttgtaatctaaaaagcttttgtaaacatatttcatttaaaaaccaacatggttgtatgttttcaattgtattttttgttaaaacagtttctatcctttaaaaatttttttaaatttgtttggcagtattaggtcttagttgaggctgtgttgggtcttagttgcggcatgcaagatctctggttgtggatgggctccagagtatgccagcttcagtagctgcagcgctcagactcagtggttgctccaaggcatgtaggatcttagttccctgaccagggatcaaacccaggtcccttgagcccacatcccctgcacttccaggtgacttctttccctctgggccaccagagaaatcccttctttctgttcttaattagtactgtaatggagaaatgaaaatccttatagctaaatctttgcctaagttctcatttctttgcggtaattatttttctctttttaacttagtaatttgtgtttgcacttcctctttttcaaatgccttcccattccactcatgtctttatagtataaatggatgaaattacacatagggcatccaaagcctactcaatttttaaaagtttatctttctgattataaaagtaatacatatttactgtagaacattaggaaaatgtggatgaatataataaaaatattctgatatgtagacaactactgatcatattttggtatacagttttctagttttctctctgttgccttcagcaatgagcatcagaaaaatgtttggtaatatagtggggtgaatgacaccttttaatttgtatttctttgcttattcatgtagctgaatagcatttcagaagttcacattttatagtccatttcaggccccatcttctctatctagccttccctgagaattccagactaattacactaacttataatggtctaggttctcacggcaagcatactgggtggtttgccattccctcctccagagtgaaaaagccagcttaaaattaaatattaaaaaaactaagatcatggcatctggccccattacttcaaggcaaatggaaggggaaaaggtggaagcggtgacagattttctcttcttgggctctataatcactgtggatggtgactgcagccatgaaatcagaagacgactgcttcttggcaggaaagttatgataaacctagacagtgtgttgaaaagtagagacatcacactgctgacaaagatccatatagtcaaagctatggtcttcccagtg

SEQ ID NO: 47734 - DNA, 844 bp, Bovine  19866881131249
  misc_feature (1)..(1): n is a, c, g, or t
ncctctgtgattgtagggtcttctctggtctgagaatggctacctcccgatatgagccagtggctgagattggtgtcggtgcctatgggacagtgtacaaggcccgtgatccccacagtggccactttgtggccctcaagagtgtaagagtccccaatggaggaggtgctggagggggcctgcccatcagcaccgttcgggaggtggccttactgcggcgtctggaggcttttgagcatcccaatgttgtcaggtgagaagatggaagcatgggagtgggtcgtgaaaggaaaaagacagcctaacctatagatgtagagtggtggtcagaagaggagtgggaaccctgaggaaataggggaggccatgttgggtccaagaccattggtcagtgagtgaccacttgttctggccaggcttatggacgtctgtgcaacagcccgaactgaccgggagaccaaagtgaccctggtgtttgagcatgtggaccaagatctcaggacatatctggacaaggcacccccaccaggcttgccagtggagaccataaaagtaagtagggtgggcagacactgagaggtagcttgagaccattgtggtagtttctgttgtaatttcaggtgtggcacctggttcccagtttctctgtacttcccccttccaaaccaggatctgatgcgccaatttctaagaggcctggatttccttcatgccaactgcatcggttcaccgagacctgaagccagagaacattctggtacaagtggtgggacagtcaagctggctgcctttggcctggccagaatctacagctaccagatggcacttacacctgggtcagtag

SEQ ID NO: 47735 - DNA, 767 bp, Bovine  19866881132012
  misc_feature (1)..(1): n is a, c, g, or t
ntatcaagagagtgaaaaccaggaagtacttaggaaaggacatgtcccagtcttatctcctgtgatgtataccccattcctgcttctgcttatactcagagactctggggcaaagctttggggattttacgagtctgccagtttccagaatcttagccattttctaccataggcagaaagagcttctcttagcaaagctctattttcttccttttctctttttgggtaggctagtttgaacataagtttacctttttatagtactttactaatagcaacaagaaggaaccaacccaatccaacactctgaatttctctactaagtaatgtgctgctataaccataacaggcacgtgagctgcattccaaggtacaacaggaaaccatataactagctggatcggattgctaatttctcaaaccaagatagaggggttattactgcccttcatctttcctctttggttgaatcactttggggctgaaccatttgtgtggcctcttactcatggcttctctggtagttcagatgataaaggatctgcctgtaatcagtgagacccttggatccctgggtcaggaagatccctggagaaggaaatggcaatccactccagtattcttgcctggagaattccatggacagaagagcctggcaggctacagtccatggggtcatagagtcacggctaagcaactaacacatattactcatggcactaattgctgtactagttaggacgctttaagttggaataaacaaaaat

SEQ ID NO: 47736 - DNA, 2992 bp, Bovine  19866881141798
  misc_feature (1)..(1): n is a, c, g, or t
ncacacgcacaggaaaggcagagtcgtataggcacaggagcaaaaccattcgatacaaagaatgtctctaacagctgaaagaatgacaaataaaggaatgattgctattgaatttgggagcaggcaggctgttatcctgggcaagatttttgagcaagttaaattttgaatagagtctatagggaggtagcttctccgaaacttggtttcctagaatgaccttctttctgttcatctctctctttaagccacaattgttcattcactacaaaaataaaggacctgaaacctgtcttcagagaacacatcagaagagacagatcactcctgggcatatttctggaaaaaatgaaacactaattcagaaagataaatgcaccttaatgttcagagcagcacaatttacaaccgccaagatatggaagaaatctaagcgtccatcaacagatgagtggataaagaagatgtggtacaaaatataccaaataatataccaaaaaatatcactcagccacaaaaaagaatgaaatttagcagtaaagtagatggggctggatcatattatgtttagtgaaataaatcagacagagaaagacaaatactgtattatatcactcatatgtaaaatctaaaaaataatacaagtgaatgtacaaggcaaaacacaagaagactcacagacagagaacaaacaagcataggaacaaactacagtgagaagagatatgacagggggcacattagtgatattggattaagagatataaactactatgtataaaatagataagcaacaaggatatattgtagtgcacagggaattctagccattatcttgtaataactttaaatggagtataaacggtaaaaatactgaacgctgtaggcctgaaactaatataatattataactaaactacaatctaaaaaatgaatataatgagagtggtaacagtgtagtcaggttataaaagaaaaatagttctacctgacaagtgagagatgttttcaaaatgcagaaactaaatggagtgttgagagaggaacagaagtttccataaaaagaatggggtaagaaggccacaccaggaataacaatcatgcaaagtttgcagggctccattgaaggcaggaggaaaggggggcgacagaggatgagatgattggatggcatcaccaactcaatagacatgagtttgagcaagctccagaagatggtgaatggcagagaagcctggcatgctgcagtccatggggtcacaaagagtcagacacaactgagcaactgaacaacagcaattgaaaaagaccctgatgctgagaaactgagggcaggagtagaagggggtggcagaggacgagatggttggatggcatcaccgactcaatggacatgagtttgagcaaactctgggagatgaagaaagacaaggaagcctggcgtacttcagtccatagggttgcaaagagacacgacttagcaactgaaaaatggtagaaaagagcatggttttccagagcctgagagcaagaagtcagggactatggaccatctgatggaaagccgacctgggccagaatgtaaaggtctttcctcctcagcactaaacacatttcaagaacaataacaattttatttatttatttacattttttacccccagcatttttattcagtcggtctctggggagccaaaaaggaaagaactatcagattcttacaatttattgtttggtattgttctaaaattaatccttgtgactgcaaaagaagcatgaaagaaacaaatgtgttttgtgttagatgttgacttctagcactaatttcaattcttaaataggacaatttttattattcagaaaagactaaatgtataatatgggatagagattgcatttattagcaagcatttcgcttaatcagccagatagttaccactggccagacaagtgcttatgaattatggcattgcttttggcaaaactatttatctgcgtgacatgatatgtcacttttgaacttcaacttgacatccataaaactacattttcatcaaactgaaagatcaagctttccatgctgactcacttgggtcaacattttgcaaatgcctggatttaccacttgaaccataaacccttggagaataattctgtgcactgatgtttgatagcctagggcacagatcatcatttctgagcagaagaaggggtgttaaagcaaaatgcatttcctttctgcatgcccaatgacttcctccaaagagtattctcatcagatcattttgaaatcactgaataaacactaactttgtggatccctgaaagaaagtaaagaccatccatggtgcattttttacttcttaggattaggagagagcatcacctccactgccagaggatattcactaatgcaccaggcattgccacaatttggggtacatgcgtgctaagtcaatcgagtcgtatccaactctttgagaccctatggaccgtagtctgccaggctccttctgcccatgagattctccaggcaagaatattggaatgggttgccatgtgctcctccagaatatcttcccaaaccaaggatcaaacccacatctcttaacatctcctgcatgatagatgggttctttactactgagacaccaaagtccctggtggggcttcttaaagtttccttccttaggttagacttaattttaggttctttaaaaatacgcagtgaggagaaaacctcaaaactgatcaaaagacctagaaagagtcattattctgcccttaattctcttctcaaaacaaacaaacaaacataaagacatcccatgcaacattcaggtgttacttctcttttctgaaccctgtttatgaggtggattcttttttccctgtgaacacagatttggacctctcaccctggcaagtgaatgtagcagtttggccctcaggtgacttcttaaaagaggaaatgacccaatgcccctgtaat

SEQ ID NO: 47737 - DNA, 698 bp, Bovine  19866881250892
  misc_feature (1)..(1): n is a, c, g, or t
ngcggcgcgcggcacacttggccccgacgtaaaccgcgggtgcaccccggggctccagcgggcccacggccggtggagggggtgacaaccacgcggaccggtggcgcagcgtggggctaggatggccgggccgtttgggaagagcggtggcagaggcagcggacagagacaagaacttcccaccgagaacttcggaaaggcagaggtttttgtcatgatctcgattagtctcccacgcctgcaaagtgccttgaccacagtaggcgcttaataagcagttttgaaagcgtgagctaatcccgccccctcccccgcctcagtttcctcctcggatgcagcaaacgatttgatctccgaggcccctagcaagtctgaaatcctaggatgctgaggctaaatcccatgtgtactgctgtggttttgcttttagtttttcagggacatttttagtgctaccctttatgatgtgccaggagtgaatttgacaccagatggcttttttttttttttttttttaaataagaaagaagacaaagggagggagaaaaatattttccaactggcagtgctgacagcattttggaagagaatccagggaggcaaagaggagctgtctcagcctgattcttcctcctcccgcacaccctgccaccctggcctccaccataaatgggggagatcagattggagctttttat

SEQ ID NO: 47738 - DNA, 1201 bp, Bovine  19866881309621
  misc_feature (1)..(1): n is a, c, g, or t
nactttaatttttctgtgatgaatgaatcttaaactgggttatgtagtcaatttggttaaattctatggctttagttaaattttcaaagaggaaaagttaagcatgtgggtcacccaagaggctttgagtttgtgtatatatcagagtaggaatttatttctgcctgcttgtactgggggaagaatcatcaatttctcctggtttatatttgtgaaatcagagtgctggttactagccaaggtttcttttcaaaaactgcagagaagacttgtgatgaaagccaaaaccctttgaaaaggggcattggatatgcctctttctatgaataaaaataaaaggtgatttccctctaagcctgtgtgaccaaagataatgcatctcattccaatgataggatttctctctccttttctttctctttctcttgtttagatattgtagaaacaacaacaaaaaacagtttggaagagctgaactccaaatataattaacacctctagcaatttgatttcctgcatttcattaaggcagctaaatttaggcttttaaagaaaatgacctttaaagttatttcattcaatgactgtttattgaccacactggataatttatgcactgcttggtgattagtggggtcacacaggatgttcaaggtaaatagctcactcgagaagggaggattaatgtgactgttgttgttcagtcactaactcacatctgacaatttgcgaccccgtggactgcagcatgccaggcttccctgtcttaactatttccctgagtttgctcaaactcatgtccattgagtcagtgatgccatccaaccagctcatcctgtcgccccattcttctcttgccctcagtctttcccaacatcaaagtcttttccaatgaatcagctcttcacatcaggtggccaaagtattggagcttcaactttagcatcagtccttccaatgaatattcagggttgatttcctttgggattgactgatttcatatccttgctgtccaggggaccctcaagagtcttctccagcactacaatctgaaagcatcaattctttggtgctgttttatggtccaactctcacatctgtacatgactactggaaaaataccatagctttgactatatggacctttgttggcaaagtgatattgtctgttttttaatgcactatactaggtttgtcacag

SEQ ID NO: 47739 - DNA, 1334 bp, Bovine  19866881382889
  misc_feature (1)..(1): n is a, c, g, or t
nctgcctgcagttcctcacacagagcccctgaaacctttccccgactgatgggagtgataggtggatcctgcacagagctcctaaatcacttggaaattcctgggtgataggaacgtcttttgctctaatgaggtgactcctggtaggctccaggatggcttgaggatggggctggtcacctaagaccacgccatgactacaagtttggaactccaggtacacttctcattctctggggagagtgaaagggctggagattgagttaataactgattgtggctatgtgataaagcctctataaaaatcgccaaactatacagttcagagagcttccaggatgctgaaaatacccatgtgttgggaaagcggtacatcccaactccatggggacagaagttcctgcattcaggacccttccagatctggccccatggtactctcttcatctggctgtttatatattttgtaatcttgtttgtcataaataagtaaacataagtggctaatttctctgagttctgtgaacagttctagcaaattattgaacctgagaaggggttgtgggtacccctgatttgtagccaagtcacacagaagtgtgtaacctgggaacccagtacttgagattggcatctgaagagggggcagtcttatgggactgagccattaatctgtggggtctatggtaaatctgcattgttagtgtcagaatttaattacgttttaggactctcagttggtgcctgcagagaactggagaattgcttggtgtggaacacccacctacacattcgtgtctggtgttgtgagtagagaaacagttttccctgcaaaatgctagagcagttgatgtgccacttacagaccttcattaagaagcatctcttcacatacagacccatcgctcttgctgaactcttttgtttaaagtgcattcggagaaggaaatggcaacccactccagtattcttgcctggagaatcccagggacaaaggagcctggtgggcagccgtctatggggtcgcacagagtcggacacgactcagcagcagcagcagcagcagcagcagcagcagaatatacagtggaatttatatttggggtcctaagctctgggaacaagattgacatttgcttgcacaagaatcttctccatcaatttgcaatgcaaaagctgtcagctaacttaaatacagtattcaaaacaagaaatcagctttttgggtatggtggggatgggttgtaccacgtggtgaaatttgcttgacagcctctgtattttctctggagacaaaacaacctttttaccagcaagaattttcagaggggatg

SEQ ID NO: 47740 - DNA, 1378 bp, Bovine  19866881385255
  misc_feature (1)..(1): n is a, c, g, or t
nagacagtaaaggacctggattagatatgcatagagttccaggataacaggagaaagcacagtttaaaaagttcatttgggattaggctatcaaaatagtactggcttgaagcgataaaggcctgaaccaaaatagcagcattgaaaaatggaaaggaaggaataaaatagaacattataaaagccaaatcagtaaacctagacattgatgtcattggcagtgtgtatggagagcactcagaaatgacccaagctttcaagtctcagtggctgcaagatggcaaaggtaaagaaatcagaaatagttggttagaaaaggaaagataaaaatatgaagagtgtgatttaggatatgtggaatctgaagccctgaacagacacagaaaccactagtaaggggttgaaaatgtggaactgagagagacgggaagggctgcagtcctggtttgttcctactgccctgacatcacatccagttaagcatctgtgccaggcaacagcgtcccaatttgggcaacaaattatatgaccacactatctctgagggagagagtaaaaagatgagcttaaaagctcacagcacagaacactgggaaatgcccacagataggtgagaagagaaggaataaaaaggagccatggaaacatgaaaacagaatcagagaaataggaaagtatcttcagagaagagaacaaggtgtatgactgggggaagatggtcggctttgatgtgattttcagaaaccccaggagggcagattccatcaagtggattatgaaacatccaaattttttttaattttgtcattcaagaaagtaacaagttagaggatggtttgttttttaatgctaagtatatttgctggctgaggggaaggaactagcagagatgaagtgatagaagtaaatgccaagataatgaaaagagtgaggtctcaaaggaggtgagcacagcaggaaaggagatggcaaagacaggaattaaaacatcatgtggggttgcggagggtgggccccgggttggtggcagccatttctcatctaaaacatcatgtgaaagtgaaagtcactcagtcatgtccgactctttgggaccccagggacccatggaattctctaggccagaatactggggtgggtagactttcccttctccaggggatcttcccaacccagggattgaacccaggtctcccacatttcaggtggattatttaccagctgagccacaagggaaacccaagaatactggattgggcagcctatcccttctccatcttcccgacctaggaatcaaaccaatgttttctacattgcaggcagattctttaccaactagctatcagagaagcccaaaacatcatgtaagggagctttt

SEQ ID NO: 47741 - DNA, 2192 bp, Bovine  19866881399975
  misc_feature (1)..(1): n is a, c, g, or t
nctgcattctaaatagagaagtggttagttttcctaaaagaatagttttcctaaaagaagctatttgactttttaagttgagaatagaattacagcaagacagttaagaagacagtgaatttcacttaaaaaatatatctcattataaagaataacaaaattcagagaggcagcaagacagctaatgtttctgagaatctaatctattaacctcttggtgtctctgcccattagtgtttttcccctcaacaactctggaatattgtttagaaattctgcagtaattagtggaccattttacaaagctttattttatgctttgtgactgtctttggaatgaaactttgaattaacttggcatgcttacagtgttcaccacgggcgggtgaataaaattcctaaagatatgagagcagcaaaaatcatagatccaggccatatttcaaagtaggtgctttctctggggcaattactctagaagatggtcctgatagttttttttaaaactctgcaaggtgggtgttattgtaccagttagagatgaagaaatggaagcttctagagattaaatgttctgcttaaagccacacacccagaaaataatggagtcagaatttaaaattgggtcagccccaaagagaaccaaagctctttccattatgatatatcttaccaggctattcattcataaaacatccaagcagaagaggacaacaacaactgcatgcttatctcagaaagaagaaataaaggcaaatactaagaggcaagaatttaaagtgaataaaatcaattaaatgtatgattatataccacagcgtgcatcagacttatatagggcattatttaacaggggtaacttttagtgctctaaatagatatttaggtaggtatcttctaagtgccaagttttcagaaaagatagactatactttatttttcagaacctggagtttcacacttacatggtttcacatttttttggttgagggggttcattgcattagaaagttgcaaccctttgaaaagtatagtagtgcagttcatcaacaggttatgctgcgaatattgcagccacataagaagagagggcgtgtcagttatcagtttattgcttttcagcttcaaatccatccattattgcctgctctatgaaaatggagtttgttgtttagttgctcagtcatgtccaactctttgcgattcaatggactgcagcacgccaggctcccgtgtcgttcactatctcccggagtttgcttaaactcacgtccatggtgttaatgatgccatccaaccatttcgttctccgtggcccccttctcctcctgccctcaatcgttcctggcatcagggtcttttccagtgagtcagttcttcacatcaggtggccaaagtattggagcttcagcttcagcatcagtccttccaatgaatattcgggactgtttccttaagattgactggtctgatctccttgcagtgcaagggactctcaagagtcttctctagcaccacagttcaaaagcatcaattcttcggcgttcagccttctttatggtccaactctcacatctatacatgactactggaaaaaccatagctatgactagacagacctttgttggcaaaggtaatgtctctgcttttgatgctgtcttggtttgtcatagcttttcttcgaaggagcaagtcttttaatttcatggctgaagtcaccatctacagagattttggagcccaagaaagtaaattctgtcactgttttcactgttttcctatctatttaccgtgaagtgatgggaccagatgccttgcaaaagtaggaagtcatgagatacctggaatgaaaaattcagttcagtcagttcagtcactcagttgtgtccaactctttgcgaccccatgaatcacagcacaccaggcctccctgtagatcaccaactcccggagttcactcaaactcatgtccatcgagtcggtgatgccatctagccatctcatcctctgtcatccccttcacctcctgcacccaatccctccaagcctcaaggtcttttccaatgagtcaactcttcgcatgaggtggtgaaagtattggagtttcagctttagtatcagtccttcaaatgaacacccaggacgatctttaggaggacggtggatctgcttgcagtccaagggactctcaa

SEQ ID NO: 47742 - DNA, 756 bp, Bovine  19866881471472
  misc_feature (1)..(1): n is a, c, g, or t
nacccacactcatatgggcaactaacctatgacaaaggaagcaagaatatacattgaggaaaagacagtctctgcaataaatggtactgggaaaactgaacaactacatacaaaaaaaaaaaaaaaaatcaacctggactattttctcacacaaagcacaaaagtaaattcaaaatgaatttaaagacttaaagtaagacctgaaaccagaaaacttctagaagaaaacataggcagtaaactctttgtcatcacccttagtaatttttgttttgatatgtttcctcgggcaagcaaaagaacagcaaaaataaacagaagggacatcaaactaaaaagcctttgcatagcaaaggaaaccatcaacaacatgaaaaggtcacctactaaatgggagaagatatttgcaaataatatctgataaggggttactttaaaaatatacaaaaactcatacaactcaacatcaaaaaacaaaccacctgatttaaaaatggacggaggatctgaagacatttttccaaagaattcatacacatcacacaagggcatacttcacaggtttcataatcaagtattaaaataatcacatataataaaaacaaatcactatcataaaaacaaaacacaagtaataacaagtatattgtagaaaattttaaatgaacaatttatttgctttatttaccaactggtaaataaagatccaagccacaaagatacaatggttgcctttgcgtttaaggcaatttcatt

SEQ ID NO: 47743 - DNA, 900 bp, Bovine  19866881653690
  misc_feature (1)..(1): n is a, c, g, or t
nggaaaagtccaaaaccaatgtggagagaaattatgcggctagcagctggaattcatgaagtttcacattaagtgaaggattgatagcaagaaatccaaacaccctttccccaaagacagacgcatccatagcttaaggacaaaaaaagggcttctcaggattcttggcttctctttaaatataactgttaaaagcttatgtttacctttataagggatagctatggctataatggtcatcaatttggaattattgaattcaaaggtgatgcggtgagatgcatgaagcgccaaaaaatgaatcataaattgggttgcatgccgatttattcttgagtctttttttatgagatacgttaatattaaatgaaaataattatttatgaatgtttttcacctaagttatctttttcagtcctctccactacatactaactaagaaataagtattttataacctctctctgcttaagaggaaactgatgcttcaggggattaatttgcccaacatcccgtggtagcagacaaggtctttaacacaggtcttctgatcttagcagccacgggtgtatccactacactggggttcctaaacctggatgtctttccagacttgccctggggcttttatattttactgatccctagagtgggttcaggaatctatatgcttaagaatctctgaagtgtttctgatgatcaacctggtttggaactcactgtgttaagataaatggaacttcattctctcatcagttaaaaaaaaaaaaaaattcttctttcccctggggatgtaggtggagcaaatagatattttgaaggtcagcagagccacacctgggaaacattagaatctacccgaccatgcagcttgtaacaatttgggataactagttcagt

SEQ ID NO: 47744 - DNA, 996 bp, Bovine  19866881053244
  misc_feature (1)..(1): n is a, c, g, or t
ntgtccccctgaatatatctgtgtcgtagaaaccagaagagatcattatcaccttttagagatgagaaactgaggcctggtttatttgtggagaaatgatagaatatgatagtttttcttgtttaagtcctgcccccatggttaagctccccaacctcccaacatatgcaagtccagtcttttgcaaggaaaggctttatcaagtaggggtggttattgcaatagggagccacttaaagaccaagccaaggaaagtgtataagtagagactgctggatacatggctgggaaagaggaacgggagtttctaaaacctgctagaagaatcttgaagcttaacaaattacatgaaatgttgcagtaacaggaaaatagaagcagggaatgtttgcacatggggcagaaatctgagcctgagatagatcaaagaagttcaagtgtgcgaagttcacataagtttagagactagatgtacttgtcacaacagcctaaagttatgtcaagcacaaaggttgattatccttgtcatttctcaactgaatgggatatccttttaagtaaaagttacaattttctatttaatcttctattttatatgaagacttactattatttctacttgtaaggacttacttgagtcataaatttagagaaggcaaagttatacatcagatgcttttcctttttccttttgttatataaagacagttttccagaagaaaaatctgttgtctgtcagcaagccaaattcttacctggcctttcctttaagaacatttttcaatataaaacaagacaagaggtagtaggagagaaatagttttcgtcaaaccatgtatttgagaaacttttcctgtagacctagacttaattagctggcagtcattatcatttttgataaaagttttcaggaaaagcaacttctacatataaaattatatgtgtttgtctattactctttatatcaattattctatggctatttacctgggagtt

SEQ ID NO: 47745 - DNA, 1338 bp, Bovine  19866880131509
  misc_feature (1)..(1): n is a, c, g, or t
nctatttgccataaagtgatgggatcagatgccatgatcttcgttttctgaatgttgagctttaagccaactttttcactctcctctttcactttcatcaagaggcttttgagttcctcttcactttctgccataagggtggtgtcatctgcatatctgaggttattgatatttctcccagcaatcttgattccagcttgtgcttcatccagcccagcatttctcatgatatactctgtatataagttaaataagcagggtgacagtatacagcattgacatactccttttcctatttggaactagtctgttgtcatgtccagttctaactgttgcttcctgacctgcatataggtttctcaagaggtaggtcaggtggtctggtattcccatctctttcagaattttccacagtttattgtgatccacacagccaaaggctttggcatagtcaataaagcagaaatagatgtttttctggaactctcttgctttttccatgatccagcagatgttggcaatttgatctctggttcctctgccttttctaaaaccagcttgaacatcgggaagttcacggttcatatattgctgcaggagaccaccaattattaatagtaatgaaccttcaggcctcgtgagctcttaactgtgtgcatattctattctatagtaaatatgctttcaaaaatagcactgctggtctgccaagagtcaactcaaaatgatcacttgggccctcattctggtgttcctcaaaacccattttaacttagcccagggcaggcagagctgtccctcattaactcttgctcactccatccctagaaaaactgcttaatttgtatatttaagataaacacttgcactattagggatcccagatggagtctgttatctgacttcaaagacagattattacatttttattaatccaaaattctttgtacacctgcttagccttctatcttaaataatctcttttgaaggcaattgggctgaattcttccctcagatctaaataaaggaagcataaactacaattcccactgagaaggatttatatggagatggctcttcactcagtcttttttgggggattataccacagaaatcttccagggtcaaatttaaaacacatttgttttagagtttgccaagtctggtattattttgcaattttagtgctatttgatttctatataaaagtgtttttctgtcttcactttgctcctcaaagcccatttacttctttctgtctctgatctctcttttcagtaaagagtgtggaaaaggatgggaaattttgaagtggctctgcttttgtttgaatcaagt

SEQ ID NO: 47746 - DNA, 3195 bp, Bovine  19866880451487
  misc_feature (1)..(1): n is a, c, g, or t
nataggaaaaagccacatttctgactacttgcaatgagtcaacagtaacttcatttagttgaaaccttaaggggtttagaggaaactggtgctcgtaaaaagcactcactttgtagaactgaatgactacacctcaggaatgtgagcttcacacagacttttgttatcagccagacaaagaggtgacaatagttcccttatttcttagatttattgcactaacttaagcacagctgttttttgcacccagagacggaaaggattcttcaagaaatgtgttttaatggtggaatgatctttagggttttcaaccaaccaagcaaaaaacccaaagcaattgtgaaagaaaaccaaagaaaataactcctctttatccttactttgggttgagctctttggaagcaagtcaccatattttgtctcaagtctgatcatgtcacacacttagcttcccagaatgggaaaagctaaggtttgcattctaaatgtccacatttgctttcctttatatgaccattgatccctgacctagaccataatctggtagtaaaggggctagaaattagccttgttcataatataggttgatactagagtagtaactgatacaagtatatttatttcaacttttctgaaatattgaagcttcctaaagaaaaactttttgatatgttactttaatttactaaattatcctagaacaaacataatgttaatgttactaaactatctagaaaaagtatctgcaaataaaaaagactcagattttccacagaggtgtttgtatttcttcatttggtagaagaaactcatttcaaagcctgcctagacagttctgtattaaccaggattactataaacctctgtgttccccactgattcaacactgagcagattggtgtgtacttatttattaaatgaatggatgaatgagtattttttaaattgaaagcaaatattttaaagtgttttttttttttttttcttcctttcaggttgcatttagtctggagtaagtctaacactgattgctaattttgttgacaaaattcaacacacattcatggcaaactcacagagaaataggattagaggaggacttcttcagcttgacaaaggtcttctacaaaaacctagagccaatattacacttaatggtgagagagtgaatgctttcacccaaagattgggggaaaagcaaggcttctgttctcatcaccctgaatcaacatacgataataacagctgtagccagtgcagggcaaaaagaagaaataaaaggcacaaagattaagaaggaagaagttttaaataaatagggaaagatactgtgttcttggattagaagactcaacataataaagatgccaattattcttaaattgatatttaagtttaataaaatttttataaaattcccagcaggatatttttgtagctatactgtttagaataggcaagattatgccaaaatttatttggaaagcaaaggaactaggattgttaactggataaatttccagaaaattatactgagaaaaaaattaaatcaaatataaaaatacctgaaatatatttgaaaaaaaaaaaaccggaaatcttcattgtaaaatataaaagatatatctaagtaaagaggtatgttttgttcctggaatgcaaaatttaatgtagttaatatgtacttcttcaacaaattaatctaaatatactaaataattccagtaggaattttaatatttttttagaaatttgaccaaatatttctaaaagaatcttctgctcattattagaactcagttattcatttattaattaactaaaatatttactgggtttcccagatggctcacatagtaaagaatccacttcccctatacaggagacatggacccagccctgcgttggaaggatcccctggaggaggaaatggcaacttactccagtaatcttgcctgaaaactcccatggatagtggagcctggcaggctacagtccatggggtcacaactgaatgactgagcacacaaaatatttattaagcctctaccatatgccaagaatgaagctaagcaaagagattactagtaaaaactacaaaatgtctattttgatcccatttttgtaaaatgtgtattcatatacaatggaagtaggtgtacttaattgttaggagtaataatctcagggtgctaggaattttggtggtaatttcctcagtttcacttatcctttattttcattttataagctgaaaaattacctgtgtaatttttcttagggaaaataattgcttaggaaagtaaagattcactattttttatgtgactgagataatttatttcaggaatgctagagataagaaggatacagaaaacaaactggtaaaatttcatttatatatttgcattgtccttgagttttaatacaaaacatttgtatcttaatttttttttatctcttgctataaagatattcttgaaaacggaaacagatactcatgctcacaaacataacaaatatttggattaagcattagttttcttcattcccagacttgtaattcacatacattataagcttaatacattttttaaatgtaattaactatactaatttgttttcaaatgtaattaatagctccctatcacaataatatatttttctgtctgagcttttctctctgctactttgtttcttttaggctaaatgttagtattgtttcttttttccagataagaaaataaaagctcagaaaaatcattcaactttcctaaaaccacgcaactagtaagttttataggtaagacttgaacccaagcattctgattccagaatccatttgtttaatcaccacttaatatttgtaagtctctgattattaagcactatgatatatatgtattgtgttatccagtaactgattactatttgctagctgcgttacacaaaagggaaaactgttgcccatatggtctatagtcatattcaggacgacccacaaacttaaataagcaattcaagtcaggaaaaaaagcgggaaggaagaaaggcatgaagtgagaaggtcaatcagatttatgctggaaagcttattcattggagggtaaagaacatagtttggagatataatgactcataatgtccatgatgtggagtaggaaatagaccaggagacaaactacagtttctgaa

SEQ ID NO: 47747 - DNA, 743 bp, Bovine  19866880568616
  misc_feature (1)..(1): n is a, c, g, or t
ncaagaacactggagtgggttgccatttccttctccaatgtatgaaagtgaaaagtgaaagtgaagtcgctcagtcgtgtcccactcttcgcgaccccatggactgcagcctaccaggctcctccgtccatgggattttccaggcaagagtactagagtgggttaccattgccttctccgtccctgaggacccactaatcctgtaaattttgaatttgggcaagttacttaactcttctggattttgttatcttcatctacaaagtaggaataagcacacccacctcacaggttgttggaagaagaaaggagctcgtctatgtaatgaaattagtacagtcttggctcacagaagaatctcaataaatgataactactagcacttttactgatattattgttatattttaatagccaggctctaatgtctctagtatcaaattgcagtgaattttcaggcacttaggatggtcaggtctgtatcagctctccacaaccaagtttcccttagttagctggggtacaaatggtcacattttgcttaagtgtgaatctgttttttgtttaaaatttttctggcctttcctgaaactgcctctccagtgctcttccttccccttcccaaacattggccccagtcccactccacagtttttctcttcacttttatccagagctgctggtctcagcatgaccttccaccatgttgacttcctcaatctctcatgcccaggcccccaccc

SEQ ID NO: 47748 - DNA, 1681 bp, Bovine  19866880574457
  misc_feature (1)..(1): n is a, c, g, or t
ncttaaaaatgtcatgttaagttttctaacccagttagaaaaaaagaaataattgaggtatctggaactcaattttgaactaaaatgttggttatcataagcttgcaaggtaacataatgtaagttcttttcatgtaaattatgtgtgtgtgtatatagatagagagagagagttttggaatattcttcccaagagaagaatttgtggacctactaaacaaaagtgtaaccatctcttttgcacaataggtattatagtaatttgtacatacacagtgatagaatatagggatataaactaaagaagaaaaatttctgaagaaacagttagaagatgatgcaggatgccaagaagtatggaaataaaatgcacctcatatttttttttcctgccaagggactatctcagttaagtgacccctgcaatgaaggcaaagagttcaatagaaaatatttgtcaaatgagactagaaagaatagatttcatgactctttgtgattttgaagaaccaaagtaaaggtttatggacacaaaacataagaactactttttaaacgaggaaacaagcaactaaaacgagcagtttgttcctctctccaccctttctttcttatccacaaagtccctccacgtacacacatactcgtatctatttggggaatgattatttgtacctctttgcctcaaaatattatgcaatgtcaagtttgggtaaaaatatcaaaagttgttttctttttctttatcctagacttgcatttgattctttgtagtgtatcttaagaattcaaagaccttggtacaatttaaaataaagaatgatggttgcctaggaaatgtccatgaactagccaggtatctcatttcagctaatttgataacagagtaaatgatatggaatgtagacgtatgatttagtcagttttctttctctttcctttttgataatggctatcagttatgaatgtatgagaagcagcatttggtctttttttacctttaataggcaatgagatactaaagtaattctgaagatgtacaatccatgtgagtttttgaagttctctagatacataaccaaaatttgatctttctttatctggcataaggaataatactaggtcacatttgtcaatatttgaaggcaagtgtagtaacaaaacactttactttgccttctcagatgactacaactacaatttagaataaaatccttgaagaatatattaactttcttgtgcagggtcattctcactcaaattattaaccttcagtaacaacattgcaaatatctcttttatgctacagaatgtaatatctgcttgtttactgctttgagtattctaatctgaatttgagatcatccttcctggaccatattaatgcagctcttagtgtctggaaaagcataaacatcaagtccagtggtttattatgacagtgataatgtttctgaagctgtatatacctttctttctttactttctggtcacgactcagatatccagaatcctttgctcaaactattcacacttaagtgagaatggcatatgaattgtgaaaccatgttctactcaaatctgaaacttcttcaccttaatctatcaagagttgagtcttgggagggggatggccgggaaggttcaaaaaggaggagacaaatgtatacctatggctgat

SEQ ID NO: 47749 - DNA, 2571 bp, Bovine  19866880699899
  misc_feature (1)..(1): n is a, c, g, or t
ntttttagtttagtattgtgtatgtgtgtgtgcatacaaactaagggaaagcatttttaagtatttggatcacaaatttaaaaaagaaaaattaaatattccaaaggtaacttttatgttctaaaatagattcattctatgatggtttgattttatttgtttaaaataaagttacaagatttaaagcagagcatattcagcagactttgaaaggttcataattgtttactgtagcagcaggtgattaagaaagggttcagaaactattttgcatggccctccaaattattcatcatttgaatcagtccaatgtgttcagttttcacaaaccagcttagtatcactgccaaattaaagctggcatcttgaaagcttattgaatctttttgaccaagtgctttgcagttgtttaaaattttgcaaagaaagaataattatcaaagatggaaaagcacttgcccatgaaaataagttttaacactgttcctgtaagaattgtattctatatggaaacatcatatttctcttgtatgccagtgaatatgcagctatgccttaacacttgtgttcctggaaacttccctcatcttactttggttcataatagttgatttccagtactacagaacagggtaatttaacccttgaagacactaacactgaaagttttatttctcatcatggttttttaagtttgactctatttttttattggttactttattttttcttacattatgtttttttaatttaatttttattttatattgggataatagttgatttacaatgttgtgttcatttcaagtgtgcagcaaaatgattcagttatacatatactgtatttatttttggaagagacttcagatcaaaaccacatgtgtctcttgctagggtggtgtgagagtcacacatatagagagacatagtgagaggccatatagaggccatattgggggacaattttctatgggtgtctcacatcttgtgagcagaagaaatgacttgccatgtttagaactatcttcccaaagtatttgcatagcaaacagccttggcagattgataatcttcctctagagcacagggcagattatttttcttctcccatataataaaggtaacatctccttaaggtaaagattggagaggtttattgtccattattaaaaaagcagtttccctaaacttgggatttatctcctttaaagtaacccattgcatggatagctaacactttggcccaccttgcaatgacctatggaagtggggctcaaggaactggcacaatgcagatacttccattacttccactgttttcaataataaactgtcctttgggtatgacccagtgtctcatgtcttctgttggtactgccatccatgaaactggctggtcaagttgttagtttgcaagttggataaaatctgagttctttcacagttcttgacagggagctggctaaccccagagtgaatgatccaacagacaaagacagaagctgaggtgatttttgaaatagctgagaaagccacatctcattatttccatagggttctactggccagccttgattctgtgtgagaagggactagacaaaggtgggaaataccaggaagtgagaaccattaagagttattctgacatatggttatcacagctcttctaaacattataaagattgcaaaaacttgagctcagaaataatgaattgattatctttgtgtttcctgcagaactcaaactagtgtctttcacatatatctactcaaaatattgtttattgaattgcagcttctctaaatatattacatatggtatagggaacaaaatttccatatgaaatatgatgagtaagtccataaaaaatataaaatatttatcagtgtaccttttattatctattaaacagaagaaatctcagcactgaatcagaaatggtttactaactagccttgtaaagatccaagataagagatataactggctaatttgattgcctagtattttctgctgcgtcaaaatcttctgaatgttatagaataacatcaagaaaataagatttgtagaatgtgtggccgaagctcaaacactccacccatacaaatttttcaagagtgaaataaggagaatggacaaaaaggacaaaagcactctaattcatttgagtaacttaagttggagaataatcagaaaattaaagactttcctttaaatcattttttaatttaaagtcattttaaaaattacagaattaatcatttaactggggaaaatgatttggattaatccttagattgcttccagttgtaattatagaattcaactgtatttttatggacatgtactaaaatccctaagagcaaataaatttggattaagttagagacatgcaatcatattccatttggggtacatttaaatttgtaaattcaactttgtaagttaaggaggggaaaagtggctttcataaaacaaggccactagctgtaaacaaatcacttcctctgatgcacaaagaaacagtaacctatccccactctaggaaacagatttactgcagggaactt

SEQ ID NO: 47750 - DNA, 3501 bp, Bovine  19866880704052
  misc_feature (1)..(1): n is a, c, g, or t
ntgcaagaggaaagattatagtcatataatttaaaatatcagctaacttgcactaatggtagctttaatgagcaggtaaccagcaaaacatattgcgtgtttcatttttaaaaaaatactagcaaaatatcatcatgccacatagacatttttttataactttctattatgaaattttctattagaaaatattataaggagttctcatgtactcacccctcagcttcaaccactatctcagatattgtactgtttttttttttagtaaatatgttaatctgtaactccaaaatataaagatttttaaaaataacaaaaagcacttattgcactgaaaatttcaattcaagtggaaattcatgaagtctgttaacttttggtacctcgtttgtcacagagaaattatatctaaaatatagagaaaaacatgaacctgaaattatctttttctctcaattctttccagaaattcagctaagttgcccaaagaaacaaacaaattgctggtcctcccagaaatatactcactttgttttctgtcttttacaacgttccacgtatatgagtgcagaaactgatgagtcagaatggaagtgtttgtgcattatttggcttttctcagatcatgcatattgataattcacaattctcgggacaggtaaatgtctcacaggtctgaaaagtgaaaccaaggggactgtgggtcagtggagaaaggaagtcacctttggcagcaaactcttacaaagccttgaccatttcaaagcacattaccaatttcagtgatcattttagaaaaacagaaaagaatatggaatatgtttacatagtgagaaaatgtgtagacctacatgatcaatgaaaatgacaacattcatagaaaggaaaatctttacagtttcagagtacagacagggaggtgacccaataccactctctgacactagtgtcactccctttaggtaacaatgagaattttagtggttaattttaggtgtcagcatggcttgactttggcacccagatgtttgaacaaacatcggttttagatgtgactaacatttaaatcactagactttgagtaaagacaattatcttccataatgtaataggtctgacctcatccattgaagcccttaagagaaaaatactgagattccctgagaaagaagtgctctgactctaatttgccttcagagtcagtactgctacattagctcttccctgggtctcctgcctgccagcctgccctgaagatttgggacttgctggcctatgcgagccaattccttaaaataaatctgtttccatctcttgtatctatatctacacacacacacacacattttgtttctctggataacactaactcagggatgaaagaattcttttgtgttgtagagaaataactgtatttaaacaatgttgcatattttgactgagctctaagaaaatatgaatcataagatcttagaattggaaaagaacttagagctaatttagtaaaaaatttcacccatatattgttaaaattgtaataataaggattaaatgattcctatgtattatgtataatattcacaatactccaagttaatataagttttgtatatgagaagatgaggctcaaagaaataacttcttcatgaagacctgagtggcagtcactaagtcagtatctgaatatttgaattgaatactatttgaatctaaagtccattgtctttctattaggtttagtggctttttttccatgtgtctcccaaatgcttggacatttttggtgatgtagaattttgttttgcaaagccaattatatgactgttgtatataaaaatatctttgttagaaaagcctttcatattttgatcagatcttatgtgttttgccctttatgactacattttcacatgtcaactcttcaaatacttgaagctagccacctgatcccaaatatttcctttttaaattttaaaaaatgttttgtcataggaaacaatttcaagattccctccctcttgattgtttttactgatgttctttggctagctgctccttagtaagctccagcaactgtttccaaaagttggactctaggtattatctactcaaagaataatggaatgtcttttcctcttgttctagactccatgctatcttaatgcaatctaagatttacttgcttttttaaaaagttaagtatggtaatttacaaaattgtgttagtttcaagtataagatttactagatttacaatgtagtttcatgtctctttttacagatttctttacaagaactggtctctcatctttgtatctgtgggatcaatatttgcagaacttcaaatttatccacattaaaattcatgttattagtttcaacctaatggtcaagtctatcaaggtatgtaatattgtatattctaactttttcaatgtacaattttggttaacttgtataaaagtttaatttaggtatattgaatataaaatattacaacaatagggtggtagaaaagcttagtgaaaactttttcagaaatattgcagagaaatcatttagagaaataaaatctggagttttatttgccttgaagtcctagttgaaatcattaggtgtgaacacattgctgtgagaaagactcatatacaaatgagattatcaaagattgatctttgaaaaaacaattaacctttaaacatggaaaagcccacttcaggtagggaagacaaaaagcaaattcttgaaaatatttgagggtaggaatcagtcttgttctgaaacatggtaggggtgataaaaattttttagtagaatcagggcaaggggcaaagaaagatagatgagaaagcaatggggggaaaaaaagtgcagcattgagaaagagggcatttgatggtgtcaaaactgcagacagatcaaagaaaagtgaaaagagacttctagatttggcagttgtaaaaatggtcacttagagatagcagaggcccagttacagccaaatgtttgggacagaagtcagattgtgaggtgtgaaggggtggattcgagatgaggacgcagagactgtttgcagagatttcatgcttttagagagctacaggctggtggctgtattgagcaggtagaaccaagggtttttgtagttaaggaaggtgccttggcagagagaagagacattgatgatgctagagaggagggaagagacttccaaagcattccagtggttaagactctgtgcttccaaagcagggggctgttcagggaactaagattccacatgttacaacttgtgggccaaaagatagagagagaggataattaaaggtggaaatcttgggaaaaacttcctgggttggataaagagctgagctgaatttgtgagttttgttgaaaaggataagcacattgtccaaagactgagaccccaggatggcggggaggctgagctatgattctgtgtagcggaggtaggaattagcttttcaggctggcttccca

SEQ ID NO: 47751 - DNA, 1409 bp, Bovine  19866880705478
  misc_feature (1)..(1): n is a, c, g, or t
ncattggagaaggaaatggcaacccactccagtgttcttgcctggagaatcccagggacgggggagcctggtgggctgcggtctatggggtcgcagagttggacacgactgaagcgacacagcagcagcagcatatgtatatatatattatatatatactcacacatactcatatatatataatatagatatacgatctttaagaaaaaagtaaaaatgaatataaatatgatatgactttaaatgattcacctggaagagaaagagaaataaaaaattttgaataaattatgttttgcctttaaaaatttttaaatacctattaacatctgaggctttgttatattatgtgagaactatttttcttggagaaactgagtcacaaaaggactgtttgaagtcacaccatgagtcagtgactttgcttggaatgaaaacccagatagctgactcaacagcattccaggtggtgagtgctcagccacagtcctcaactgccgcgctggctcagtcagtctgaggtcagctcctggtgcaaaggaagcacaacggtcttcaatcatggataatggaattctatagatattgacaagtgttctgtggtgtttctatttttcttggaagaaaagattataaataaaccacttgaagtgtactaaaacattggaaagagaaataatcttaaaagttttcatttacattatacagactgtataaaaaacctcaaagccctctaaaatgcatgagccatattttaccaaaaacaaaattctcagttcttccctgctaacaagaaacatcaacatttttctacttaaaaattacaaatcaagtgagtgagttattgaaatggcttatgtttttgtaaagcaaagtcagttgtttttattcattcgaccagttattcattcaatatacatttatttagtgtattaggcaacatgttaggtggcagacacaatccttgctctcagagcttaccttctattttcataaacagattaaaccatgcttgcccctgaaataagtatgaaactttagatctttttttttttttcctattaaacgatctcagctggtaaagaatctccctgcaatgcaggagaccccagttcgatccctgtgtgaggaagatccactggagaagggataggctactcactccagtattcttgggcttccttgttggctcagctggtaaagaatcctcctgcaatgagggagacttgggttcgatccctgggttgggaagatcccctgcagaaccactcctgtattctggtctggagaattccatggactgtatggatacttctgctgctgctaagtcacttcagtcgtgtccaactctgtgcgaccccatagaaggctgcccaccaggcttccccgtccctgggattctccaggca

SEQ ID NO: 47752 - DNA, 1999 bp, Bovine  19866880749827
  misc_feature (1)..(1): n is a, c, g, or t
nagcaactaagcccctgagttacaactactgaagcttgcctgcttacagcctgtgctccactgcaatgagaagcctgtacactgcagtaaggagtagcctctgcttgacgcaactggagaaagcctgtatgcagtttaaaaaaaacaaaacaaaactgtaggaaaggaagaaagaaaggtgggagtagtgtagtgctatgtagacataattctggaacattgagagagtttctgtctaaggtcacccaattttctctattaggattcattgcagaaaatgaggtgagaagtgaagggaaaaaatggctagagtcagatgcttgaggggaattacttaggtttgatattaccataatgaaaagtagaaggacaaatttgcttaggaaatagaaaaaaaaaaaatgcctatcagtgttcatgggccagtagaagtgattactatgaatttaatgcatattggtcacccttgcatttttgttttaattttctgtagcagtgcttagatgctccgaaactaatgtgaagaatgtagattcattactgtctccaatgtaagccctaggtgtgaagaggtaagatcgggcttattccaacaagaccagttctaaacacattgtcaagcattactgatttattccaacaggataaattcactttgttgctttgaaagacctctcttaatttaatccaggtcaggtcatggaggtcaaaaagatagtcttagctacaaaattgagtgactggacaagacttgaatgaccaaactagatattactcccgtttttaggggagtggagatccaacagagtgtatactgagttcaacaccagttgttgtagaataagaggaaccagttcttagaactaatttggtcacaagaatgtttaatttgttgtacaaagtcagagaacaaaggactatgctaacttgataagatatttttggccaaattttttaaaattcctactacttaagagaaattggtctgagaagttgagttgaatttacagataggaattaaatggcctccaccgtgtggactgacgggttgcagaatcaggcagattacaaaacaaagctttgtaatcttagaagaactcactccccaccctcaattccctaatcatatactcagagcatttgtgtggtatcaccaaaatgatgggtgctgtagcaactccatgggaatgaagagaatatgctgtgatcatgagtaaatgtattataatgaaaagaaagaggaacacagaaaaatgacaacagaaccaaagtgaaagagaggtcagaagttcaaaaattcctaaggaaaatttcacatgggaataaaaacagagtaaaaagatatagaaatgctagtagcccttcttagtttccttcagatataatattggtttgtatggtataatgtagggatgtaggaaaaaggagcaaatacttgggatagatgaagaaaagaaaataagtgtagataataggagtcaagtgtactattcaacaagaagcaattagataagaaccaagcaaggatgcactgaaacagagcaacatgaccactggggaagccagtaggaagcttccagaggagtaggaacacaatatgagaaactggaatctagagctgtgctgtgcttagtcgctcagtcgtgtccaactccttgcgaccccagggactgcagccctccaggctcctctgtccacagggattctccaggcaagaatactggagtgggttgcccaagccctcctccaggggatctcctcaacccagggatcgaacccaggcctcctgcattgcaggcagattctttaccagctgagctaccaggtaagcctggaatctagagtattggttcttaaatactatatactgctattgctctcaaaatttttttaggaagttgctttaactaagatttgtcataattaccctaaagcataagagcaaaccatatgcaatttaagaataagaataatcacacaatttttaacactgctgttg

SEQ ID NO: 47753 - DNA, 2486 bp, Bovine  19866880768386
  misc_feature (1)..(1): n is a, c, g, or t
natgcataatattatgtgctaacacttcattggagaggcttcccagggtaagcaggaatgaatgtaggagaaaggagtgaggcagaggagagaacaaagcatacacgacctagctggccctgctgctgctgctgctgctgctgcgaagtcgcttcagtcgtgtccgactctgtgcggccctgcctgctgtcaaatagcactaatcgatcttgtagaattgccttcagagagaccatatgcacaaccatatcatggggtagtcccttcaggggaaagataaaagtgaattttttcaatctcacctctctctcattggccaaaggtcaatgaccccataagccaataactcccccgaactccaagttgcactgactctgcctgcagcactctgtcgtactgacagccacaggtaaacctgaagttgactggagtccacacagagttagtcaccgtaatactacctgggaagggaccagtggccaagggccccagtgaccgagaccaggagaatctcaagtggaattaaaaaggtatctgatactttggttaaagttgttggagttagtctatggagtagctaatgagcaagattccattaactgtccctgaggtttactgggacaaagttatctgaccatacttgagctaaacaaacctaatggagggagtggtagattaagcactggaaagtaaagaagggtttcaaaagtagatatatggaggtaaagctttaaagaataagtagacatttactaggacagagagaaaaggaataacattctagacagaagcaacagtaggaggaaaaggctcctgtctagtaaacatgattctagctgaacaagaaacactaatccctctaggatctttatttgcatacagtgctaggggcttagagtttgttttttcatccaaccctagaactggaatttgattttgagttggtgtaaggagaaaaattcagtctaaagaagcattagaatgaaagccagaaaaggtgctttggtccccaggtcttacccaataagagaaaccctcctttgttttttctgctctcagggatgaaggctctttcttagtctcatttcccaggagatctcagttgtttacatcattcagtgatgcaggatgggtggtgagcacaatgaaggcctggagagtttgagaaaattctgatggaggttaacaattctgatggacttcaccctctcccctcaactaattgagaatcacccttgtgctaaggtctttattcttcaatagttcttttaaagtatggtgatttagaaaaggggacttccctgataaataattcacctgagatgcagaagaacttggtttaactcctgagtcaggcagatctccagcagaaggcataggcgactcactccagtattcttgggcttccctggtggctcagatggtaaagaatctgcctgcaatgggggagacctgggttcaatccctaggttgggaaaatcccctggaggaggacatggcaacacacttcagtattcttgcctggagaatgccatggaagaggagcctggtgggccacagtccatggagtctctaacagtcagacaggactaagcaactaaatacagcgcagcaccttaaaaaaaaaatacaattttttaaaagacaatttttcttttcttttttgaaattagtaaaattcactgcctttttcttgtttttgagcattgatttgtatatccacatatttaagaacagtattaagtattaaattcttcttcttcaccagacaatttccctaattctctttagtagcttggtaaagagatggggaaagaagtcggggaaatttcacttgaggaaattcaacaaaaaattacaaatatatattttaaagtgcttacttatagttcctattttaaaatatccctacttagaaaaacttacaattgtatgatgaaaactaaatattatgcaatcccaaataaattcttttttggagaagtaggaactagaatcctaaaatgggtttcattttacttttaactgatttctgaacacccatgtagtgttctggggatatatacactataagagtaataattcattttttattaacttataaatgtcataatatttaagctgcacagctaaatttctgtgatgaatatcaactacctttggaaaaaattgtttgcctataataccaaatgtcaaaatttttagctcaagaaagaaacgcagcttttctcttagacttgaaccattttttgatgcataaacacatatttaacatgtgtcacaacgatttaattttaaatcttgtaatatctgcaagtttgtgtaatttaaaaaaaaaactagaatatctttttttttccactgatatacataggcactattacttccctttttattcagaatagcctcactcataatttgtgttttcgagcatattacaacagtgtgatccagggacattattggcaagctactagatcatttca

SEQ ID NO: 47754 - DNA, 1671 bp, Bovine  19866880813875
  misc_feature (1)..(1): n is a, c, g, or t
nttatacctgtgcatatgatttttttaagtgtgagaaagaggggaaaaattgcaaaatattcagcaccagcaaccctaaattttaaaataccatggactttgaggtttgattatttagctcaagttgtgggttggataagagacattctggtcagaggacttattattttagatgttttatctcctaagtaatactggtgatacagattccaggaatgtatggtcagggaaggtacagaaagcaatattttcatcagagttgcttgagaggttggaaaaagacatatagcaagagattaaataaactattccccaaacccctgtttgtcatttacattaatgacacttgcccagaaagcagggaaagaattgacccaaatagtctatttagtctaacgattcatcaatcaaacatttcctaggtcttccccatgccccaaacactgtgccaggtatgggatctggcaatgcctaccaaaacagccactagcaggaacaaatactcatttcaaagccactggcctaaaacagctcctttaaaaaaaatttttttttctcctttagtttttatccaatgatgatttcactaattccttatggttttgccacttagatatttggcttttgaactaaggccattgagggaaggctgctgctaagtcacttcagtcgtgtccaactctgtgcgatcccatagacggatcaccaggctccccagtccctgggattctccaggcaagaacgctggagtgggttgccatttccttctccaatgcatgaaagtgaaaagtgaaagtgaagtcgcacagtcgtgtctgatcctcagggaccccatggactgcagcctaccaggctcctctgtccatgggattttccaggcaagagtactggagtggggtgccattaccttctccaagggaaggctaagagaccattaagactgattaggataaaatactagcaaagtcctttaggcttttgtctactgagattgctctgtgaaatcctcctcagggatatctgcctaacaaatacaactatttacttctaattaaatttttaaaaatgtttggtgtgcatcactggggctgatggagcaaggaaaaagtgagttcaagtttttgccccgtttttagaattcattttttcccatttctctctttaatgagcatctaagctacatgccctttttgaccatagttttttttttttttttttttaactgatcaaaaagtttagatgtgggaaatgcaagaattaggcacatttctgtcaggttttacccttgagaaaattttacatatcctctccttatttctcccttactttaaccatccagtatacctgtgtttccaagaacagccctgtaacttgaaattcagtttctaaatttcaaggatgacttttcaacacatttgattattgattcatgattaaccttttagttctggaatagggttttagagcttagtttcattggcgtttatctagtcaattccattaatttatactaagtatatgaggatcttctctgaatcacacagtttctttcagtagaaaccaaatatgaacccaggtttccagactcctatccttttatgccacatctttttttttttttaatttttccttcacttattccttctttttttcacttatatttttaattga

SEQ ID NO: 47755 - DNA, 1076 bp, Bovine  19866880866260
  misc_feature (1)..(1): n is a, c, g, or t
nctatttataatatactgatgtttcttaccaagaatctttggtttaatccgcaaaactgaaatcgaccatctgagcccactgccagcgctaaagtaacactgttttattgctattattcaggcccagaaatattttctgcacacacattcatttcaaaattatgtaaaataaaatcctcccaaagctatcagattatagctcacaattacttttgtaccttaaaattctgtggacatattgctgaaggagtgcaggtactatttatgaaaatcattctttgctacaatttttcagtgagtttaaatagcataatttggaaatttattacatttgtttttccttcccttaatatgtcatcaacactggctgcacattctttgaattgcagtgaagaatttggctgtctagacacaacaatataaaaacacaaggcttacttaaagtaaatcaccaactcgtgttagccaataatgagcaggaagattttcctaacgcttttgttctgtgtcattgaaggactcgaagatataaagaccacatgtatttcatatttcctctctcatcttttccattctatgaataaagacttgcaaaagagaaactcaaaaaagtgcaggggttggcccaaattgtcttacattgatacattctcttcagagagtacaatatgtaatgtcaactttgcctaacagatctagaagcaagagatgttacctgtttccctgacctgcatttgggaagcttctgtccagactcttatttattacgataatatcacagcctacagaagggaaaaagagcctggaattttgtgcatggcctccttcttttacggacacagaaaccacaaatagatcaaaggcatttttcaaaatcactcaacaaatccatgctctctattcctcacataactttcttaaaaaaaaaaaaaaaaaaaagaatagacctaaaaacttctgtccctgacttgaaaaagtagcttaatttatggtaagttaattttacatagaaaaaaaattattactttaatgcatgtgtgtctaaatcatttgcccggtaaagactccttaaaaag

SEQ ID NO: 47756 - DNA, 1311 bp, Bovine  19866881054491
  misc_feature (1)..(1): n is a, c, g, or t
ntttttttttttttttggccaagaaacagctttatttccaaagacataacaagtttcatagaccatttaacttttcactaatatagaagcaagaatttttttttcaatttaaaaattagtctgtttacagaaatgtttgtagatgctttacagacctttcagaagactattcaatgttagcttggcatgttaaaagatttctaatatttttgtctaatattgcccacaagagtgactagtaaacattctccaactctactgtgaagagaagagcatcattttttttttcaaacaagtctttgatttaaaagcataatacatttcaaagaatcttattcttgtttagagtttccagagtgcctgtttgctaggaaaaatgaaaactttgcatactgttttccataacttgatattaagtattcggagtatgcttaagtcttagcctgtaaaatatatctgcaactgaaatgttacctttttctgaatatcaaaaatctgtgtacaacttccaatctgatatggaatattgtacttcagatctcagtgagattatcttcaagtttactacttgttgaaatggtatttattgaaaattggacattctgtcacacacaatctaacttggtaacattagaagtgatgccaagtttcctacaagtcgtctctgtctccctgaaaaatttataaggggaatcctagcagagactggcagtgctaagatttaaatatttttcatgtacttaaactttaaaatttgtaaatttcactaatgaaagtaggtaagaaagtactgcatttagattaaaggacatgatgttaaaacttgccttacagtttttagtacatctcaagttggaataaatcaaaaaagataaaacttaatgagtctgctgttatttcttataagacacttgcttgtaaaaatttttctctgccttcatttatttttatgtttagtttaaaagctaaagccaagccaggaagaggaagacaagatgaggaaccccaaatcaaggtaaacattgttttagcaaagtacagcattgtgacataaaccagaaagaacattatcatgcatgtcatacgaggcatcccaacaaaacttgtttttcttttcttagggttattttctatgtaagatagatactattagagcaaatatttctgcatacttgtctttcaaaaatgtctttcatatggaatgtgttcctttttctaatttccagctaaaagaaatatgaaatatccaagtcttgcctggaggctaaacagtcttctgcaactgataccataaaaactaaagagaaaaat

SEQ ID NO: 47757 - DNA, 1515 bp, Bovine  19866881055082
  misc_feature (1)..(1): n is a, c, g, or t
naacatttttacgaggatatatatagatgataatatatctggtaatatatgtgaatctgcctgacaatatatattatcatatatattataaaaattttgttataaacatagtaatatgttaaacctattagtcttataatctgtgaaataaatatagttttaacatgtattatttaattaaatcttaaatgtcataagctataagtcacaccagtattttatgtaccactataaaagaaaaagacattatcaattaaactaggacacaaagatgcatcctaatttcagtgatattaacatctgaaaaaaaagttcatcttattttaatagagggaatgtggtaagttacattgtcaacctcacttaatttatatatgtgtcatttcagatttaactattgtgaaagtagcatggtttttaattctgcagtttccatattcaatttaaaaggtatgaatttaagagtagtacatgaacctagattctggcgtgacagactgagttagaatctactttctgcgatttaatcagttacatgatctttactaagtaactgttgctgttatcatcatcattattattgttttaaatattgtttatgatatgaaacaattggcaatcctcatagtgacttgtattggatagaggaaattaatcccgtccaagaattttcgaaatattttctactgatcacaaaagaactgagtgaaaaatctatttgattcaaggcaactacatctccatttctggagaaacagctcagagctctcaggctgctgacagtgggtcagaatctgatggctgaaatgttcattcatacatatgactacagtgtgctaataaatcatttcctccaaatggtgctcctgtcatcattgcatcagttaacagtacaacagttctcagaaaacatttggaacaaatgtgcactcttttaagaatatgttatattttatccaaacccaaaactgtcatgctcatttcaattttattcacaatgtgtaagaatatattctatttttgctagaagaaaaaatattcaattgaagtcaacatattttgtctatagtgagccataatgcaatatatagcttatatgtaaatcatttatcagtaagtccaagatgcaacaaatatacatttcatcctctttttctttttgaatgtgtggaaaagaccagtgtcttaactctgtcaacttgcatattatatgttgttgtttaatcactcagttgtgtctgactctttgtgatcccatggactgtggcccaccaggctcttttgtccatgggattccccaggaaggatactggagcgggttgccatttcctcctccaagggatcttcctgacccaggaatcgaacccacttctcctgcattggcatgtgggtttttaccactgagccatcaggaacacctcacatacttcatgggggtaggtaaattcctaaaacactctgggcttcaaactgatcacccagatatgtgttatggagataataagaattcaaaaa

SEQ ID NO: 47758 - DNA, 717 bp, Bovine  19866881063862
  misc_feature (1)..(1): n is a, c, g, or t
nagtaagtttttaaaagaactttacctacccgtgtctttttctagcagtgaaacttttctaaagtttttaaatatgttaaatgtagctttcatatgacacaataaagggaatgatgaacttgaagatgtctgtagttttaaagttaaaattaaacttacggtatttactttttgactgctgaaaagtttttcttttaataatgcaacaggtaaataagattcacatctttctgatgaggataaagaactaatttactggatatttcgttttccattttagactgtaattttacttttgggggtgatcagtaacagtctaggtgctttgtaactttttggggggggggagggcgaggttaggggcctacgttgggggtttgactgacaatacaaaaatcaaagtgcaaatttgcttaacgtgcttgctatagaattctacgctttgttctttttcatatggaaatcttgactgatgttctatagccttgcaaagcaaacttcctaacaaagtgctttgttaagatcttgcggttacttgacttccacgtggttccttcctagaattttacccagtaaacaaaaggtataaaaatcagagttgtgatattgaggttcttaaagccacagtaaagggttactttatgttagcagcactatggaaaaatcttgagactcgcaagagagccaccattgactcgaccacgcggcaattcagga

SEQ ID NO: 47759 - DNA, 914 bp, Bovine  19866881084333
  misc_feature (1)..(1): n is a, c, g, or t
naagcgacttagcagcagcagcagcagggacaatataaaaaagaggaaattatcctgataacaaggtttataattccattaagtgctggaaagtattttcatgagactccacacatgcgaaaggtatttatgattttacatagggaaatagttatgcatacaaaaactattaacatgctgaccctacagtattagtagactaaagcaatctcttgaattaggattttgcttacactgcttaaaatatccctctagccttcttagcttattgacaactatggcttgaagagtcaaatacaaatatttaccaaactttttttttctatttctttcatcaaagaaaataattattttgtagtaataagttgtgctgttgaaaactcatatcatttattgcttattacttaagtgattaaaaattaataaaccttgtactacatttctaattggctttgttaaaatataatgttacaaaataggtacctcaaaaagtgattttttatgagtagtgaccacattattcctccaaatagaggagctttttggaagaatttaaattgttgtttttagtaataaaatggaagatttattgtgtagttttcaggaacacacatgtatatagtgaatttggctttttgtctctttatttcatcacagattaaaaggtttggcaatttctaataaattctgaaagactgacctttattttacgacaagcttgccagagaacgccacaaaactgattggacttctaaaacttatttattttcatatggtacaattcttttaaatggaaatatttacttttctagactggggctgaaaagcgctcctaaacggacccttttttttgtttttaagctgtttaatcaggtggagacaatctaaatcagatgtatgttaaagtacaaaat

SEQ ID NO: 47760 - DNA, 1629 bp, Bovine  19866881086772
  misc_feature (1)..(1): n is a, c, g, or t
ncaagacatgatgtcttgtgtaccagagataagctgtatttactaactaggtttttagtttcaacattctcttctattcctgatttttcaaaatgcttttctgtcctttaatgaaggtcttgatactgaacttgatttcatctcccgttcatagaattgcaagctgatttttgggctcatccactaactttgttgtgtttggaaaggtgttcttagaatcaggatgcagcgtcttacctgagagatagtaagtgaaaagagccttcatcactgtgcctcattcattcatctgtttgcttattcatttatccaggtattaaataatacatttatacattctgttaatgtgtccaacataaatttttagataagaactccagggtttagtaactgattggacattgggaaaagtaaagtggaactctttaccagttctgattttagtaaaaattttgccaagcaaatctttactaccagagagccagatcattaactttgtagccctctcccctttgacgccactgaacaaaacgtgccccaagtaagggaatcctctgtcttgggcctactgtcctctgtccttccctctcaattcttttacagccttgcttttcatgttgcctggggatgctgcttccatgatggaaaatttggccagttctttaaagagtgattgttttaaattatcaactaaacccacttaagatgtgcagacttctttttactacttagagtaaatgactatttaaactccatattccaaaaggtaccctttaaaagaagtaataattggataagcatagtaaaatatttaataagcaaatcgaatatggtatatatatcttatcctcaagggaacctcctttcttatgactattactattttgttattgaatcttagaaaagtaagacttaacttgtagaataatgacataaatgtaataaagaaattactatctttaaaaacgtgagctacttttaaaagttacaaagccaagaagatgaaggaagacagattattttcaatgcacatcttgtttttctctaagtatatcaaagcgaatacttcagatagaaaactaacagctttctatggaaggcatgtgattgattgccagacaagtgataaagactagcttgacttgatcttgtttctttctttttttcatacacatgcaaacttcatgttcgaactcattagtttaaaacccacctttgtcagctaacaaatggtaattagagtagacttaatcctaatgtacctcccagaggtatgttgacaaaaagaatactggcgattctattctgccttcacatgaaaatctgttctaaagacattattataaaaagtcctcctttatcctctaagtctttgaagaacttaggaatggtaaatatcatctttttgattataaacttgcaaacaagagctacatgaaaagtgggttattttcctggcctgattatgttcagacaagacataatcttttcatgctggtctgtacaaagtctgatttttattttttccctaagatgttgggaaatgaagtgaaaaactattttaatagtccctgttctgattttttctagatcttccatatttgttcctgaaaatattgaaggttagta

SEQ ID NO: 47761 - DNA, 732 bp, Bovine  19866881152519
  misc_feature (1)..(1): n is a, c, g, or t
nacctgtgtttgaagaaccaaatggaaataattttatatctctagatttttccagtgattctataaaatttcatgagtgtaatagtatacattctggaaaaatagtattttttttaacaacccaacccaataagttattattaatatagttaaattaaaccagagacatagcccacaagggttatttcaatgaaaacaataagaaaggaaatgactacttctgaattgcagtgattactaaagtttaagttattctaactatctgtttcttttgtgtctgtgaaaaccccctaaatatgcctttccaaacttttggtagaaaattatttagactaatacttacttaatatttcatcataattcattccagtttttcaagtacagttttggaaaggccaagagctgtctggatgatggaatgtatctgtgatattactaaactccataagctttaatgaaagaaaaactccagtactgcatatagttgctactgtttgttccagacagatatttctatattatcactgtttacacagaaaaatctttatagcaaacatgtgattttatctttagaattaggttcaatctaatagcattccaaatagttctgatgaaagacctagatgctatctgggctggaatggtaaaaccgagaattccaattcatcaatacgataagtgagttccatatgctaacctgagatggtgccaagaaatattattaagtaaaaa

SEQ ID NO: 47762 - DNA, 863 bp, Bovine  19866881473906
  misc_feature (1)..(1): n is a, c, g, or t
nattgccaaaacttcttaagtgcataacttaataaatgtcagaaaagcaatataaaatgaatataggcaaatattgaaacattttgagatgtttctctgattgaagagtttatttttacccagactgcaagctattggcaaatacatttgtttttacatgagattgggtgtatgattattcagtgacagatgcataaaactttttttaaatgatgcaaacaacctttaacagtatttgaattattgtggatttgggccttaatggcacctcaatttataattttctaagctagatttcttacagttaaatggctgctttgaagccagttcatgaatgtcatcttaggaaagttagtactttttatgagtcaaataatctaaatgttttcttacatctcattattttgagttttgggatgaagcactgctagccggcccataaaaacagtgctattcacactgctttggtgtgagccatcttcttctctgccatcagttgtcctcttttattgagttctgatcttagtctctatcctcacaaatgcaaactcaaccattgacctgatgataaactgtgtacaaaacggcaccacaccaatttgccacgtagctttgagcaagagactgaatctcttgccatgttatgtacgttgccaccccaaagagtacatttttaatatacttatttcatatcacactggaagtgttaccctagtcatagggtcttaaagtcaatacaacaacatagaaagaggctagcaggaatttctttaaattatgttttctaccctagaaaatttatttctacttaccgaaaggaaatatttacaattggctcaactatctttattatcaacccaaag

SEQ ID NO: 47763 - DNA, 729 bp, Bovine  19866881584290
  misc_feature (1)..(1): n is a, c, g, or t
ntcggtttgtatttcatttaaaaagaaaacaacgttttgtcaaacccggaactcagtcaccccgcatctgtttacagttcatagaatgactgagtatgtgtgagaagacaatggcagaaactgggaggatttctgccgccctcaggagccgcccccctcctaaactcttctgaggctatctggtttcttcccgccttcattcctctcctcttcagttcctccttccccacaaacaactttattctttgtgtgcagaagtttgccatttggtctcaaggttagttttaatacctaaatgttttcaactgctggttcttcaatagcctccaggactccgtctgcacttttggtgactgtctaacaggcagggcgtaaatgataggattagttttcatctacacttggagccacagaattttttatttgctttagagcagtagctctcaaaatggaaacttttaaaatattttaacttatttggttaaaaccattgggtcatatcacaaaacacaactgaaggaaaatccatggcgaggacttgtagggaaaggaaggaccagagttctgatggaggaccaataaagggaataaaaaatatcatttaaatatcttatccatttccctttcttatttaaaggaaaatctcaacaagcaggctagcctgtaacatcattcttccaggcttctctgttcctgtttaacaacattaaaacctgtctgtaagccccc

SEQ ID NO: 47764 - DNA, 702 bp, Bovine  19866881714645
  misc_feature (1)..(1): n is a, c, g, or t
ntaaaaaatttcacatgacagggagcagatccacgcttgactctcacttggaaaaatccctctaacctagaaaaactaaacaaaacatcaggttagaattcagaggttagaaataatggcccaaaggagacatatgttgactgatacatttcactcgatacatttcactggaggcatctgactctgagtgtgtgtgtcttcaagaatttgaacaactttgaaacacacacaaacttaaccacttcccccacattctctactaccccattcatctggtatctagcccatgtcacagtcacagatttttatctttttgaaggctataggcaattaagttttcaaatattgtttaaatttgtaaaagtacatttttacagtttaccttctcaaagccttcatggttgagatttaagtgttcaatatctcatgaattcttgcatttatgagatgaaaaaaaaacagccttattttttttttttaatcaggaaaaaaacagttcatttctttggagatgttttgctccatggagtgaagcttagcaggataggcagataatcctgtgcgcaggccacagaatgtgccacagtctgtttttactcttttgctttgagttcagtgtctccacttaccatgtccacctaatcttagttgaaatcatgggagcatcgctcttaaagggaatatgtgtggatccttctcatg

SEQ ID NO: 47765 - DNA, 1627 bp, Bovine  19866880072763
  misc_feature (1)..(1): n is a, c, g, or t
naccagaaagggaaagagacacgtgtaccccaatgttcatctcagcactgtttataatagccaggacatggaagcaacctagatgcccatcagcagatgaatggataagaaagctgtggtacatatacacaatggagtattactcagccattaaaaagaatacatttgaatcagttctaatgagatggatgaaactggaacctattatacagagtgaagtaagccagaaagaaaaacaccaatacagtatactaacgcatatatatggaatttagaaagatggtaacaataaccctgtgtacgagacagcaaaagagacactgatatatagatcagtcttatggactctgtgggagagggagagggtggggagattttggagaatggcattgaaacatgtataatatcatgtatgaaacaagtcgccagtccaggttcgatgcacgatactggatgcttggggctggtgcactgggatgacccaaagggagggtatggggagggaggagggaggagggttcaggatggggaatacaggtatacctgtggtggattcatttcgatatttggcaaaacaaatacaatattgtaaagtttaaaaataaaataaaatttaaataaataaaataaaatctttagagtcattgaattgtaggacacccagctggtattgaaaaattactggggcgaaaaatcctcatatttggtgtcataacttttgagaatgtagaagaagcagtttattgtttttttttttaaagaagcagaacaattttttaatgaaattccaattagaagcctaataggcatgacagacaaaagagagatcttgagctcaggctgtactagtagctggtcttgtactgtttaaaacccagctcactaccccttgctcctaattctgtcttacacacacacactcacacacacacacacacacagtcattcctgtagatagggctctgttgaacccagttgaaatcctcttgactccctgatctcttctgcctcttccagttgttggattctatgtacaattgtgtagacacatctagtagtaaaatcttaaaacatgctctcctctctacagtgttctcaagtggaaacaacacaagttagaaaagagggcaagtaagcatttcatcatttcatttgatttcctttagggctcaagcaaataaagaaatattaatttaaagcctcaccatatgctataaatttctctcagggaaacaggaatgagaaacgcagtttctaagcacttagaacttagcacagtgactggcatcttgtgcttgtgcttgatgaatgatcattttaactgaattgaatattatagcaaaatatatccaagactcacaacataaatggctccaacatcactgggcagaactctttgtgattaattccattagatacttgaaaatcaatttcattgaccttatttttcctcttacttcaatataagaacatatttagccactcagtgttgaacttcttcctcttttaactccaaacatagatttgagagctggatattcaggtagtctcttaagaacctcatccttcctctctacacagtggaacacatttgtctttaaataatttacttttcagtatcattatc

SEQ ID NO: 47766 - DNA, 1700 bp, Bovine  19866880762209
  misc_feature (1)..(1): n is a, c, g, or t
nctttgactgtgtggatccaataaactgtggaaaattctgaagtagctgggaataccagaccacctgaccttcctcctgagaaatttgtatgaaggtcaggaagcaacagttagaactggacatggaacaacagactggtttcaaataggaaaaggagtacgtcaaggctatatattgtcaccctgcttatttaacttatatgcagagtacatcatgagaaacgctggactggaagaagcacaagctggaatcaagattgctgggacaaatatcaataacctcagatatgcagatgataccacccttatggcagaaagtgaagaagaactaaagagcctcttgatgaaagtgaaagaggagagtgaaaaagttggcttaaagcacaacattcagaaaactaagatcatggcatctggtcccatcatatcatgccaaatagatgggggaacagtggctgactttattctggggggcttcacgatcactgcagatggtgactatagctgtgaaattaaaagacaccccttggaagtaaagttatggccaacctagacagtatattaaaaagcaaagacattactttgtcaacaaaggtatgcctagtcaggctatggtttttccagtagtcatgtatggatgtgagagttggactataaagaaagctgaacaacaaagaattgatccttttgaactgtggtgttggaaaagattcttgagagtcccttggactgcaaggagatccaaccagtccatcctaaaggagatcagttctgggtgttcattggaaggagtgatgttgaagctgaaactccaataccttggccacctgatgcgaagagctgactcattggaaaaggccctgatgctgggagggattgagggcaggaggagaaggggacgacagaggatgagagggttggatggcatcactgactcaatgcacatgagtttgggtgaactctgggaattgaggagggacagggaggcctggtgtgctgtggttcatggggtcacaaagagtcagacatgactgagcgactgaactgaactgggagcttaaattttagatatagagcacaggacttgaactctgtcagcaaaatgtatggtaatagcttcatacaaatattgcagactggcacaaactcagaaaggcataggctggtaaggagacatttgccccaaatttgattgctctttaataaaaaattatatctcagattaaataaagctcttacaactctgtaagatagaccagacatgaaaaaattccattaaagacaaaatttggtaaattagtctctcttgctaaggtaccttacctagaaatgtaaactgaattaagaggaatcttaacatattttttaaggtcctgggagaaatggactgtctttagatatcactttgagagacatattaccctaggccctcttatcaagaacaaaataaggattggagcatcaatggaaaaatgatactttctaagaaattgtacctcttcctttgtgaataggtttatgtgattacggaagtggatcagggcccatggtgatccaggcattgctgtactggtagcaccacatttttgtgcattcatacacaaactgacattctagtgcttgcttccttgggaaaagccagaatggtgcctgtctggaccaagatcccacagagaccttgtcctgcaaaccctcacaca

SEQ ID NO: 47767 - DNA, 745 bp, Bovine  19866881450608
  misc_feature (1)..(1): n is a, c, g, or t
ntgctttttctgattcttgtcccgttgttgttttgaaacatttaataaaactgtataatagtgaagatgaaataatgccattctagtaacttttcttaatgcgtgtgaactgtttatttccaaagttttcagattagataaggcttctgaaacagagtctagaatgctgagatgatttggcaacctgagaacagagttgtaatcagaccagaaagactacagttatttcttaaatctacagtgaagcttccttccatgaaagtccttcaaattatgtaattaagtggttcaaagggcccaggctggtttgagtgtgttataacagcacatttatcacactgtacagggagtttccagtaaagcaggtttattcttctgtagcctgacaacagagaattacagaaaacaaagcagcatagataaaactggctgtaaggaaagttcttttacgcacttatgttaggaataatctggaaatcataaaaaccacataatagagcataagggaaaaataaaagttttattccctccccacaagttaattgttctgtattttcttatgtatcatcttcagtagatacatgtagtctgtaacccaaggcatttttgaaccaggaaataaagtactgaaggtttttaaatgtgtgtttaaaaatcctaccaatacaatattgtaaagtaattaacctccaattaaaataaataaatttatattaaaaaaaatcctactgcagtaaaataaaat

SEQ ID NO: 47768 - DNA, 1100 bp, Bovine  19866880601530
  misc_feature (1)..(1): n is a, c, g, or t
ngaactctaataaatagcacagagttaagtcaggtaccccaattattaagcaaaagggatagattaaaaaagagagaaaagagtaaggaggaagtctactctatgaatgttaagtagtgaaccaacatatggcacctattaaaggtatatttatgcatataaatttatggtaaatgttagaatccatatggagaaagttgtacatctgccaataggtgtacttacctggaacagccagatgtctctacccaaactcagagagcaatttggacccatgaaaagccaactgacatggagtacacttgcaaagaaagctattacataaagagatttcaaattccttttgactttaacagactgagaaaagtgaaataatgacacaactgggtgtctcaaaaaacactaagttaatctgaaaccaaggtgtgtataagtgaatgagtgaacaccttataatactttcaatatttttatttttgaaaatttcaaaaatatacaaattaaaaaataacattacaacgaactttttcttaaccatgtccttgagtcaaaaattattcactctttgtcaatcttgctttatttttttcccacccacatccacattttttgagtttttttaaaatattggaattgtttactgtcttcagcccaaagagggctactgctaagtcgcttcagtcatgtccaattctgtgcgaccccatagacggcggcccaccaggctccgctgtccctgggattctccaggcaagaatactggagtgggttgccatttccttctccaatgcatgaaagtgaaaagtgaaagtgaagtcactcagtcgtgtccgactcttagcaaccccatggactgcagacttccaggctcctccatccatgggattttccaggcaagagtactggagtggggtgccattgccttctccaaaagaaggctaattttgacaaatattggatgatagcacatttggggaggtctgcaaatccagcaaataagtttcagcccatgattcaaacaagtaaaatccaagatcggacgtcctgatgggggtaagataaacatttacactatctgtgtcatccttcccttaaagaga

SEQ ID NO: 47769 - DNA, 1852 bp, Bovine  19866880728180
  misc_feature (1)..(1): n is a, c, g, or t
nggacagtaataagacagaaagtttggtttaaatgcacttctagtgcttcatccttcctcataagtcatggcaggaaagagttcaaaattggttgaaacagtgtgtgccatcaagaggcagattttcaaaaatggcacagctgtgagtttggacaaatgcttaataatgtcttctcttcaagaaaaggctaatagtatcacttctttggctacagagtaggaattattcctcaggatactgacatgatgaatgtcagtctcctgatgtatggtcttccttagcaataactctgctgtcctgtcaggctcaaggagggaaggagctctttatgtggccatactgtaactcaatgaggtctgctctttctgggaacttcgtatgaactcctcctgtagcaacgtctcttgaaatgagatgctttgtagatttctctggtgcatgatcagagatgccaaaaatagcatatgcaccgaagagccgaatctggtgtaaaactatttgcaccttgtagtgctatctgtcgacccacaggttgtgatcaatgaactctcagcccttagcatcgggctcaagctcctgaaagggggggaggacatccaccaccttggctgcctcacatagtcagtagccagcctttgagagcctaaggtgaggacgaaaaaaaacaaatcacagttgaagaaatcaaaatcttcaagataatggaaacaaattcaagatctcatggagagtgtgctatgacagaggtacacgtagagaaggccaggggagaaggagcagattgtgctgagaatgactgaggaagaattgaagctaatccacttctcaggctttgcaaatttttccagttgtctttctcctaaagtttgatgatgaagaaatttctatctagaaatcccctcttagtatctttacaatattaaagttcaagaaatgattgaagagaaagtatgctttatacaagacaacattatagtatcttaataagccccttatcctgagtgttttacttgcagggctcagaattactctacttaggacaatgctcattgattcaagaggaacactgagcatcatgcaacatgtacagctgttttcctgtggtagagggggtggggggaatctgggaaaatgaaaccataagaccaggataaaactcatccttcacatctctgtaaggaatgaaaaattcccctgaacccctggatctggagctgaccagatccaggacaccctcagatgcaatgagctcagtcattgttgccagaactttatcatagattataactccagtacctctgtgtcatcagtacatcatcccttacctacaatcaaattgactcaagatgctgggatgatgtattgtatttaaaatgaaagtcatatatttcactggcatcagaccaaatgaagaaatgattaccaacccacctacctatttaaggcatacaacacaaaatgagcatcagaggctactgctaatggcagaaccactgcaaatgggaaattttcatgtattcctatattcttatgtttgcaatttatttttaccaggttccatctttaagtctagattaatttatggatgtaactgaaatgcatacagatatatttatttaaataaatatttattttagaatagttttagatgcacagaaaaatgttagtttcctaacacctcacacccagcttccctttctattaacacttcacattaatacaacacatttgtcacaattagtgaaccaatcccgaggtataataatcaactaaagtacatactttattcagattttcttagtttttactcaatctcctttttctgtatcagaatctcattcatgatataaa
